United States Patent Application Publication US 2026/0130347 A1 - sequence listing, part 2

SEQ ID NO: 81 - DNA, 193751 bp, Hippotragus equinus
  source 1..193751: mol_type = genomic DNA
gggtgtcctggggcgggcttctgggctctgcagcgcgggaggaggcggcggcgacgctggctggcaggcagatgatgctcggggcccgcagccgttgggaggcagcgtgagcccgagagaactcgaagccgccgcggtggcagcagcgccggagcgcagcctcctcccgttcccataatgcacagggaggcggcggcggcagcatcactggccgtctgggtggctgtggcggcgacccggaggaccccgggcacgccgcgcgcgcgccactgctcgcggcgagcccgggagtgatggcgagccccccgccggccgccagctcctgaggcgccccgccccgccctaccccgccccgcccggcgcggcccgccccgcccggccctgccctgccctcctccctgccagcggctgccggggcgcttcctagtcggcgcgggcggccgcccaggagaggtgcggcctccgcacaggcggggggcgtcggcgccccgggtcccgccatggccgcgtccgagctctacacaaaggtaaggcgccccgcgagccgcgcagtggggagggggccgcgccacccgccgcagtcggctgtcaggccaggaaggggccggggcgctggggccccgtgcggccccgcctgcaccatcccctttccgagcctttcaaaatcccggtccctgcccgtgggtcaactgcaggggcgccttcctctttcgggcgttgatggttaaggcggcgggggcagccctgcctcggggtgcctctctggtccctgccacgcttctgggcctggagcagcgcgggtctctaagtggaaagagggcccctatggatttagtagggcgggcctgggtcaggattgctcagctctcagtcttgctttaggaaaaatcctggctggtgggagatgctagatctggtagatctggtagatgctagatctggtcggtctctcccttaggaacacgcgcttaaaataacgtcttgtgttggtatgcggtgccacttgaaccgccagccaacctttctgtgagatttggaatcctgcaaacggtcgccagtcgattttcgcctttagttgccgggtttcagattgcttaccctggggtggaaagcccctggggaagatacgaataaatgcaagctgatttcactgggatggtggatactcatttgtcgctgggaatttgcaatctgcgtgtaatcccttagagccttgttaggctccatgtcttcaccagccgctggggcgagccttctccttctgggtttagttcaagggaagtggcagcctttcctttcttatactgacgccaatattctctggtgctgctgatctctgaatggcatattttggagaacttacccgtcaagacagtgtgtggtgccctttgtgtgtgtagtcatggcattttatactaccactcctgtataggtcagtgtttcgccagctattaattacctctaatgccagttaacagaattgccttaactactcaagtttgcatttgtgtcttgcatttcaagtctacatttatggtcccagaataaatatgacccaagtacacacacacacacagacacacacacagacacacagacacacagacacacacacagacacacacagacacagaccacagacacacacacagacacacagacacacacacacacagacacacacacacagacagagacacacacacacagacagagacacacacacacagacacatagacacacacagacacagacacacagacacacacacacacacacacacacacacacacacacactccggcccctgttcttctagtctgggccttttcacttactgtgtgaccttgggcaaatcacttaatctctctgtactttagtttacacatctgtaaatggagttaatttcacctgccctgcctctcacaaggctgttgtgagtatcaaacttaataacagatgggattgctcttgtaacctgtgaatttctttacaagtataaggtatatttcttcaagcatgaaatgagtttgcatgaaacatttcctgggatctctttgtttccagctgcagatttgaaaactacacaattgaaacttctctaaacctggtcattcttaaggcattgtggattctaacatatgattgaatgcaattggaaattgatctgaatttacttcattaagaaacacttatataaagctaactatgtgccaggtactgttttaagtgctttatacatattaactcatttcttagaggtaagtgctaagaaatatcagtcattttcacaagaagagatagggtctataaatattcctcaattactttgtatagaccccattcttcgctgcctgaggagtccatctttcagctgcctgcctatttgtagcctgcttaacaagactggttggataatacgtttctcttggattttggatctgtattcccatcccccccacacacacccccaaatgattggcaagaaaaaaaatttttaagatcctgggattttttaaattgtaagttttggggctttcatagtagcatcatcacaatcttttaaaatttaccctctagtcattgtaaaaacaaactggtttaggcatcaataaggaagttgagcttaattgtcttctcctaaatatatttgtatctaagaataatctgatcacttggcttgttggcttattctttttgtgagtggaccttagcttaatggcaggcagaactatttattgagctcctcctgaatgccaggtaccctgtggaatgttcaggggttctcacatgaacaagacacagtccttttcctcaaaggactcatagcctgcttcttttatttttggcccaatttgaatctccaagggcataaataacttgctgttgcctcaggagcaggcagacagctggtatgatatttatttgtagatgttagggaacaggttgggacataagaaggtcggaatgattctagagatagaggcttgggtagtgattattagaggaagagggaaatcattagaagtaatagtggataaacacaaggatttttcccttacagagaattatagggaaggaagttctggggtagtctacaaagaaagatgtaatagtgacatgccataattatgatattcaacataaagcagttaaatttgtaaagtgccctttaaaaaaatgtcattcagagcttaaaggcagatttagatgtgtgatacaaatcagctcctattacagtgaaagacaaaagattattcagtttattctttttagctacattgataatagttttgtcacagcaatttagcagggcttcctctttgtgaatttttcaagcagtataaacattttcaaggcaatagcctggttcctaggatacaacatttctggaaactaacattttgattaaaacatgtttgttgttggttaaaataacagctttattgagacagaattcacacaccatacaattcaccaatttaaaatgtacagctcagggctttagtataaccccacagttgtgttgatttgcttttagatccacctgacttcttcctgaaagaattacgggtggctgtgacatcttattatatctggttttgaaaatatttgctagtcatgacttgccagtggatatctgaatcatgacatcacttgtaactactttcagcaacttcaaaggattcagcatttgtggaacagggtttattaattagacctgaatggatcaccaacagcaatacaatggcatcccagtcttcctctcatgaggttcccagactccacaggcagcacacaaatgctgcagaataaccaggattacctgaagttcaattaggagtcccatagtttgtcaggatgttgaattttctaacagtacaaaagctatctatacccccaacttgagaagccaagtaaacttccttaggtgaaacacctgttaggccaatagattgtattccgtaatcttcctttcccattatatttcttcatacctaccgaagccacatggactagatattttctgggatagttccaattttgtgttctatgccattgtccctttaaggcatcaatcctggacattctaatatgttggtgttgaaattccatttctcagactgcctccaacatcttaaagcagaacagaaatcgctgctattgtgccctgatttggggctttgacaagtatattcgcttttctaaagtctcctgtcagtctcctctgtctgtatttcttcctaatgttctttggcctgttaatggttggaaacctctgtagccttttgtttgtccaattcttctcctttactaattgtaatttcacttgacatccagctgacagttctgtctcgatggcctgacttgtacacattttatcttaatatagctatctgtgtgtatgtaagccactcccataatactgttagccccctgagatgctgatcagggttgtttacctcctatagagcctagcataatgtcttccacacagtaggtgctcattaagtatttgttagatgcatgaaagaatattttaacaggagagaaacagaaaataatggcttgggatgattagtccacttgtaggacggaaacagagtataaagaaatggttaaacaagtcagcacattttcaggcatgttgaacagggtgagtaatggagaggagagctgggcaccacggagaccaaggaaactgttggaagaaacagaatggaaagtgatggacatctactagactgaggtataggcagaaggtgtgagagctctctgtgatgaagcagattcaaggtgggaaggagaatagtgtacgttaacaccagtggctctagctttagaaactggcagttaattctcattgtatcatgaagttttgctgactctgtgaaacttgtaagctactcagaaatacttctttaggctgcttgagcaaagcagaatagtcttgatttcctcttgaaatttgttactgtttcttgaagtgtgacagtttgatgtattgcccagtggctaaaaggttaccaaaaagttacaattttaatgagagttgctactgccagataaatagtttatatcttcctggtgctttttgaagtaggggggcattaggatgatctgaatggggttccagggatttaacttcagcttccaaaaggttgagatgggatggagggggataacattcctattgagagtgtggaagaggcggcaaaattagtcaggagactctagaggcacatggcccactggaggatggattggctttgttcgtccccactttaggtagtttttaacaaagtatgaggtattatcagaagtataaactcctggctgattttcggaataagacctgaccctaggtgaaataccaagtgggcagccccactccactctgacgggcctatcctctcctgtcccacagtggttttcccagactttctccatttgtctacctgggaggtggtcttcttcccttccctctggctcctacctctgtgtctgtctttcgctaatcaactttatttatgtataatttgtatgtaataaaattcattttaagtgcacagtttgagttttgatatgtactcaccatggtcatgtactcaccatcacaaacaagatatagaacatttctgtcactctcagaagttctcaggctcttgggttcttctcttcccctgcttattcaaagcatttactggaattggctcacctgcaggggcagaggaaagagttttttttttttttttttttcaaaaaatgtatattatagttccaccttggagcccagctgatactgataacaatacagagacccacacttcatcaacagtgggagatgggagtagatggaaaggaacttaggtggtttatttaatctttctttcattcctcacctttgctaatggtgtttgcctttgatgcctcgtttccttaggtcatgagtgtgctaaaatgccctttagtcaattctgccctttaacagttctcttgccccatcgaccttagttgtaatgcctgtctgggtttgtactgatagagatttttaacctttacagaaacttatccctggcttcttcacaccttagatagcctccacttctctttaaagcccttttcagttgaaagtctctttaaccagctttcatttgcattaaatgtctccacagaggccttttgccaattgtagaatttagggataatgtgattatgctttaatttcaaaataatagctgcaaatttgattgaaatcaagggagaagtgcatcatccactcctaagtgttcatgaggaacatttatctgcctcctttggcctgaagtgccactgtgttcataaatgtgagcacagggctggactggagatgggacataaaaaaaacaggttttgtctctctattcactcatacaaaaacatacattgtcttggccaggaatcctgtgtctatggttggggttttaacttgataaatatattctgaaggaacttcagaatgggagaaataaaatgatcagggaagtgaagaagcttgacagaataaaaagacagactcttcaaaaagatgaaggtaaactgggaaagtggtgaattatttaatatcaagattagaagtttataacatcaaaccccagtttagtagggatacttgctggagcttgaaataaacagtcatttaaaatgaatttctaatctaaccattgttttagacatgtgagacacattgtctcaggttatgatatcagctaagatgtgttagataatagaaagggtctggttaattcatggatcatagttctgacacatagactttccagatctctctttgacagtttattagccagaactgttttagttggaagtgatggaaacccagctcaaagccaaaagggattttattcgcttagatgtcctaaaagcccaggcatggctagattcaagactcagacatggtctctgggattctctgtcactggctttcatgtcaaactgctatttgacattggtttcatcctcaggacagttcttttctggatgaaaaaagtggtaagtagcacccgcgaaccacatggtatagctctgggcctggaagaagagagcctggtggaggatttctgattgaccttgcttgtgggcatgtgccctctcctgacactgtgctgaggaggtgatgggggaggaaggcagtgagcagcccagtcttgctcatctcagaggccagagggaggataggacgttgtgattgatagtcccactcagacctcgtggggttgctgaaagctgttccccatcagaaggaatggtgctagagagacaaaacaatatccactatgaatcagtcaccaaaagtgccaaagcgcctgagttctatctcctgttctgatttttgagcagatgaatgggagggtttttgactgggaggatattggctatctttcccctagagaataagttccaattaaaagaaaagccgtggcgaatccataacagcaaatgttgataaagcatatgaagggggataagtaggagtatgagagtaatagatgtatactactatatataaagtagataagtagcaagaatttattgcatagcatggaaactatattcagtatacaacctataatgaaaaataatctggaaaaaatataaaattgaatcactttgctgtactcctgaaactaacataatattgtaaatcaactatacttcagttttttttaaaaaagcatattagaggtagatgatttaaaaattatcttttattcagtcttaattaaaagtaattttgtgtgagtttatataaatcattttctgcatatgtgtgttttaaacaaacactattgtgttagactaattttaaattaggctagactagttagaacctaatttttcatcttaccatactggagtgattacaataagataatcagctatttctttaaggatacactgtcactttaaaatttttttatagcagtacttaaaacaacttttaaacaagtttgatctctctatgctcaagctgaaaaatattttctagtttgctaagcatcatgctcaggttggaagcagaactactagagatattttccataaaattaagaaaagtacttcttaataataaatttgggtcaaaacctggattaaactttcatcaatttagaatgtgtattcgttaaaatcttattttgaaggtgggaagttaaacccactagagctaatataacccagccttcctgtttatactcattttgttaattctaacaaacatttctcagcttctgcactattctgttttctgggaacatgtcctgtgtgttgtaggatatttagcagcatctctaacctttatctgccagatccagtagcatcccccacccacagttgtgacaaccaatccatgttgtcggcagacattgcctaatgttccccagggagcaatccctgctcccctgcccctgcttgagaaccgctgccctagatcttgagacttagattagggtaggaaaagtgggaaagagttaaaaataaaaatggagattaattggaaaaacttttaaaatttgactttttagtaatacctcttctgcttatagcaatgttgtattatagataattcagagaatatagaaaagcataaaggaaaattttgtaaaaacaagttataccatccagagattatcatttccaaccatcaatttacttctttaagtcttttatgtatttatattggtatttttatgatttttaagcttaatatatattgagataatttttatattataaatatttctttattcaaaaaatctaaagcaaaaatttttagactctgctgtgcagcctgtagaatcttagttccctaagtagggattgaacccatgtccctacattgggagcttggacttttaaccactgggagtcctataacatattcactaaaaatgtttttcgtggctgcataatattccatcacccaggtgaaccataaattgtttaccataatttattttcactgtgggcttccctggtggttttgttggtaaagaacccacctgccagtataggagacatgagttcaaaccctaggttggaaagattccccagaggggaaaatgccacccactcccatattcttatctgagaaatcccatggatcaatgaacctggcaggctacaatccatgggttgaaaagagtctgacatgacttagtgattaaacactaccaccaccaccaccaattttcactgtaaaaagaaatgtactatgatgaacattgttgtacataaatctttgcttggattagtaagctttagtcaatttcagactctacatctctctggcaagggttggcatttatgatttttcagcgtagggtattgatagttattttattttaaaaatagcactttttatatatgttgcttcagggctaggatggccagatgtcccatttctgtgagatggcttctgccatccagtacctttattctgtttggaaaaatcctcttagagtagaatatataagtttattgaaaaaaactaatccttttggaaatctgaactatttactttttctgacaattttccttattgttcttattcactgtttctccttgatcttgggtgaatctgggtcagaaagcataatagaattagaaatattttttaaaagataaaaaaaaaaagccatgaagctgctgtcttaaagtataaacaattacattgtaacttgaaaattacctgaatatatgttatttcattgtaaacaacatatccttctaattagagcaaactactacttgtctggagtggtcagaggatgagtttttcttcagtgagccgtgaagaacctgagagaccttctgcacaacacctgggctttccaggtgactcagtggtaacgaatctgcctgccagtgcaggagacgcaagaggtgcaggtttggcctctcggttgggaagatcccctggagtaggaaatggcaacccactctagtattcttgcctggaaaattccacgaacagaggagcctggagggctacagtccatggggttgcaagaggtcagacaccactgagtgactgagcacacacctattttaaagcaattaggatgggacaaaacacaccagtgataaggacatcactgtaaaatggactcttcaaacatagaaggtgtttcagggtctgtgaggcctgctggtattgcttggtataacagcccactttaaggactggtagccacaaatgtggatggaggtcgattgtgtggaaatttaggtattgaagacataggaaacttgagttgaagccttagcatccttgaaagttctttgctcttcttcctccactaaaacatagaaatttaccttatttagttttcattttctttcttctaaaaactgtgaattgcataaatgcatgattccaaggcagtacagttaacaaatcataatggttaatatttactgaggccttactatggaccagactgttcagaggactttgttacaactgttccttccttggcttccacctctcccagtacctgaaactcaggcagtgcatcatagctgtcaaggcatggactctacacttgaattctggtttgaatcttggattcactattcactatctctgtgaccttaacacttctgtgcctcaatttcatcatttttataatggggataacaatatctacttcatgagatggagaagctctatacagtcagcaaaaacaagaccaggagttgactgtggctcatatcatgaactccttattgccaaattcagacttaaattgaagaaagtagggaaaaccactagaccattctggtatgacctaaaccaaatcccttacgattatacagtggaagtgagaaatagattcaagggactagatctgatagagtgcctgatgaactatggacagaggttcgtgacactgtacaggagacagggatcaagactatccccaagaaaaagaaatgcaaaaaagcaaaatggctgtttgaggaggccttataaatagctgtgaaaagaagagaagcaaaagcaaaggagaaaaggaaagatatacccatttgaatgcagagttccaaagaataccaaggagagataagaaagccttcctcagtggtaagtgcaaagcaatagaggaaaacaatacaatgggaaagactagagatctcttcaagaaaattagagatactcttgagagtctcttagactgcaaggcgatccaaccagtccatcctaaaggaaattagtcctgaatattcatcggaaggactgatgttgaagctgaaactccaatactttggccaccggatgcgaagaactgactcttttgaaaagaccctgatgctgggaaagattgaaggcgggaggagaaggggatgacagaggatgagatggttggatggcatcactgactcaatgggcatgagtttcagtaaactcggggagttggtgatggacagggagtcctggcctgctgcagtccatgggatcgcaaaaagtcagagacgactgagcgactgaactgaactaatggacttaaaaacgttagcggttattattgttgctgttcagttacagctatcattctcttttctgtcatgctgctttgtcttcttcataagctcaggtacctcttatttccctttggagaccggggctcctcggctctgtccttgaccttcccttcctcccactgtggcctgattgtctcctgatgagtcaggaccagccctgtgctgatgatttccaaatctgtttctgacctacttgctctccctataaacaacagacaactgccttatggccatctttagaagcatctcaaacctaaggtatttaaaattgaacttgtcatctcctccctcttcgtgccactgtacgctacttaacttctccattctagttttcttatctttaggatgggataatagtaatgcttacttcatagtgtttttttgaggattaaatgagattgttaatgcagagcacttacaggaatccctggtacatatttaagcaattttgagccactctgactgttgttatttgcattctttatgtggtgaatagcatcaacatctaatccaaaactctaaccccaaacttagaaattatcttgactttctccccccacccccaccattcccatcctactctaactgatcagtttccatttcctggtattatttttacctgttttcatcctttttatttctttcctgaatccccagatagtgtcctaagcaatttttggtattacttcctgtgatctgtttttcattgcgctaccagagtgatctttatgtaatgcacatatctgatcctatcactctgtgtcctgaaattcctcagtgatatccccattgaattttgccttgagaataaatttattgatgtagtgcttcctaaactttggtgtccatctgaatcacttgatctcattcaagttgagattctgatgaagatgggggtggggttgggggtggggccaagacaactaacagcttcccgatgatgccagcgttgctggattgaaggccatgcctccagtagtgaggctgtaatgctcagggctcttcctaacttaccttcaccctgggactgcctcttcgctcgtgtttcccttggggcattcaggtcttcacctgaagtcaggagctttccaggtgccttcttgctgctttggagcattccccttgcctggctttatctactctttgtgctttagttcccccagacccagtctggctaagatgcccctgtgtcctgacacctaccacgctgcattacagttgtctatctccttgtatatttctgagcattgtaaggacaagggagatatcttgttttgattacaatttttattgagatataatttatatacaatgcaattcatctatttaaagcatggaattcagtggttctcacctgttttttgacccagcatctagaccaaggcttggtctagtaacaagcccacaattcaaagaatacattaattaaataacattaaagtaccactggcaatttttctctaaatcttcctctccatacctgtatttttggaattgaacattttagcattcatatcatcttacttattcaccagtaactcttcatgaggctttcctggtggctcaacagtaaagaatccacttgcaatgcaggaaattcagttttgattcctgggctgggaagattcccctgaagaaggatggcaacccactctagtatttttgcctgggaaatcctatggacagaagagcctggcaggctgcagtccatggagtcacaaagagtcagacatgacttagcgattaaacaactattaactactcttactgagcttcttcctcctagcccacactcctctttttggcaccagcaatgggatccacttgatttttctcttggttaagttttgatgcattgttataaatcactgtcccttgttctccagtgcttccagttctgttttcagctcatgctgaaaacaagcagtactgacccaaagcacagatctcaacattctgctttcttgctcaagacccgtgcctggtccccaatccaccccctccctctcaaactgcctactattagaatgaacttattccttagcgtgacattcaagattttttctagctctaatctcttatttggtgttttacaacactggagttcttagtctgtcttagttcttatatgtaccaatcatctgaaatgctttttaaaatgtaaatttctgggtcttgcctccagaaattgatacagtgattttgagagtcccgagtatctgtttttcacaagtgtgccaaagggattctgatgcaggtggtctgtggaagccctctctcagaagctgaagcaagcttgctgctagaggctgtgttccagctttccttgactctggattttgttcaccatgtttccctcttgtgtgtacgtgtgtgcgctcagttgctcacttgtgtccgactctgcatgggctgtagcccgccaggctcctctgcccatggaatttttcaggcaggaacactggagcgggtctctgtttcctcctccagggacccttctcgcccgggatggagcctgggtcccttgtctcctgattggcgggaagactgtggactggcgcccgtgggaagcacggggtttcctgcttgccatagcgaagctcagtaagagttagtggactcggctatttgttgagtcgtggtgatgagcttttttaaaaagatgacattactgttgacatattttcagccaattttcccccccatggctatccttaatgttttacttttaatagaatatgtgagaagacctggcacatagtagtgacccagtaaatcactttgctgtttttaaaggcaacgggaaaaactgcttcacttatgttaaaacttaattgagagtcttctgtggtgaaagacgttccattacttttactaataataggtgtgaaatagcataagaaatgacttgcaaaattactttgggagcttatttatttatagtttttaaatttttaattaaaactttttatggaagctttttaaaaaatataacaaaaaagctgtaaaaataatgaatgttcagtgcagaagctttgaaaattcagaaatacaaaagaaaaaattacatgtaatcccactatccttagatgcttttaatatttgatataagtgtagtggggtttttttttttgtgtgtgtgtgtgtgtgtattttctttagcaaaacaattttgtgcagactattttgtagcaagattttttttctctaaagagtatgttttagacattttcctctaccaatactgttttgatctccttagagatcaatcctaaaggaaatcaaccctgaatattcattggaaggactgatgctgaatctgaagctccaacactttggccacctgatgtgaagagccgacttattggaaaaaaccctaatgctgggaaaaattgaaggcaggaggagaaggggatgacagaggatgagatggttggatggcatcactgactcaatagacatgagtttgagcaaactccaggagatggtgaaggacagggaagcctggcgtgctacagtccatggagttgcaaagagcaactgaacaacagcaacaataccaatgcatattcttaaatactgtgttttttaatgcttctgactattatgttgcatgaattagtcatgttattcaaccaatcccctatgataagtatgttcaattttttgacaatttaactaaagagaatcaaaagcctttgtgtgttcctttaaaaagaaaccaattgtagttgtcaatgaatcatctgactataattatagaacatcccatttttctacaataaaaatattggtgcaaaaacttgattatcatatcaatgttaagaagattaatccagttagagcttagaaggactaaaaaaaaaatgcaagagtatcaaagcactcaggaataaatccttaaatacaactacatatttggtatattagagtgtgtcagccacaacagcctgctagaaggaaattctccagactagagagttagaaagatcaaggttattgatcagtgtgccaggggaatgaagctgtaggttagctccaacctaagaggacagtgggtctcttccttatccaggattttggaaatcatatagtggaagaaggcaatggcatcccactccagtaattttgcctggaggatcccatgggcaggaaagcctggtagactgcagtgcatggagtcgctaagagtcagacatgactgagtgactcactttctcttttcactttcatgcattggagaaggaaatggcaacccactccagtttcttgcctggagaatcccagggacagaggagcctagtgggctgccatctatggagttgcacagagtcggacatgactgaagcaacttagcagcagcagcatagtgggataagttgtgttgaagtcaacacatttctgtacctgcctattcttgttagtcgaggagactatccttgactaattaaagccatttgaaatttgccaagctcctgcatccatatttaatgatgggacagcctggttgctcagaatatgtgggatttagaaataaaaagttgacttaggctaaaggaaaaagagttatatagcagagacagttatttaaaacaaacaaatcacatttactaagtaacttgggaaataatctctgagacacgagatcttgaaaagtctgaaaaggagtcttttgttaatgtatttcaaatagacccccttggtttacaaatactttcttataatttgcttccaactgaaatatgttgggaaactgggcaagggttcttaggggccagcttcttcagaagacattaagtccctttggggcagaagtggtacttctttgggtcctctagttttctgagttggtgtcaagaacaaagccttatcctcaagaaagttggaatactctgtggaccatgcaaagttgcctccttggttattgcccagtggagtcttccaggtccagtttgtcccttggagccagggctcccactatggtgtgtttaataaagtgaaagtaaaagtcactcagtcatgtccaactctttgcaaccccataggctatacagtccatggaattctccaggccagaatactggagtgggtagcctatttcttctccagtggatcttcccgacccagggattgaaccggggtttcctgcattgcaggcagattctttaccagctgagctatcagggaagccccatgtttaataaggatgtgcacaaaacacgcagagtgcaatttaactggttaaagtaaggattggggtgtgtcatctgagtttatgaaaacctacatggtggggtcatttagaaaaacatagtaccagtttaaaaaatctgtaagagtccactgtaatctatatcattctgtatattaaacctagattcttaaaataatgtttttcttaaggttaagtatctcccatattcttatttgggctgcatatctgttggttatttttcaggattttctaaggtaactattataggctggtgaaatttaataaatctgaatgggtagaggccgaattaattgttataaaatatatatggataaaatagtgccactacacatgattctagctcgcaaatttcttcttttgggtggcaattaagattttgtaagtctgaaattatatagtttgattttattcagaatgtgatcagtgtatagacacaaagtcacagtcagagcaccagaactacctctgtgcatgcttttcactttagtcaatttaattccttaagtagccagttgtcctttggttttcattcttcactgtcacagcgcagtgacatcagatgcagctggagcttaaagaagaagggtcgtgttaattaattccagtgaaacaaaaactgcctcaaataattaatagaatatagtctcattaaagactttagaactttttttccccaaggactagagaaggagaatggcacagattgttcacttgagaccattttaagctgttgatgcatcttacagttctcatctagtggttctgatttcaacatgaatcattcaggccatgtagttattttctcttgaggctctctctttgccttcagtgacagttttcaagaaagaagttcatgaacttaggctttgtcacaatctaaaaatggcctctattttattgttttatttatagctgtcatattttagtttaaatacacttgacctagcaagcaaacatttgtgtgtacaagtaggctggcaaataccgggtcaggttgcctgctgggttattggagggaagaagaggctatgtatattcccatcattgtttctgtcagctgatcttgctattataaggttttttttttttttttttatcttccaaatagttaaggaaaatgggattattggactgagaaagccagagttagggaaaactgggttgattaataagtaggaagatctttttcccatgtgattaattatctttgttttccaactcaatgttttataatcagtaaaagcttgcattctgtgacctatcctttgaggacactgcctttgagcaaactagaaagtttaatctacttttagttttaataatagttaaaagggggcttccacggtggctcagaggataaagcatctgcctgcagtgtgggagacctgggtttgatccccaggttgggaagatcccctggagaaggaaatggcaacccactccagtactctcccctgcaaaattccacagatggaggagcctggtaggctatggtaggattgcagtgatcctacatgactgaacaacttcacttctcaatagttaaaaggggaataagaggaaattaacacataacatgtagtttacagattttttctttaacagataaaaaaggtctacgttttgttgtgttgttgaaaacatgttcaaaagagaatggacttatagatgcacaggggaagaagagggtaggacaaatcgagaaacttgcattgacatatatattctttgctcttgttcagttattaagttgtgtctgactctttgtgatcccgtgcactgtagcacaccaggctttacactatcatgtgtaagatagatcgctagtggaaagctactatataacacagggagctcagcctagcgctctatgacaacctggagggatgggatgggagaagggagggaggcttcagaaggaggggatatatgtataattatgactgattcacattgtatgacagaaaccaacacaacagtgtaaagcaattatcctccaatttaaaaaatttttttaagattttatgtatgttccagagctgcatttttggtagcataataatgaagatataaagaaaaatacatgtaaacatatatacatatcataaaaatgtattttaaaaaaggctgaaaaagatggtttgagactgggagatttgggtatgattgcccacatatgtgttaccatgtgtggggcagacagtgttatgtctgggaagggaaccacctcagtaactcaaggaaccaatgacttgcttacaagtaatattggcccttgtgctgtagagatggtacactcagagtaaatgacacagaggaggggtcagaacaaacagggctaacagaggtatacagctctgtttccacttttgtttgtatgctgtattgggatgtcttgttttgtttgttgctttgttaggttagttgtaatttttatctaagcttctcttgaattatttgtctaggttttggaaaggtgtgatatgattgaaacagctctgccactttaggatttgtgtgaatcagatacactatgaaaagtagagaaaagactatttaagtatgtaaacaagagttaagctttataaagctggatgcattgaataacaaatacataaaacgaatgggaaatactgagaacaaataaggtaacagtaacgtgatgtgtttaacagtatggtgtccagtattaggttgagtttctcccagtgtgactgtaggcaaatagtgaaggtactcacgcatagggcagctcagaggctttatatataagtatggatgtaaagccttggcccagcacttgttgcatcatgttgttgttgcccagttgtgtccaacattttgggaccccatggactgcaggacgccaggcctccctgtccctcaccatctcccgaagtttgggcttccctgctggctcagatggtgcatcataatggagtccataatgttaactcttcagctgattttattggcttatgtattttaaatgatttgtaaaaattcatttccttaaaagagaaatcataactctagatagttctctacttaccatattcttaaagcttctcgatggtttcaggcatgagttatatacactaatataattctcccttcattctagatggtgtttgactagaaatactctttcagttatgtctacaattcaacattgtcagcatctgacatagctgtagctttcatcgcagcccctttattaatgtttccttcatcagcattctcaacctttgtttttctgccagaaaaaggaacttattctaaaccggggctcttgcaggtcctgcccccagctgaaattaaccaatataactcacactttatgagttatatagatatgtgtcataagcttaaatttcaaaataataatggttaaatttcagaaactagacccaactctatttttcttgccagtgtaaaggattgaaaggcagatattcctttttctaactttcattatagttagagctagctgtgtggttcagttttggtcaatgtgatataacaagaaatcttctagagggcctctatggggtgggactgggtggaagttgcttttcagataaaaggtacagaagcagaaaaatggtttggctgcatatcttctttctttcattcgtaagtgtggaatatgatgtacgggattgtggcagcaaaattgcagtcgtgagataacaaggtggagaatggaaagttaacaagcggaagtggtagagcagaaagataaagagtctgggttctcagtgatatttctgagctctcagaagaactttgaggtagccttccctggacttcttgttcatatattattaaagtcctagtagtttaagctatttagtcagacttttctgttccttgcagctgaaagtattcctaacttaaacaagatatagcaactttaatgtgaataaaattaatataaatttgtgaatttttttcaatttgtacagtgatatttatgcacaaataacatgggaatatgaaagaatccatgaactgaagggtgaattctagtcacgcttttgtcacgcttttgacgttgcaaaatatgagcagtaatgtgaaataaattagccgtagtcgtaatttataggtattctggccgctttgtgagcctttcccatattacctatgactctgtgaagtcttgctttccttgggcttcgtgacgtgaacatgacagacgcacagactgaaggttcgataagggaagagctgggcatgcgagagcatgaatgggtggaagacgccaggtggaagatgaatgtgtacggaccacaccagccctccagtcttccagccacggttgtccccaggtggtcgtggagttccatgtcctgaattccagtgggggaggaagagaacaagatatttaaaaggcaaagaagcaacagcagcagccattgaaggcctggaagaattcctggcagatactaaaagctccttcaactttgaggttcatttccacttggtctctcaatccttatgtgaagtttatggtgacaccataccaaccatgtgcttaatttgatcctttcagattttctaatggtgttaagatgtttggtaagtttgtccatttggtatgaaactttagaggtaggcaaggaaaggagtacaggtgggaaaatatagagaactcttaaggagaagagtagttagaaaattaagaaaatttgaccgtatcatgagatgaacatgggtggtagcatttttcactgaggaactgctctcacttaaaatttgtcctttgctgagactcccaaggaaatgcctcttttgagcatcttttaaaagttaatcataaaggaagactagttttttgtgtgtgtaattaaagaaaaaaccaaaatattttttgccagtggcacaaagaaagaattatactttaaatggaggctggcacttgcaaactcctatacatgttcatttgttggtcatcaagcttgacagcctctctgttctctcactgtatgtttgggtcttgactggccttactgatcatgcgtttctgtagatgcagccttgtttctggtacagagtgagtgagtgatagttgctcagtctttccaactctttgtggccccatggactttagcctgccccaggctcctctgtctgtggaattctccaggcaagaatactggagtgggtttgtaaaagcactcactgtgggcagatgctgaagggctgcaactgtagcactgttagatttagatcttatgtatgagtgatacagtgtgatcacaggctccactttccatttcctcctcactctgttcttaacagactcttaagtgcttttgatcttattggagtctatttgtcttgtgaattttttaaaattcactttttgtttacatatatggatactttcttgactgctattaaaaaggtaattaacatttcataatgatatagatggatgtccaggatgtattaagtaacaaaaaccaaattgtagtctgtatatatgtgtgtgcacatatgcctgtgttctggaagaatttgtactaacctctttaaattattgaaaacagttatttctagaggtatgattatgggagacctttgctttttaatttatctatttctataatatttggatttttaaaatcagcatactttttgtaatcagaaaaaaataaatactttctgtctctaagtagtggaaatgaagatgtttcatagaaacttttttcaagttaagaaaagtttcttgacagtgtatacatgcgtatatattaatatacatattaaaataatttataatatatctgacatgtttgatgctttcagaactgagaagtctcactccttatactttttaagccttggaatgagcatcttggattaggcgtgaactaagaacattttttagggaatagggggaaaagaggaaggctgcctgttcagtgtgacttgaagaattctgagagatgctacagataaaggaaaatccataaagatctcccacagctcaacaacaaacaatctgattttaaaatggccatatgacttgaatagacatttctccagatgtacaagtggctagtaagcccatgaaaagaggttcaatgtcattaatcgttggggaaatacaaatcaaaaccacagtgagatactgcctcacacttgccaggatgcctactctcaaaaaacgaaaaataaaagaacaagtgttggagacgatgtggagaaactggaacgcttgtacactgttggtgaggatataaaatagtgtgtccactgtggaaggctgtaagacagttgctcaaaaaattagcatagaattgccatccaatccagcaattctgcttatgggtttatacccaaagaattgaaagcagggtctaacagagatatttatacacctatgtccaaccaccaccaccatattcctggcagcattattcatgatatccaaaatgtgacactccaggtgtccagcaacagatagttgtgtgtatatatataaacacagacacacacaacagaacatcattcagccttaaaaaggaaagaaattctgacacaagttataatgcagatgaaccttgggggtattagaccaaaaataaataaatcagttacaaagtgataaatactatatgattccacttagatgaggtatgaggagtcaaattaatagagacaaagtaaaatggtggttgacagccctgagggaaaggaggaacggagagttactgtttaataggcacagaatttcagttttggaagatgaaaaagttgtgtgaatggatggtagtgatgctatcactgcaatgtgaatgcgcataaccctactgaactgtgtgcttttaaatggtgaagatggtacattttacattatgtgtgctttaccacacctaaaaataataatagtagtaaataaaactctttaatgctttagaagctattcttttcctactgttcatggggttctcaaggcaagaatactgaagtggcttgccattcccttctccagtggaccacaatctgtcagacctctccaccatgacccgcccatcctgggttgccccacaggcatggcttgggttcattgagttagacaaggctgtggtcctagtgtgattagattgactagttttctgtcagtatggtttcagtgtgtctgccctctgatgccctcttgcaacacttaccatcttctttgggtttctcttaccttggcgtggggtatctcttcacggctgctccagcaaagcacagccgctgttccttaccttggacgaggggtatctccttaccgccgccattcctgacctttaacgtgggatagctcctctaggccctcctgtgcctgcacagccaccgctcctgaactgaactgaactgaataatattcttagatattctctttgcaagttgttcttttatgagcataagtatttatgatgtcttattgtgagcaagtatcagtcctttcttgagtgataatgagacaggtagtgggaggacatatctggatggagctagggttgaaggtaaaagggcaaaagtgaaagtgaaagtgttaattgctcagttgtgtccaactttttcagttcagttcagtcgctcagtcgtgtctggctctttgcgaccccatggattgcagcacgtcaggcctccctgtcaatcaccaactcccggagttcactcaaactcatgtccattgagtgggtgatgccatccaaccatctcatcctctgtcattcccttctcccactttcaatctttcccagcatcagggtcttttccattcagtcagttcttcacatcaggtggccaaagtattggagtttcagcttcaacatctgtccttccaatgaatattcaggatggatttcctgtaggatggactctcaagagtcttctccaacaccacagttcaaaagcatcaattctttagcactcacctttctttatagtccaactctcacatccatacatgaccacaggaaaaaccatagccttgactagacggacctttgttggcaaagtaatgtctctgtttttgaatatgctgtctaggttggtcataactttccttccaaggagtaagcgtctttttcatggctgcagtcaccatctgcagtgattttggagcccccaaaaataaagtctgctactgtttccactgtttctccatctatttgccatgaagtgatgggaccagatgccatgatcttagttttctgaatgttgagttttaagccaactttttcactcactttcatcaacaggctctttagttcctcttcactttctgccataagggtggtgtcatctgcatatctgaggttattgatatttccaactttttgcaaccccattaactgtagcccaccaggctcctctgtccatgagatttcccaggcaagaatactggaatgggttgctgtttccttctcctggagatctttccaacccagggatcaaacccaggtcttctgcattgcaggcatattctttaccatctgagctaccagggaaacccaaaaagggcaaaggaaggaagaaatactttgagccactaaaaataatttaagttgcattacaattttgccttcacctgtcctagccccacaaagccttgatacaacagtatcaaggagatacaatagtatctccggtgtaagtaagaatctaaagtggtattttatctttgatatgctttatagaattttagactgcattcctggaccagcaagtcatttatagagattcatcaaatatttactcatgtttttccattagaagttaaagcagtttatttttttagatagtaatcttggtattgggctgatttttctttattagatatatgctttgacattgaatttttcagccttcctccttttgtaatgtataatttgaaggcttaaatttccctcaaagcacaactttggtgatagtcttctgtttgtttgtttgtttgttttttggttgaatttttattatcattcagttttaaatagttgtatttaccttgagagtttctctctgacccttgggtatttagaaatttattgttttatttccaaaaatgtggaaattttctagttatcttctgctattgatttgtagcatagttccactgttgaccgtgaacatatcctgatatctgtgtaagtgctttgaaatttgttgagacttgccatcctaacccccaattccatctgccaccagctgcttttaaggcttttgtttggttttggttatcagcagttgtactatgatcatatccacatatggtatccatatatatgattttcttttcattttttctactatgggttgttaaagctttttcgtatggcgtagtgtttttaatcagttttggaaaatgtttggctggtgtctcttcaactagttctgccctatattctctgtccttctagaactcagctgcatataagttagactgtttcacttcattccttatgtctctgatcttttatctattactttatcttttctatttttggtttaatatgattattttatactgacctatcttttaactcacaaatcctctcttctgctgtgtctaatccacctactgaattcttgattttagttatatttttcagttctaaagcttccacatgtcttttttttttttttttaagagtacaattgctttgcaatgttgtgttagttgctgctgtacagcaaagtgagtcagttatacatatgcatatatccactcctttttaggtttccttcccatttaggtcaccacagatcactgagtagagttccctgtgctatacagtaggttcttgttagttatctattttatacatagaaattatacaggttctacttgccttttaaaaactattcaagctctctggtaaaattgccagctatttgtattttttaaatgtattaatcatttattgaggtataattgacagatagcatttggtactttcaggtatacaacatgatttgatatttgtatgtattgcagaatgatcaccacaataagtctagttaacatccatcaccatacatagttaaaatttttttttcttgtgatgaagacttttaagatttcttagcaactttcacatatgcagtatagtattaactctagtcaccatgctatacattacatcccatggctgatttattttataactggaagtttgtactgtttgacccccttcatctattttgccacttcctacccctctgcccgtggtagctgccagtctgttctctatctgtgagcttggttttcaatcatagttttttgaaaaaagtgtgtgcttgatcactccaatatctgagtcacctgtgtcttctttcttggattttggtcatttagtccttttttctgtcatgcctgctaatttttttattgaatggagcacattctatatgaaaaattatagaggctctggatggcaacttccagaaatgattcaattttcttccggcagccagactgatagccttgcccacttagagactgagttgtttcactgtgtttcaggctttgtaagggcagtcagtttccaggggccatatcttatataggatgttttaaggatctcagctgttgataaaagctggaatgtattcacagacctttatttctaaacctgagctctaatttttgtttcttcacctcttgagttgccagaatttctccttagctgttgagcttaatggttgctttctgcttggtttttcagccactatcccttcacaactctagcttgtgtgcttagttgcttagtcctgtccttgtagaaactgacaaaatactacaaagggaaatcatgagcaattgacaccatttgtttttttctaagatcctgcccctgccccccccccccgcccccagtcttggagttcaaggctgattcaaggtccagctagtttttgtcttgttagaccagtgagactattaagttctaggctaatcctctctgctcagcttccataccccataaagtgaatgggcaaatgacctgagggtaaaaagtagtagtaactgtaggactcacctcagtctatttcccttctttatcagaaatttgcccttaatatcatgattttttggtttctcccaacacttttaatcagctgttttattttcatttgcttttgcattttatccatctttattaattgttctcattgagaatactagtctgatataagttatcatatctagaaccaaaagtcctttgttaagctattttataagtgtatattctaaatacttttgttatggatatgaggaattactcagatggtttgataaaaaaatgttttgagtcattttaaagaaactttctggtaggtaaagtcacagtttatgaaaattttgttttgggtatcttatcaatcattcgaaagatgtatataacccagcatatgtgcatgtgggtgtgaagtaaatcctaaaatagctttctacttttagagacagattagtttttcctaatatttttagaatcttcacatttttgttcattgtatagtgtacaaagtgaagacctaattttgactggtattgacttatgatctatttatgaaaaggttgtttgtatatatatatatatttataaaaaccttatatttatttatttattttgggttgcactgggcctttgttgctatgcatgggctttttctagttgcagcgagcgggggctgctctcattgtggtgtgcaggtttctcattgcgggggcttctcttcttgtggagcaagactccagggcatgagagcttcagcagccgcagcaggtaggatcagaagttaatggtgccagggcttagttgctccatggcatgtggagtttacctggaccagagattaaacctgtgtcccctgctttggcaggtggatttttatctactgcgccaccagggaagtcctatattttttaataatgtttcttagagataaatttggatgatttgtttaaatttttaaaataatcaaaccttagctatacatactacatacatactaattttataattaaaatttctccatactaataattacttctgtcaagcaagtttatttttctattatattagttataactttttctaaaatccattatgaaaaatagggtgtaatttattttttatttggaaaagacagaagaccctggtgaagaattttttaaaaaaattaaaaactacccttcaaagacaaccaatgctaatttttgaatatagtctctgttgtagatactgtgctgtcctgcctagatctgtctttgagaacttcccaacccttgtggctcagctggtaaagaatctgcctgcaatgcaggagacctgggttcaatccctgggttgcaaagatcccctggagaagggaacagctgcccattccagtattgtggcctggagaattccatggactgtatagtccatggggtcacaaagagtcagacacaactgactgactttcactttatatgacttcaactccctcttcccagctgctgtgaggtgcctgggaattttctcagcgtaggagagacattttgcccaaggtcatactcttctaaggcagcctatatctgaagactggttgatgcaggcgttgcctacgttgcaggtcaacttctcctctgtccagtgcttccttcccttcctcctatagcaataggtccaggagcgctccccaaaaactacctgcacactagactccatctcacactgtgcttcctagggaacacaaactctaacagtccctttctagctgttttcattcagtttttaaatatatataatatatattttatatatttatatatattatatatattatttcaaatatgtatgtatacacacacatcatctgtatttctgtgcagttttttcccctatttatgacatgagcatttcccttgttatttaagttaatttttcagattattgtatgaattggacatagtttatttaacctttgctctattgctagcatttgggttatttccataggttgggtattataaataatgctgttatgaatatttgtaaaatacatttttatatgtgttttagaatattttatagaattgattcctaaagatagttactgaatattttaagacactgtgtatataatgctaaactgctttccagaaagactgtaccagcttatacttccatcagtagtatgttaattactgtcaccaagtgtcccatttgtataagtattctctcccttctaaagagaggctattgaatataatttaagcttttctgagtgatggggcaacgagatatcataatagaggtaacaagtaatgcagtggtacaatgaagctctcatagtctactaagctaatatacaggatattttcccattttagggggcctgccgtcttgattatgaggccataaaatctcactttttactattttctaattccctgaatttttccagcttctcttcctttgcaatgcatactcttttgagcatcttcctggattgtgacggaccttctttaatcctcaaccagtttgcttaacttgacatcctttttcaccttagccaccaggggtgactagactagaagtggcaacttcttctatgttgacccttccatatccatttcctgggactttctcagaggagggagtctcaccccctgtggtgagacctgtagactggacactcaggatgcgtgttgggcatctttcaccagtcatgggacccagaaagcagtggttgcagatacacacaaaggggcagagatgagaaacttgagaaggactggttagctgtccaagtcctgtttccagttctgtctaaagcactcttcctactgttaaggcttcatgaagagccctgtatccttaaaatcctccttacctgcctaaattaactcagtcctattaggacagcattacttttccgtctttaaactgacatgaacttgggacagataaaattataaaataaaactagaggaagagtctttgaatgaaaacttgagcaattctccttcaagtaaagcttaataaagcctcagtcttttcttttgaatactcagagccatttatgccttttattcttagtagtattctgtttttttaaaaacagtattctggatagttgaattttagccactttgtaagtcaatttaattttttaaatactttaggccaagatatatttttcattgctctcaggagtgactcatcactggctaacattgggttttctaaatagcatgaggaagacttattatttattggacattgttgagaactatgtaattgtcaacctttaacatttatttaaaagtctctacagtagttggttttcttggtattgaagtgctcaggtagataaattcagcagactcattaatatttgcccagaacttggcatttagataacatattacaagacatacattctacctcttgtttaatcagaataacttgtattttgataacaggtatctggagggaactctaactaaatactggagtgtatttgttacccactgctaagtgttgatcataggctttatggagttgatatgcttttccattggaaggacagatctgtgggttttagtacagggtcaacctagacagcatattaaaaagcagagacattactttgtcaacaaaggtccatctagtcaaagttttggtttttccagtagtcatgtatgatgtgacagttggactataaaacaagctgagcactgaagaactgatgcttttgaactgtggtgttggagaagactcttgagaatcccttggacagcaaggatatccaaccagtccatcctaaaagaaatcagtcctgaatattcattggaaggactgatgttgaagctgaaactccaataccttggccacctgatgcaaagaatttatttgaaaagaccctgatgctggaaatgattgatcgtggtagcagaaggggatgacagaggataagatggttggatggcatcaccgactcaatggacatgagtttgggtaagctctgggagttggtgatggacagggaagcctggcatgctgcagtccatggggtcacaaagagttggacatggctgagcgactgaagtgaagtgaaggagaccctttgcccctgttccatctgtaagtatttttctggtttccagtccagagatttcatcttatgtttcagtcatattggcagttgcataatgtgtaggtggattggtggaaagccatccacaccagtagggaatgttttattgatgatgagtcattgatgatgagtcaaaaatgctctttgtttggaaaccaaggatggcactgctcagtgactaacacctgtttgcttcatataaaagaggaaaaatgtgtgagtctgtattcctggtttgggctggtcctccctgcatcattcttcttcatccattatgggttgagctgtcatagtgtagggctgttagagcaaggggccaggccgtgaagcttgttacactgatagttcatccttgggcttttagttgttttttttcacccttatattattattaaaatcagattgctttgtttcagagtaaaaaagtaaatacttttattcatatttccccctacctcctatatacccgcctaagtaaaccaaaattcagtggtgtctgtggagactgtgtagctgtgagtcagaatgctcagaatgtctggcgtttagaactcgttaccaaggtgatagatgctctgagtctagtgttttcctgagtaccgtattatgtgagtaacatgttttagtgctaaagagcacatttttaaaatggaagcattttccagtctttgttattatgctttgggaaagagtggcttcatgtctattttatggctcagcaattaatgactcaaaatataatacacctgatttgcaaaactctataaattaagatcatttgtcagccacttaatctgtagctatagttaagttgctcttaaacttttgctttgatacatagtttgccttggacaaaagactactttttctgtcccttccccccagaaagagacatgttaactgattcttgaataccagggttcacagtctgttcacgtggtctgggacaaccacactccttgaaaagtggtagcagcccaagggttctacaagcttcagttcttatccccacaagcccatatagctctgttgattcacagcctaagcactgcttctgagtttcctcctatgattaaaaacaaacaaggcatttcataatggaaaaatctaacacatgctctaaagtaggaaaaaaccaccaagttcccatgtacccactctccatcttcaacaataggaactctatccccactcacttctgctcttccatattatttcatagaaaatcacagacctactgtcatttcaccccaaatgtttcagtatatgcagaaaggaattatattaggcatggctgttatccattgaaagacttgcttacaagtttgacccttggttagcatctgggaacgtggatttcaggagggttctcattgtcttaactcacagtgatgcactgtgcctaagctttgtgtacaaacagtatcagttttgctcaacacttgctttccttctgggagtctggaatcttggtatgtgctggagagagtgggcctctataatcaacctccagtgaaactgtgggtaggcaatattgtacaagtcgttgctggggggaattaagcacattctctgtgactgcactgggagaagactcttggaagctcaaacttggtttcctgtagacgtcaccccatgtatcttttccttttgctgattttgtttggtattctgttgttgtaataaatcttagctatgagtacggtgtatactgacccttatgaactgtcctagggtatcactgaatctggagatctcttaacacagcagcactaacacaagcacttaaaaaatatggatatacatgtgataaacatataatctttacaatatctttatatattaatataaataaatatattaatataatatctttatatattaatataactaaattatatctttataatttatttatgaaatattcataacttttaatgacatcaaatgtgaaattaatatttgcacttcctgttgtatcataaactgaatcaaggttctgacactacacttggttggtattactttcagttcagttcaattgctcagtcgtgtctgactctttgagaccccatgaattgcagcacacaaggcttccctgtccatcactaactcccggagttcactcaaactcacgtccattgagtctctcatcctctgtcatccccttctcctcctacctccaatccctcccagcatcagaatcttttccaatgagtcaactcttcgcatcaggtggccaaagtactggagtttcagctttagcatcagtccttccaatgaacacccaggagtgatctcctttagaatggactgattggatctccttgcagtccaagtgactctcaagagtcttctccaacaccacagttcaaaagcatcaattctccgttgctgctttcttcacagtccaactcttacatccatacatgaccactggaaaaaccatagccttgactagacggacctttgttggcaaagtaatgtctctgcttttgaatatcctatctaggttggtcataactttccttccaaggagtaagcgtctttttatttcatggctgcaatcaccatctacaatcattttggagcccccccaaaataaagtcagccactgtttccactgtttccccatctatttgccatgaagtgaagggaccagatgccatgatcttagttttctgaatgttgagctttaagccaacttttccactctcctcttttactttcatcaagaggctctttagttcctcttcactttctgccataagggtggtgtcatctgcatagctgaggttattgatatttctcccggcaatcttgattccagcttgtgtttcttccagcccagcgtttctcatgatgtactctgcatagaagttaaataagcagggtaacaatatacagctttgacatgctccttttcccatttggaaccagtctgttgttccatgtccagttctaactgttgcttcctgacctgcatacaggtttctcaagaggcaagtcaggtggtctgctattcccatctccttcagaattttccacagtttattgtgatccacatagtcaaaggctttggcatagtcaataaagcagaaatagatgtttttctggaactcttttgctttttccatgatccagcggatgttggcaatttgatctctggttcctctgccttttctaaaaccagcttgaacatctggaagttcatggttcacatattgctgaagcctggcttggagaattttgaacattactagtgtgtgagatgagtacaattgtgtggtagtttgagcattctttggcattgcctttctttgggattggaatgaaaactgaccttttccagtcatgtggccactgctgagttttccgaatttgctggcatattgagtgcagcactttcacagcatcatctttgaggatttgaaatagctcaactggtataccatcacctccactagctttgtttgtagtgatgctttctaagtcttaatctacacgttccctttctttccttctctttttcctttttctcttttttaaatttcaaggaaatttatttgttgaagaaactgggtcatttgtcctgtagactcctacaatcagtttcttctgattattgtattgccatagtgtagtttaccgtgttcctctttaagttggtaattggatctagaggctttttgtgtgtttttgaaagcccatgccttcatatgtcttgaggctatgccttaatttctatttgattaatgtctgccaaccactttgaggttcttggattaaaggggttttaacagtaaatatctttgttttcattagcatgagactatatcttctgacacttggatcctgactcattgctctttacagaatccaatcgaaagtgcatgtcgcagtgttcactgcttgtcttagggtactagccgtggcagagttccctgggctaaagctggctttagttatttagggttggtatagtgccatggggaacagatattatgatgtaagtggaaatgtagttttttcttaaagtctatcttactattcttgaagaccctaaaatttaaaatagaaagtgtcagaagccgactaaaatctgtaaacccagcattaaatttgctatttgacagaatcctttagtatctcagtaacaaagttctaattaacattactaagttgttcttacttcaactcagtaggtaggaatagtcggacaacaggatctaatgtaggtttcataggccaactttagcgatgtatttttttttgaaatgaccatgtattagggcatttaataaacatttaaaatacagatgtacactttaatttaaaaatttttaacaatacacacaaagattcccattttaaccatttgtacatatatagttcagtggtattaagtatattcgtattgtgcaactatctttagaacacttttcatcttgcaaaattggatctctgtacacattaaacaagagctcccacttctcctccctccagccccatggcaaccacttttctacttactatctatgaatttggctactctagatgtctcatataagtggaattatacatataagtgaaatatatttctggttttttgtgactgacttatttcacttagcataatatcctcggccatccttacggtagcatgtcagaattttgttcctttccagagctgaataatactgcactatatgtatacattgtagtccccccttatctgtaatttcactttcacagtttcagttacctgtgatcaaccaaagtccaaaaatattacatggaaaatttctgacagcagatttggcaatgatttcttggatatgaaaatgtttcataagttttaaattgcatattgttctgaatagtgtgataaaatctcacaccatcaggctccttcctgctgaggacatgaatcatccctttgtctagcataccccgcctgttagttacttagttagccatcttggttcagatctgcagtcctagtaccttggtgcttgtgttcaagtcccccttctttaataatggcccaaagcacagaagcagtgatgctggcaactcagatagtctcttactgtatcttatttataaattactttatgatagatatgtgtgcataggaaaaaattagtgtatatgcgttcagttcagttgctcagtcatgtccaactctttgtgaccccatgaactgcagcacgccaggcttccctgtccatcataaactcctggagtttacccaaacttatgtccatttagtcggtgatgccatccaaccatctcgttctctgttgtccccttctcttcccgccttcaatctttcacagcatcagggtcttttcaaatgagtcagctcttcacatcaggtggccaaagtactggagtttcagctttagcatcagtccttccaatgaacacccaggactgatctcctttaggatggactttagagtccaagggactctcaagagtcttctccaacaccacagttcaaaagcatcaattctttggcactcagctttctttatggttcaaatctcacatccatacatgactactggaaaaaccatagccctgactagatggacctttgttgacaaagtaatgtctctgctttttaatatactgtctagattggtcataacttctcttccaaggagtaagtgtcttttagtttcatggttgcaatcaccatctgcagtgattttggaggcccccaaaataaagtcatccactgtttccacatctgtttgtcatgaagtgatgggaccagatgccatggtcttagttttctgaatgttgagcttgaagccaactttttcactctcctctttcactttcatcaagaggctctttagttcctcttcactttctgccataagggtggtgtcatctgcatagctgaggttattgatatttctcccggcaatcttgattccagcttgtgtttcttccagcccagcgtttctcatgatgtactctgcatagaagttaaataagcagggtaacaatatacagctttgacatactccttttcccatttggaaccagtctgttgttccatgtccagttctaactgttgcttcctgacctgcatacaggtttctcaggaggcaggtcaggtggtctgctattcccatctccttcagaattttccacagtttattgtgatctacacagtcaaaggctttggcatagtcaataaagcagaaatagatgtttttctggaactctcttgctttttccatgatccagcggatgttggcaatttgatctctggttcctctgccttttctaaaaccagcttgaacatctggaatttcacagttcacgtattgctgaagcctggcttggagaattttgagcattactttactagtgtgtgagatgagtacagttgtgcggtagtttgagtattctttggcattgcctttctttgggattggaatgaaaactgactttttccagtcctgtggccactgctgagttttccaaatttgctggcagatagagtgcagcactttcacagcatcatctttgaggatttgaaatagctcaactggaataccatcacctccactagctttatttgtagtgatgctttctaaggcgcacttgacttcacattccaggatgtctggctctaggtgagtgtatatgaaagtttggtactattcacagttttatgcatcctctgtgggtcttgtaatgtatgtactacattttgtttactttcatctgttaatggatacttggattggttttacctttttatatattatgtataatgctgctctgaacataggtatacaaatatctctaagccagctttcaattcttttgggtatacaccaagaagtgaaattactggattgggtgttgattttatggtgtttttttttttttttaagaactgccaaaaaaaaaaaagaactgccatattgttttccacagcagctgtaccattttacattcccaacaacagtgcgcaaggattccagtttcttcacgtcctctttaacatttgctattttcttttttttttttttttttgagagtagacatcctagtgggcatgaggtagtatctcattgtgattttcatttacatttccctcttttggagaaaaatccattgcccatttttaatcagattggttgtttttgttgttgttattgttgaattgtaggggttccttatatagtctgaatattagccccttgtcagatatatgattggcaaatattttctcccattctctggcttgacttttcactcttggctgcatctcaagacatgtgggatcgaattgaacccacgccccctgcattggaagcacggagtctttaccattgggtcaccatagaagtacttgccttttcactcttgattgtgtactttaatgcaaaaatttttaattttgtggtagtccagtttatttttatttttctcttgctgcctgtggtttttagtgcaagagccaagaaatcattgccaaatctaatgtcaggaagcttttcccatttgttttcttccaaaagttttatagttgtaggttttacatttagatctttggcctgttttgagttagtttttatatgcaatgtaaagttagagtctaacttcattctctgcagttacacttttaaactttggcttagtaatgcatggacatgccatttcaaaggctgggagaggactcttgagtcagctgcttgctgtaggaaacttgccttagttcctcgccccatgggcagtcttactaatctatctcatttttctccaaagtaagatttttgtaagttttaataaagtaagagaaattgttaaataatatttattaattataagtagtgattaatttataacttataggttagattcttaaagctttttcttatgaaaaatttaaatatacagaatatagagagagtagtaaaacaaatttcccagcacagagcttcatcagatatcagcattttgcatatgttgtatcttctctttttcactttcatgcattggagaaggaaatggcaactcactccagtgttcttgcctggagaatcccagggacagaggagcctggtaggaggccatctatggggctgcacagactcggacatgactgaagcgacttagcagcagcagcagcttccctctctcaacattttttgtttctggagtattttaagggaaacctcagtcattgttaccattttgctatcatttttctatgtttaatgtaaacatgcaaagttcaaatcaagcatgtattgtgttatagtgtggtttttctatgtgctttatagtagaatacttgtataatcaatttatattgttttaaaacctaggacttagacccgtctcatggaaacagtgagagactttattttatttttttgagctccaaaatcactgcagatggtgactgtagccatgaaattaaaagatgcatgctccttggaggaaaagctatgaccaacctagacagcatattaaaaagcagagacattactttgtcaacaaaggtccatctagtcagggctatggtttttccagtagtcatgtatgaatgtgagagttggactataaagaaagccgaatgccttagaattgatgcttttgaactgtggtgttggagaaaactcttgtaaatcctttggactgcaaggagaatcaaactagtcaatcctaaagaaaatcagtcttgaatattcattggaaggactggtgcggaagctgaaactccaatactttggccacctgatgcaaagaactgactcactagaaaagaccctgattctgggaaagattgaagacaggaggagaagaggatgacagaggatgagatggttagatggcatcactgactcgatgaacatgagttgagtaagccccaggaatttgtgatggacatggaggcctggtgtgcttcagtccatgggatcgcagagttggacacaactgagcaaatgaactgaggaccagcagcgtacttttgacatttgaaatcacttcacaattttataattttgcatattgctttatggcatttctttgatcatatctgcaactaatatgccactttagcctcgggaacccaaacctcagtagaaacattgctcttttaggaaaatatgaactgctttacagctctccacattagagtgtgatttccaagaactcattatttacagttatcagctacatagatttctaaactgctcatttctaatgagaactcacaggaaagattacaaaaatttgcttctctttttttcaccttctcttctgatgtcttaaatcctggtgaatatcatataacgagttcacccacctgattcattattctttcaacctcttactttttttcttattaaactggagaatttaataggttcaataaagtggaaaactttttgctctagaagtgctgtgtggaagttaagaattcagaaacacatgaccattgaattgagagataattaagggtcttccattgttatagaacccaaagatggactctggataggtcacctcagtaggctgtttgaagcagggctgtatcgaactggggaggagggatgagggggtcaaataaaaaaataggcaaacattgctcaattgtgtctgactctttgtgaccccacggactgtagcccaccaggctcctccaggcaagaatactgcagtgagtagccactcccttctccaggggatcttcccagcccagggatcaaacctgggtctcctgcattgcaggcggattctttaccacttgagccaccagggaggtatttaatatacaagttaattcctttaatcaaaggaataaagaccttatacagagtctgaaaagtcaagaatgatgatcaagaataaagcaaaattgaaaccaacgaaagccctaagtgtgaagcccatttttaacacactcttccatatacacctcagatagttttgtgtcatataatacatttcttctctttgagagccactgcattttgaacatcaaggttaaaaatgcccgtcacagagtcttctgaaaagatagttaagaagcattcattcgtaacacaaatactaattcgttactttcttaagaaagcccacattccccacactgatatttcaaactctgagtgtctgcttcacccatgtgcctaaaggggtgtgtatttgtggggtcacttgcacagagacttgattgtgagcatctaatgactccaggaagcaagacagtgtggcccccactcctcttggcgtttctgtgaatgacaggggcaaggtataatgctgttttatttctttctcttctttttcccttcctgttttagaagaatttcacctaagttataatttgaaaaaaatggcaaaagactttttttccccaactggaaaagcctctcactatttattaatggattcagtctctttaaaaatgtgaagaaaaaaaaaacattaatataaaatgatggcctctctgagatggtgacatttgaactgaggtttgaataagaaagctcctattagcacagtataatgtgtgctaagttgcttcagtcctgtctgcctctttttgaccccatggacagtagcccactaggctcctctgtccatgcaattctccaggcaagaatatgggaatgggttgccatgccctcctccaggggatcttccagactctgggatcaaacctgtctcttgtggctcctacattgcaagcagattttttaccactgagccctagctcagtatcatgtgaagtgaagtgaagtgaagtgaagtcactcagtcatgtctgactctttgctaccccatggactatagcctgacaggctcctccatccatgggattttccaggcatgagtactggagtgggttgccatttccttctccaggggatcttcccgacccagggatcaaacccgggtctcccacattgtaggcagacgctttaccatctcagctgccagggaagccccagtataatgtagaggggtcaaatcctgactgcaccatttaactagacatgctatcttggctagcttgcctcacctcacctcagttcagcctaaaagatttgctgtagtgttttcaaaagaataacattcagagcagacaaataggtttgattgttgtttataggtatgacttaagaagtttaattatttaacattaccataatgttaaaaaaaaagagtggggtgaacctaacagtctttattcttgtcttctctgttaaagttccagtactttttctaccaaaagtgttttgttgtttttgttttaaaagtagtctactcacttcacctgtatagttagtatccatggacaagaatacttaataaatctaaaaaaaaaagagaaaaagattatgccaatttatgttttccttgttatttcatttcaatagcattgatcagtacaacccagggtaagaatttctaaaaggagactttgttatgtggagaattcagtatctcatgatctcatcagaggtttcatggagagatcaactgacttcttttaaaccagcttcttaactcatgtgacggaaaacttgacctctccagagtccccttgattccagtagtgattgtgaatctactttactttgttcaaatcccatacccaaaacattttttgacattgaaatgattcatcatctaacaatcctttttcacataacaaatgcatattttactctcttttaaagattagtgttctatcatttacagatcattagtagaggggaagtaatttaaagtattgggagcttctgtgtccattgaagactgattagaaatgaagataatttttagtgacagatacttaagtatgagagttctgtaattattcaactcagtctctttgcttgttatgctcactcaaaagaacagtttattcaattttaaaaagaccatattgagtcaggaaataaggagattgctgcaattttttattttgtctacaaaattgttttattactttagaaatataaaaatacagtgtatattctatggcatctcatgtaatggttacttagaaatatttatgtctgcaaaagcctgtgaaaagtgaacaagtggttagggttaaagttcatctcctgctctgtctttttctggtaataaaaagaatttaaaaggtacagtgttttccccctaaatatctacttcctcccttcctggctattggaatagtttacattcttatgttttttaaggggtatgtgtgtatgtgtgtgtgtgcacgcatttgtgtgtgtcttctgttgtagctacccaactagccagggcctcttgtgttccaattctttgcatctaattcagctaaacttttgagaaaaatgtcatgtgtaaaagcaaggcacagctataaagtgttcaactttcagagtacctttgattcttcttgtatagtcacatttgttcatttagtgaatgaaactaatcaacttatttttccttaaaatggagcttcaaaggccactgccttctacctgacccagagctcaaaattcccacgttcactaacaaatctttgaggagggataaagaaagtggtttctctagtgctgactgatttcttagggagactttcagagctctggtgtggtttactcatttagtcgtgtcctgctctctgcaatcccatggactgtggccctctaggctcttctgtgcatgggattttccaggcaagaatactggaatggatagtcatttccttctccatggcatctttccgacccagggatcgaacctgggtctcctgcattgagggcagactctaccaactgagccaccagggaaggccctccagagctctagctactgtaaatgcttgggagacatctgcttgcagctgctttaagaaaggattagcaccaccagcagcaaggcttttggtcagaactactcatttttgtagtgtgatattagccatatagacctgttttttttttttaatttattttttttaattggaggctaattactttacaaagtcctgtttttccaaattactgtaatgataaaagttgaagaaccatagttagggctttgataaagatgtggacacaaccataaactaaggaaagttcatttaggaatggatcttcaaatccttgccattgtgtcttttaaggtcatttgctcaattaaaatgtgtgcaggacctaggatactggggagaggggtcagatgtttttctaaattatgggatgggagtgggtggggaaggatgtttcaggagtgtctaggtgtgtcctgactgctaaaggcctcatatacaaactttttttattgctaagtctctactgaccacccagacgtcactttttccttcttctacgactgagacttctgccagagcattgccatcatcagcggatcataaatgaattcacagtgcttgccatacccacagttccttctgagggcagctgtcctcccctgctaggactcctgctgaggaaacacatgacccagcctctctggctgagtgactggaccagaggaggacctgacccaaggatagctcactcataggccaactaagctcgtgtgatgttgcttgatctcaaaaattcagtctaaatagagacagtagtatttaaccaagcccttcagatattctgctttgggaatcacaactgagataaaaaagataaactagagaagaatgatatagacatatgggctaaaatgaccccattaacagtggtgcataagaaagaccacaaatccctaccactgagcttcctgaggctgccttggaatcagcactgtatatcactgtcagttttggcctctgtgaggcccagcccttctctaggtccttatccttttgtttttccatgtgttctttgtactctgtgctcttcctgttcttcacttgaatgagtttaagtgagtctcagcttcttgtaacctccagagcccaattataggcccttcggtacacagaggaataaaaacaggtaggtggtccaggggtgtcaggggtcagagttgcagttcagggccagggattaggaacctgacctcaggctcccagctttaagctgctttaaaatctatgctaatggacttgtcatattttattttgttttgtttttaacagattttatgttttagagcacttttagattcacagcaatattgagcagaaaggacagagagttccaatatacctacccctcccgaccccgccacacagacacatatacagccccctttttaaaatatgcactgtgaacagaaaatcagtgttatagatatcaaaaggttcaatttcatcttgttgaattgtttttgatgtttatgttgaaagatttttagaatttatgaccagtagttacagtatctgccacccttattaacctcagtgcttctgttttcttatcgaaattgtgttctgacccagagttcctatatttctcaatatggaattcttagagtatagaatgtattaacatcctcttctcccagctctggatgttctcttgcctcttcaatagcaacaaacaattcaagcccactcaaaaaacaaccatgagggatatgaattctattccttcccagttcggggtttcctctgtgtgaggccttgaggaaacacaggtactgttacagacatttgatttatttatatgggctgttcctaggccagtgggagaaaaaagacatggttgctatatccaagaagctctcaagctcacagatcctaagcgtacccttcttacctttttacatatgatctcagcctatgtcttctgtacagactccaccccagctcttccctctcttgtggtcataatatcaacactgcccagccacttcctgtttcttatgcctgcatctccgaggaccatgctgagtgagccacattcttgctgactgcctcattttcttataattgtactgatgcattatattctgtttctgctaacaatatggatatacaaaatttgcccaaacatatataaccatgtaacgataccttttccttgatgaaagctccagccaattctttcatcaaccagtagtcattgaatatttactatatgccaggtgtgagctctgggtatctctctggtttcttctcatttcctgttgttctgcaaacatatttcattatgtttcacatcttcatgctttcactcatgttgtttctgtctggaacacacttcccccagttgcctcgctaataccttttcatctttctagtcccaattcaggtgtcccctccttcaggaagccagtgcccacagtgggtgatgtttgccttcactgggctcccatgtccccttgtgcatacctacaccaccaccattgccacatcagggtaaccatatctgtgtccatctcatcagcagacccttgagggaaaggccaatatcttactgctttttgtttctacagttcttagaacagtacatggaatagaatatacacataataaatatttgtggaaccagaccatatcaatcatggaataaagccaaacagaaaatcttgtagaatcactgggtagtccatggttacagttaaattttttttgtctttgttgaatttgttacaatattgcttctgttttgttttgttttgtttttttttggccatgaggcatgtgggatcccagctccccaaccaggggttgaacccacacttcctacattggtaggtgaagtctcaaccactggaccaccaaggaagtcccctcaacattatttattattgcttgagaccatttgcccaaatcctcagcaaagacagccctggtattcgttctagcaatattgtcaagcatgagtagcatgcgcaccacctggtttttcctgtacaagagctggctaggatgtgggcagtatggattaatgctcttgaatccagcactggtctcagcctccaaaggccatcagtagacatgattatgaagactcttaatatatgatgaaatgtgtgcaatatggtccattgcacaaatgccatggctcttgcagatcctctggtacccccaagtggaggactataaggcaacccaagcataagcctagctgccagtgcagatgctatatccctggacctagatctgagcctggtgtagagttggtgttcagtaaatacttgttgaataaatgagtacttttggataaatggatttagttatatatacctgtgaagggagctatgatttttcactttgtagctctgtagattttgctggaggcacagcttagggttaaaattaagaggagatgatgcaaagaaaaaagttttcttatgggacttcttattccacagttttcaataattgtttactaggggaaaagactataggaaaccaagttgtgcaataatgaaagaatttagttgagtcttgatttttctttcctcttgccatctgtgctgctgtaccatttcttacagatctgtttgctctgactcagagagggggttgaggggagggaggcagacagaggcagaggaagccagaaaaggacttatgacattctggggctggattgagccagctttgcagttgaaatgaattgcccttggaactttacatttctttgtgaatgagatgtttgcccaaatcagctttaacctctcttctggttctgaaatttcacactctgtgtcgtttgagagagttaggggttttcctaaattctgcagatgtttcctgggtgcattaaaagctgaatataaatagatcaaattgtggatgatgtagtggaggttctttgagttttagctaaagactttgtagttgtttaacagtgaagtttccatggtgattagcatttagttcttattctcatatgctgtacaaaatcaaaggaatcaatttctttcctgtcataatccctattagttattattagagccaacactgcaattgatatgaaaagacagacctcatttacgtatataacgaatatgaacaaagtgggtaaccttttctttaagactattttttttttttagagcaggttagagttcatagtaaaattgagtgaaaggtacagaaatttctcatatactcttacgcaagcatagcctcctccattatcaacatcccccactagggtggtatattatagctgaagaacctacattgatactttataataacccaaagttcacagtttacattatagttcgttcttagtgttgtacattctttggatttatataaataaataatcacatgtagctatcattatgatatcatacagagtttttgtttttatttttttctttgaaagtgaaagtgaagtcgctcagtcctatccagctctttgcgaccctgggaactctagcccaccaggctcctctgtccatgggattctccaggcaagaatactgaagtgggttgccatttccttctccaggggatcttcccaacccagggattgaacccaggtctcccacattgcaggcagacactttaacctctaagccaccagggaagcctgtcatttttttttttttcccttaaacttctctaaatatcttctgtactgttggttcatctcttcccatctccacccctggcaacctttgatcttgttattgttttcctgtagttttgccttttccagaatgccatttagttggaatcatataatgtgtagttttaagattcctccctgtcttttcatggcttgatagtcctttctttttagtgctgaataatattccattatctagagatatgctagtttatttacccattcacctactgaaggacatcttagttactttcaaattttagcaattatgagtacagctgcaataaacagctgtgtgtattttttttgtttaatatttatttggctctgctaggtgttagttgcaacacacgggatcttccatctccagtgtggcatgttggatctttagtcagcatgtaaagtcttcgttgcagtatgtaagatctagttccctgactagggattgaacccaggccccctgcattgggagtgtggagtcttaaccactggaccgccaggggagtccctgtgtataggtttctatgtggccatgacttttcagttcctttgggtaaacgccacggaccaccagactgtattccgcagttgctctaccaccttgatccccgccagcactgaaggagagttcccgtggctccccatccttgctgacatttcgtgctgtcaagtgtcccaaatcttgaccatttcagtgagtgtgcagtggtgtctggtgcctgcatgctcagttgctcagttgtgtctagtgctttgcaacctcatggactgtaccacaacagactcctctgtccatgggattctccaggcaagaatactggagtgggttgccatttcctcctacaggggatcttcctatctagggatcaaacagtctcctgcattggcaggcagattctttatcactgagccaccttggaagtccagtggtatctcactgatatcttaatttgcatttctgccttgatgcatgatgtggaacatcttttcatatgcttatttgccattttatatcttctatagtggggtgactgttaaggcccattttttagacagtttgctttttcttattgttacgttttaagagttctttgcatattttggatattagtcttttatcagatatatctttctgcaaatatttttctccagtctatgatctgtgttttcattctcttaacattgtctttcacagtgcagaagttttaattttaatgaagtccattttattagttatttctttcatggatcatatgttcgttgtttcaccatacccagggtcatctaggttttcttctgtgttatcttccaggagttttgtagtttgatattttacgttttaggtctatgatctgtttgaatttatttttgtaagatctgtgtgggtttcctaggtgactcagtggtaaagaatccacctgcgaatgcaggcgatacaggagacagaggaagaaaatggcaacccactcccctgttcttgcctgggaaatcccatggacacaggagcccagcaggctacagttcgtggggtcacaaagagtcgaatccaactgagcatgcatgcacacaagatctgtgtggattcattttttgagtttggatgttcagctattccagcaccatttatcgaagactgttttttctccattgtgttgtctttgttcctttgccaaaggttagctgactacgtttatgtggatgtatttctaacctctctattctattccattgatccatttgtcttttatttcaccagttctggtctcctttccccagagaggtctcacagagggtgtcactcattcatgactgggcaaaaggatgaatgttttgatgacacagactttaagtattgttcacaagagtgtaaaccatgaatgaaaacctgttgactgtcaagccattattttataggatatatgaaagtgtattaaacaaaaatagaatcataaaatgatgccattttgcacttgcccttttccaatccgcagtatctttccacatgagtacatgtagacctatcttactgtttttttagtattccattacatagatatagcataaattattaattatatattatactgtaagttctatgtatttctgtaattatataaacctttatattaatacaggtacatattagcctttatatcattgtattgtttctaaatagtcacttttacaaacagtgctacagaacatttttggaaataattatttgtgttttctagtatttcatgacaaaaattcctaaagactttctgaatcaaggatgtatatatttttaaagcttttggtttttattataaaactaatacttatcaaaaaatgcaaaatatagaaatacataaaatacaaatcagatgtctacctgcatcccagtttgatatgcatccctgaaatatgcatttcatattgtaaaagaaattacccaattgctatctaaaaaggttgtacctacttatatcaccagtatatgaaaatgcttattgtccactttcttcccaacctatgtcattatctactctaagtcttttcaaatccagtacacatcattttaaattgtgctttcaatttgcatttctttactagtgaattggacaccttgtgtttaatttttttaaatgatgctcctgtgagttgcctgttttcttttgcctaatttgctatagggttttttcttattaatttgtaagagctctttatacaataagggaattagtttgctacaaaattttgaggagctgattttttttttttactttgtttgtgatgtattttgccacccagaagttttacatttttctaaaacatcttttgagccagccttttttttttttgtccaaatataaatcctaggacaactttttctgctgctcttctcagctaaaatttagttaaaaggacatttccccctccccccttttttaaagagaggcgaatagaataggaaaatgcctggagcccaaggatcgtcggtgctttcattcagaggcaggtcagcaggattcttttccttaggtgactcaaccagtctgcaaggtgtcttgctcagttgccctctcagagctggcttattcaagtgtccttccctttatccctgctgttgaactcactcccaaggttcttgttttcagggtaagaatctctcctctagctcccaacattcataaggcaataccaactgaactgccctcccagcccctgccctttggcaaaagtgactctttctccctccaatgcaaaccccatttgcctaatatgaatggtattctggaagcaattgtgtatattaaataaattctgtctacattcagaatgtgagggacagtagtatacacacaacttggggcaagaacaactaatcacaagcagaagttgtacaagatgtgcttttgactgtttacagaactgcctatttaggctgttagaatatctggtcactcattacccagtttttaaaaaagcctttgatgaatccctgtcttctgcagtacaaagaccaaactacttaacatggaatgtgaggtcttccacatcctcgtcctgacctatttcttcagccatgtacatatatgctaaccaccttatccaaatgtttatcagttttttgccaggaattgttctaggctctagaatttgtggttgtccctgcttttacatggctttcagattagctggggagacagacaatcccaagtaaacaaattgatttatagggtggccagggaggaactttccgaaaaggagacatctaaagtgagacctgaagaatgggaaggaaccagctgtaacaagagttgggaggtcgagagagagatgctatcggcagagggcacagcaacagccctgaagttagaaagagttggagtgttctaggagtaaaagaaggcaggcataatcaaagttcagacaaagggagaagaccacagtgaggtgatgttaaacccaagggcaggggccaagttgcacggtgcattgtagactatagtaaaggagttcagattaagccaaatgaggtgcttaaatctggggttgggatgaaataagggtgatgacaacataatgtaaaggtctttaaagtttagttcatttatctgttaacaactctctgatgtgagtattattagtaactagttttatggatgaggtccctgaagaaggaagttgggtaatttactcaaagtcttccgatacaattgaagtattgagtcactggatctgcctgacttcaaagcccacgtgcttaaccttgactctaaattctcatttgtctaattgctttgttttgtgagaaaattaaaattcagagattaaaaataagcaagaatgaagcactgttcaaaaaaatcagacccttcaatctgaaaggattaaagaatgaactttttatctggcagaagctcagaaagctgagaaacacaagaagagggcatcatagacttattcactgtgtacatgagaactcaggggcatcttttgaagcttcaaagaagtaattataggtcaaataaaagaaagtactttttatacagtgaggagtaaatagaaggagctgattatcccagatacagactgaaaataaaataaatttagagtagcttttatgaaggctgtagagtgagttagtaaaacagaacctcttttgtatgaagcatgacagaaattgtaacagaagcttaaatgactaaaaatatttggaaaaatgagtaagggaaaactaattctacgtacaatagtgaaaaaggaaaacaattttaggtgtgataattttgcagcatttaaaaattttagttttttatgtattgagaagaaatacataaactcataaaattttgttaagagtaggaagccactgtaaagggatagaaagacagactgtcttcctcggtcatcacagacaataaaatgcttatttccagggaaatccattttgttagactagaagggtgtggtcacatcagttccaggatcccaacttgacatctgaggaaaaagctgaggccccagttcttttagaacctttgcttgcttgtgctgcatttgtctttcaaaatgtttttccagctacatgcagttgaagttaactcttgcttaaaaacaaatgtcctttattccataaattaggaggtttttacagcctaaaactgagcaacagtgggacttgagctctctcttatccccactgtcctgtcagttcctgtcagtcctgtcgagactccccagcctctcggtgcagacgctcttgtcctttcagtgctgccctctagccccttacagctgccacagttgaggggagaagagtgtacactcggtctctctagaagtctgggagctgctgagtcagagtttcataacctcaatatctaatggtttctgcttcttggttttctagtaattgtctcaccacagtcaggttgcaagcatggccagaagcttcatgggtccagcaccacttctgtggttctcctcttccttcaggagatctgtgggggcagctgcctccttggtatgcatcacacgcctagttgagccttcagcatatcaagtgaacactgcaacattatattaatagcctagtctgttgtatacgcaatttaaaatgttaatgctacgaagtcagattgtgaattttgttcagacagtttttatgggaattctgccattaaaaaaaagtctacccaagctttggaaaaagggatagttagcacataagatataaatatggatatgttcttgtaacatagaggctcttcatgtttatgcatgttctgttcattatctttaaagtaatctcccgttgagaaatgctgggcatttcatttgggcaagccaggcttgtatttttaagtgtgtgtgacaggattattgtttccactcatgtttgtactgatagctaatgaaatttttgattctcttctgtgacttctaccatgattggttttctgttttagtatactatttcttcagatttcaaatccatgaaagttctgtggttcctaacaactcatcattcattcattttttatttattcattcattcaactgatctctcctgaacatctactttgctaaacactgggccaggtgtgaggatgatgccaatggatatatcatagatattgtccccaaggaggtcacaatctagttaaagagacaaacctatggggaaataattacaattaagtttaagatacctatgagacatctaaatagagatcttaggaagttatatgagtctgggtctggagttcaacagaaaggtctgggctagagatcgaaatttggggaaaattggtattcaaactcacgagggtggatacgatgcagtgtaaaatcaaaactaacaatagtaatatctaatcataataatagtattaatgaggatagctaatattaatttaatcctcatagtaactctttatcataggcattattattactctttttgtagatgaggctcagagaagcctcagtgttagtaaaccacaaaacccagtccagtcctacagcctgcctcttaatcctgcactagaagagagaaaaggcttctctggtggcccagattgtaaagaatctgcctgcaatgcaagagactttggttcaatccctgggttgggaagatttcctggagaagggaatagcaacccactccagtattcttgcctggagaactccatggacagaggagtctgaaaggctacagtccatggggtcacaaagaatcagacatgactgagagactttcactttcagaagagagaaaagactcagctcagaggtccaggcaattcctgcatttagaggttggacggcagaggcagacttgtgaaaggagtgatgtgatgggtaggagggaaccaagagaatagggagtctcagaagccaggcaaagagcattccaggtaggttgccaaggccagcagtcaaatgctgctgaaaggtgggtacttctaagacacaggcatgaactgggtgatgaggacagggaaaaggtttgccaggcttggagtttaacgtgaataaagagataggtatggaggaaccagatgtcattagagggttaaacacaagcaggaatggtgaaagatgagaccgaagacgttgtcagaggccagatcatgaaggacctgcaatactccaaggtagccccagaccattgatctctgccagaaatgtgcatccccagagctgggggcaaacaaaagtgagctgcctgttataaacaagagggaactatatatctatgttatcccatatgatatctgttttgtcagatttcttcaaaatttagcatgttgaatgttgatcattttcaatttatagacatattgagtcattgtgttgtgcaccaggagctgtcttagtattgtaggtcaattaattatactttaaaaatatacagactcatggaaaaagagatcagatttgtagttaccagaggtgggaggttgggaaatcaggaattgggtgagggtacaaacttccagttataaggtaaataaatactagggatgtaacacacagcatgattaacatgatcatgttaataacataacaaataatataattaacaccactgtgtgttataaatgaaagttgttaagagagtaaatcctaagggttatcatcacaaggaaaaatatatttaaattttttctttaattttgtatctatatgagatgatgggtattcactaaacttgaggtgtggtaatcatttcatagtatatccaagtatataagccaaatcatgatgatgtacaccttaaacttatacactgctgcatgtcaactcagagaaggcagtggcacctcactccagtactcttgcctggaaaatcccatggacagaggagcctggagggctgcagtcaatggggtcactgagggtcagacacgactgagcgacttcactttcacttttctctttcatgcattggagaaggaaatggcaacccactccagtgttcttgcctggagaatcccagggacaggggagcctggtgggctgctgtctatggggtcacacaaagtcagacatgactgaagtgacttagcaatagcagcagcaaacctggaagaaaaaaatttaccatgttgagacattataatttcagatttaaaaattacccatgacttctttcagcaccaaatcatttatcagactggtagatgttctgtgtggaaggaagacatctatatacaaaggtacataattagcatgactgtttttatacttctttctatattgggagcaagtgttgaaagtggtaggaaagtgtgatttgttttgcttaattgggcaaccttgatcacaatcaggggaaagtgattcattgagtttctgtccttcattgtacatcctgaacagttttgaagtcagagattgtgctgggtttgaattctgcctctgtcatttattagctaagtgactttggggtcagttacttaacctttctcaagctgtttgttgaatgagagacttctttaataaacaattataaagcatattgcaagaattaagtaaaggatatgaattaggaattttctttatcctaatcgaacaaaaagccttacagtgaagatgatcaataggattcctttctttgtttttgattctgtcttgcctttggttattttgcctatttagattttgtaatttatccttaaatacctgtagctaattgtcgatagaaatagtaattttttctagatgtggatttgaagactgtgcttataaagtgagacctagttcctaaaatgatctttacaggaatcttaaagaactgtagtatctaaaaatattcattctgaagctctaccatatcatatagaattctagagaagattagttaatttttgctacttgatggtgacaaaatatattcattaattttcaaggttcttgttttcttcatgaaattaaaataatttcattgcctgctggaagctgacttcacagtacatgcggggtaactttaagagttaccaaaaaattaaaaatcttaaattaaccctgtcattttgtcatttatagaagtaaatgaactggaatcattcatttattaaaatctcagctcttggcagatttttttttttttttttttgctattattccctgaactcatttcttggcagagcttcattctatggtcacaaccagttggaatgctgaggatggatgcctggctgaccactgtggctttgacagattgtcttagatgagacatccttaagtctcatctgatgaaatggaccagtttaatagcacttttcattacaacacgaaggggatcaattttggagtgggggagggaagtttctttctgggatctactttaattagggagaagagaggtagagtggaaaggatgtctggcttatagagtagacatgggtttggactcaagctctaacacttttaaggtctaagccttgatgcaagcataccttagagatgctgtgagtttggttctgggccactgcaataaagtgaatatcacaataaaatgagtcacaataatgttctggtttcccagtgcataatgcaagttatgtttacactatattgtagtctattaagtgttcatagcattatgtctaaaaaaaatgtagacaccttaattaaaaattattttattgcttccctggtggttcagtggtaaagagcctgccaatgcaggagatgcattttcaattcctgggtcaggaacatcccctggagaaagaaagggcaacccactccagtatttttgcctggagaatcccattgacagaggaacctggcgggctacagtccatggggttgcaaaagagtcaggcacaacttagtgacaaaaaaaaaaaaaaagctaatcatcatctttgccttcagcaagttgtaatcttttttttggtggagggtcttgcctccacgttgatctttgcttactgatcagggtaatgtggctatggcagtttcattaaataagacaacaatgaaattcgctgcattaattgacttgccctttcataaactatttctctgtatcgtgcagtactgtttgatagcactttacccgcaagaaattctttcaaaatgggagtcaatcctctcaaaccctgctgctttgttaaccaagtttaaatcctttgttgtcatttcaaccatcttcgccaggaatagattccctctccaaaaaatactttctttgcacctccacaagaagcaactcctcatttaggttttattgcgagattgccctaattcagtcacatctttaggctccacttctaatgcttgctatttctatcacatctgcagttatttcctccactaaaatcttaaactcctcaaagtcatccatgaggatcggaatcaacttcttccaaactcctgttaatgttggtatttgacctcttcccatgaatcacgattaatggcatctagaatggtgaccagagaaggcgatggcaccccactccagtgctcttgcctggaggatcccatgggtgggggagcctggtgggctgcagtccatggggtcgttaagagtcggacatgactgacttcactttcgcttttcacttccatgcattggagaaggaaatggcaacccactccagtattcttgcctggagaatcccagggacaggggagcctggtgggctgccatctatggggttgcacagagtcagacacgactaaagcaacttagcagcaacagcagaatggtgactcctttccaaaatggttcaattactttgcccagttccattagaggaatcactgtctatagcggtgaaaagtgtttcttaaagaattttttttttaagtatttcttaaataaaagacttgaaagtcagaatgactcctgatctgtgagctgcagaatgaatgctctgttaacagacatgaaaaccacatcaatcttgttttatatctccatcagagcccttgagtggtcaggtgcattgtcaatgagcagtaatgttttgaaaggaatcttttttcctttgagcaattggtctcaacagtggggttaaaacattcagtaaaccatgttgtcaacagatgtgctgtcatccaagctttgttgttccatttatagagcacaagcagagtagttttagcataatttttaagggcccttaggatttggggtatagtatatgagcattgccttcagtttcaaactaccagctccattggcctctaacaagagagtcagcctgttctttgaagctgtgaaaccaggcattaacttctctccagctatgagagtcccagagggcatcttcttccaaaataaggctgttttgtctacactgaaaatctgttgttcagggtagccaccttcagtattttaactagaccatctggatgacttgctgcagtctacatcagcagttgctgcttcaccttgcacttctttgttatggaaatgacttctttccttcaaccttcacattcttcttctgcagcttccttacctctcagcctttatgtaattgaagagagttagagcctgctctagatttggctttggcttaagggaatgttgtggctggtttgatcttccttccagaccactccaactttttccatatcaatgatttgtgtgttctttggagtagcacttttaatttcctttaagaactttttctttggattcacaacttgactatttggtgtaaatttttgacctaaagtgagaaacctgtaactcttcctttcacatgaagacttagaggccttataaagttattaatttgcctaatatcagtattgttgtgtcctaaagaataggaaggcccaaggagaggaagagccagggaaataaccagtagttagagcagtcagaacacacacagcattatcaattaagttcaccatcttacgtggatgtggttcgatgcaccacaaaacaattacaatagtaatatcaaaggtcacagatcaccataacaaatataacaggaatgaaaaagttttaaattttgtgagaattatcaaaatatgacacagagatgaagtgagcaaatcttgttggaaaaatggtgccagtatacttgcctgacacagggttgccacagaccctcaatttgtgaaaaaggccacatctgcaaagtacagtaaagcagagtggagtgcagtaaagtgaggtatgcttgtatctgttaaaaagcctcagaggggcacaggacacttctgctcttcactttcagccccatccagaatgccccttttcttcacccccagccgttctcttctctttcccccattttggtgtgaccctctttccctgctccaacaccttggcttacctttcttcccatccgttccccactttgctgctgtaggagatggttggtggaaatggtggtcacatcacctcttttccttctgggtggtgggattgggagtgggtctctgtgttctggaagtgaggtgtagcttccactctacataaattatgaagggatggaggtttgtttgggggaggaaggggtgttttattacttctctgctccgttcctgtctggctgtttttccttctttcaaaccaaaatttcctatataactcagctctccaaagtcactttcatctttctctacttctataaattagagaccctttataagattctgggagcctctttctgatacttcttttaagctaccctcttagagtataatgagtaaggccaggaacattcatgtaataaatatttattaagaaattattagatgggccctgtgttaagtgctgaagagacgaaggtgaatgagatgcactcttcctctcaaggaaccaacagtctatagaaggagataggcaagcagagtcattgtttagtgggatgaaaattgcatgaggtaatggggacattgagagtagagtgccaaatgatggtgggaagtcaggaagttcttcttagagaaggcagtactttaacacagatgtgaaggataaataggagtctgctgtttgaaagcaagggcttatttacgatacagcaaacccatagtttggcatgaccagacagtggcagtgatgattgaaaatggagggaaaatgaaatgtttaagaatatattccactgagaggtaaggttctaatcctgaacctaggtgtgtagatgggaatttattatgtcaacagatactgtgtgtgcgtgcgtgtgtgtagtttcttgaaagtccatcatgtgctttaacatagtagttcctaaattttctacctgaaaaacatgcctttagggttatttgaattacttagtagccatttggctatcagtgttaatgtcagggatcagaggaaagggtattgatgcttcaggatttctcttctgcttcagttcatcgcctagaggagcacttagttattataggcttatttgaattgtcacctaaaacattcatttttgtgaatgttttcaatggggtattaacattgaaccaagtagattccttgttgccaaactgctatgacttaataggggaactatgaaagacgtgcagatgtgctgtctgtaagcaaacagcgtgcatgggggtttggggaagggagagcatcacatggatcagatttggggatttagggactagtcatttactgtcaggcttattcccaaggtgtctgaggcctcagacactattattctgagtactcaaacttttgggttccttgactgacaaaatgcaagttcacaaaacttccagtgagtcaccggcattaatcaaggacctcttgagtgttgtcattgtggtagaatacaatgagaatgatgactgctgcctccttcagcacacagggatgggtgtaacccccgagaagccatgctgtttggtgcccctctctgcagggaccagtgcaggcatgtcccctgaacccgcctttccagggctctcccattagactcagtcagctctacctcgtcataaattatgttgtatgacagatggtttttattttccttgcaagctactaatctttgtgtatttatatttcagtgttttctgttttaagcctttttctcttttcttcatgtcctacagtttttgtggctttagtcacaaaatatcccaaatccttgttttcccttcttctacagtttctgcatcagtgttcactctttctttgcctactgttccacgagtctcttctctgagtctctgactcctaccccatctcagctgtgctttgtggcttcaggaaaaatcctgaggtgggtctgtgaagtttgcctttgctacttctcttcaccattctcctaacttttcccccttcccttgccctacctctgccttaaatagaatcaacacaaatgtcccactaactgtggtcgaggaggtgagccaatctagatgggttcaaagacagcttaaggagcatgcagtctagtgtaggaggcctgaggtatcgtaagggaggcatttgaaggactcacaaggtaatgagggatagagtagtgtgagttaaaaatggaatggggagcactgcaggaaagcttcaccttttattagctaatggagacagctggtgacagagtcgttacaagacattggaccttcccttgtcttgtcttgctgggaactctgtcagggctggttcactttggctaggattgtctttcactaactgcttcggtttcactaggtacctgggcagacttagtgggtatgcatatccactcctatttctgattcctccctgactgttgctaacacatctctcttttaggttcttgtgtgatgtcgggaccttgccttcttgtcttccccttcagtcttcacattggatgtagctgaacaagcttagtcatcttcatcagggctaccatgtgtattttctgtgggggcctaaggggacagtggaaagtagggttggaggtgatagaggcaataggaaggggcattgtcagattgagattcctctctgtttcagcatctaaggtatatatatttcccaactgacctagttctgtatagtagtttctgcagagtcactgatcctcactgattaagatggaaaagaataataaagagacagtggtaataatagactgacttctgacctatttctccttggatactttccccagagataaagataaaataaaggggaagttggttgtcagagtgatgtttggtatttcaatatcctgcctctgctgagtgtaagggccttagcctctgtcttctatctgtaagtgttgttaacatctggctcttggaaatcaaacctttggcaaagtaccagctcattactgcttccaaaatacttgtagaaatctgagctagagcttgctatggacaaaacacaaaggcacgtctttctagagttagttgaaaactcatgtttagagcaggtcagccatgattctacacactcacttggacccattttgctttttgtgttgtcctcagtcaaggtagtaggttatttcatgactctgaatctcatgttttagacatcttttttggaactagtatatcctttcagaaaaagttatagaaatactggctttctaaagtaggcttcagagtggaagcagttagtaaacagaaatgttcatttttttaacttattttttaattggtggaaaagctctttgcaattttgtgatggtttctgccgtacaacagttacggcaaatcagccatgattatacatgtaccacctcccttttgagcctcccagaaatctttattgaatgaataagattttggtaatgtatatggatattactcagtttaaggggctgtataactgagggaaaagttatgaaataaattgtagtaacatatttgatatataacattaataatcacttcttatggaaaaaacatttagtaacaatctcagcctatacttatatattggtttatgctttcacagagtttctgtgtgtataaaccttggagataaactagatgagtcttgctgtcatcccccatcttgcagatacctgaagtaaaagctaaaagaccaatctggtagtcctgcgattggagcccataacccggcttggtactcttttctctacaaactattcagaccaaaaatctgcataaatctatggtaataagagataaataaagcaaggggtgaggttttgttctgtttttttcttttttttatgttcacttttattcagtttaaggattggcattcttttagcaaatactcagggcccagctgtgaaccagatacgcaagcacttgatacagtgttgaataagacaaatatggaacttatattctaacaaactaagaaaaatagtaaatacgtaaacaagaaataacataagtaaattcaggtagtaataaaagctctgaagaaactagagaaagactggtgttggtgatattttcatatgtgatataattcctaaaaatgggcaccaaggtttagtgtacatatatatgttttaaagggagattcctttctagacaatccatatagtcataaaacacctcttcattgtggtgtttggaggacccaatcaaaattgatctgaagttcaaaattggcttaagtccagagggtgtagttaaggctaaagatttgctgttttagaaactcctcttgatacctctttcatgatattgaggctaggatgaatattccattttactattttcactcatctttataaaataatgaggacaaaatatagacagcagtgcctttttattttttaaaaattagcagcagaactttcttcaaagaaaattccagatgtccagtatgtaaaacagctgtggctcctctgctcataccataatgatcccccacgaatactgagaaatcactaagggtttgcagaacacaagatgaaaactacaataaaaaattcaaattttaaatcttatgattgaaaaaaatagctgtgccgctgaaactggcacagccgccataccagagcttccaaatcttgttcttagacccatgaaagtctgcattcagtgaaaaaaataggtttatacatacattttaatctaaagttaaatttttgggtagcattcttaatataaggcaaagtcaaattttaatcaaggctatttcttcagagcatagatccccccacttccgtggtgttattgagatagaattgacatactgcactgtataaatttaacgtgtatggcataatgatttgaactacacatattgtgaaattattaccacaatacagagcatgccttttaataatgtgggtttgatggtactactgaggctaaagtacttttcatctgctaattttaaagttaaatttcatatttgctgggttttattttgttcataaactgtttaattataactacacccatgattttttaatatcattataaagtaattgaattgctggtttaaatattcttttcttcatgtcttctagtttgccagggtttggatacctgatcctgaagaagtttggaagtcagcagagctgctcaaagattataagccaggagataaagttctcctgcttcaacttgaggatggaaaggtaggaattctgcttttatttgttgttattggcataaagtaaaggaaattcaaaagggtaaatttgctgtgagatacttaacttcacttggaagttaaatttttaattaatctaatattttcacttaactgataaaaatggcaaacaattttccatcccaaagggttagtgaaaatagcagttactttaaaaaatccattattttggcttatgaatttattatgacctgatttagattcatatctaatcctcccgtagatattcctgtttatctgtattttgtttaggatatcacttaaataatttatattaactaagaaaacaacatttcaagagccagcttgagataggatatttgctgaaataggtatttgaaaaatatttacttagaagctattatctataaaaccctttgctagtggccaggaaaacctataaccagttgtgtctctgtactttccatctgcattcactgcagaatagactcttagttccaccctttttattctcaccactgcatttggcagggcatgtcacacttttagcgtgacattaatttcctctaaacaatttataatctagccaggagaatgcaggatgtaaaaagtagttcaatactgcaatactaaagatgagcttatgattaactgccaagtgagtaatactgtcctgacagttaatatgtattgaacacttactatgtaccagatgtagttctaagtcctttatatcctataactcacttaatcctcacaacaatcctatgaggtgggcctgttattattaccactttatggatgaagtactgaggctcagaaagtttgggacttgctcagagttacgcaggcattaagccagtatatggtctgtgctcatgaccactgtgctgtactgtaaagatagtgaggactttagggtcccaagagaggcactgtggggtgcttcagggaaggctcccaagagaagaaagagttttgactagacagaatttggattaacaaagagaaagaggatagactttgtgaggcttggaatatattttgcagatagtgaatatcacaagttgactgaatagagatttaaaaaggtatgtattctagttcaaggctagtatgttaaggtacctgctatgtatcatgttaagaagaggcaaaaaatatgttctctgacattaatgtcaaataagaaagtacatatacttatgaatagtgtgacatatgatataataaatataaataagaaacaaaaatagaacagagtggagactggtcagaggaactgatgaaggctgagtcagagaggtatcgtctaaagaatgaatagacaaggaggattgcgtttcggggatctggaggagcctcggcaagggaggcatgcacagtattgtgcatttggggaactgtacaagtttcgtgttgttgggatttgacgggagaggacgggcaggaatatggggggtggggaccaggtcatagagagcctcgtgttcatgctgcaactcttaaacttcaactggtatatctgggaagtgattgtagtgtttttaaacagaagaaggagtgccaggttttctgttttagaaaagagtcaccggtggtggagtggagaatgaatttcaggagagcaaaacagaggcaaggcaattattcagaaagaaggcagggaagaattagaccagattagaagggccttgactatcaaataaggaattaacttattcaatattcattgatcatccactctctgaggcacgttaggtactttaggctatattttcttatgataattctcacagcaaacctgtgcgttcgcatgtggtattgtaactctttaccaaataaggaagcccagactcagagacattaaccagtctgcctgagatcacacagccaatttttgtatggcaggagccaatgcaaagactagtcagctttggaaaaggacattagaccctaataaacagacaaagagaggtcgagggtcagactgtaaaaatttcctcattttgcagaattcattccaaccttatttgaacatttgaccactatatatctctttagtattaacaaaaatattaacaaaagtctttttacaaaactaacttgtccgtctctgcgattatattgctgttttttttccttttcgtgtgttgtatgttgtttccccttaatacataattgagtgacagtctccatgcttgactttgccttaaagccatattccttaaaatgagtagtacttcttaatttggagggccaagcacttcattaaaagtctgataaaaactatggactgtattttaaagaaatacacatatgtgtatgtacttacacatacatgcatagatgcaaagtgttaacatctaattttaagggattcttgggcctctctgggttcaggagttcccaagtacttaccacataccaaacattgtctcctctaatttttaccacacgcctgtgagctatttccattatgccctttttacaaatgaaagattaaggttaaataatattcacaagaccacacaaggagtaaataacagtttcaggacttgaacctgtgttgatctggctctagagccaagctcttaccactctcttatcctgtctgtcacttataccaggtaaagagggtaaaacaaagaattattctcccatagaaaatgatctggcctagtaactaggtagaaaatatattcttgactttgacttttcaaactgtattagcaaaaaatgttgctgtgagttaatacatctagtgaagatagactctccttattttttgctgtttccaccaatttctgtggttttggggggtaccaggaaaaatgtatttaataactgaggaacaaatcaggaataggaaatgtattaatacatgcctgtatctggtttttgccatggtttatccagatgctgtatcttgtgccttttcaggatttggaatatcgtctagatccaaagaccaaggaactgcctcatttaagaaaccctgacatacttgtgggtgaaaatgacctcacagccctcagttatcttcacgagcctgctgtactccataatctcagagtccgctttattgattccaaacttatttatacatattgtggtgagtgtgcattgctgtctgagtgaactgtgaattcttttttgctaatggacataaccatggaaataatgtgcatgagaaagaaggctggggtggatcttttcttagaaacatattaacaagatttcagttcagttgctcagtcgtgtctgactttgcacgtgactttgcacgccaggcctccctgtccatcaccaactcccagatttacccaaactcatgttcattgagtcggtgatgccatccaaccatctcatcctgtgtcgtccccttctcctcctgccttcaatctttcccagcatcagggtcttttcaaatgagtcagttcttcgcatcaggtggccaaagtattggagcttcagcttcagcatcagtccttccaatgaatattcaggactgatttcctttaggatggactggttggatctccttgcagtccaagggactctcaagagttttctccaacaccacagttcaaaagcatcaattctttgttgctttctatatagtccaactctcacatccatacatgaccactggaaaaaccatagctttgactagacggaactttgttgacaaagtaatgtctctgctttttaatacgctgtctaggttggtcataactttccttccaaggagtaagcatcttttattttcatggctgcagtcaccatctgcagtgattttggagccccccaaaataaagtcagccactgtttccactgtttccctatctatttgccatgaagtgatgggactggatactatgttcttagttttctgaatgttgagcttgaagccaactttttcactctcctctttcactttcatcaagaggctttttagttcctcttcactttctgccataacagtggtgtcatctgcatatctgaggttgatatttctcccggcaatcttgattccagcttgtgtttcttccagcccagcgtttctcatgatgtactctgcatagaagttaaataagcagggagacaatatacagccttgacgtactccttttcctatttggaaccagtctgttgttccatgtccagttctaactgttgcttcctgacctgcatacagattctcaaaagatttaccagtgttcattagctagttgcattttatgttgaataaactcttttatgaacttacataatattactcagaatacaaagaactgggtccatcttttgctttttctctgcatggaagtcgtatgccatattcgatactgatttacaagttatattcatctcttacaaaaaccaatacttgaagagtagacatccaaacacttagctctggggtgggttcaagatggttttttctttttctcaattgcttagcagtgaaggactgacttgagttgcagtaacacttcttgcttgatctgcttggctgggcccctgctcattccagtactagctgccagtgacccggcccaggattatttttttccctctcctagcagttaagcatacatgtgtatgttccccctttccttctttttcttctttctctgtttccttcttattcttcattttctctagctcttttttctctactgactttttatccttctttcactaagtattatctgctgagtctcaggtctgggatttccatccctttccttctaagtctctcctgcatggacccaacttggtgctcaacatttcttcactgagctccagtttggggcagggacagctatcttctcttcttaaaagaatttatattttttatatccttgatatttcttctttttctttcctacctattaagtcttttgctcaattttcattttttcttcagtttatatttcttgctcatatgctaccttctcagtgaagcctttcctgtccaccctatattttcttctcctaggcaacaatattccttctctgtttatcccccattttccttactatctgtcctgtaatatatatatatatattttttttttccttatttattgtctgaatttccctctagattacaaggtccaggaggacaaagatttttcctctttaaaaaaaaattttttttttgaaatatagttgatgtggtggctcagacagtaaaaaatccacctgcaatgcgggagacctgagtttgatccctgggtggggaagatcccgtggagaagggaacagctacacactccagtattctttcctggagaactccatggacagaggagcctggtgggccccagtccatggggtcacaaagagttggatatgactgagcgactttgactttgactttacaatgttatataacttacaggtgtacagtatagtgatacacagtttttaaaggttatactcaatttaaattagtcttttttttttactgctataaatatagcacttagaaaagactcaaaacttaattgtagtcaaatatttgttgaatgaatgactaaagttaacatatatctgctataaaatttaaggaaataccaagaaaaatattaaaaaggaaaaataattacatgtaattcaccactgaaaaataaccaatattaagttgtcttatatcctgtgtgtaaatgtaaaagagtaaataaatataaatatataaataaatataaaattggaatcagtctgtaaaattggaatcagtctatatatagttgtgtgtcgttttttcctatggcacttaatatttgtcacaaacatgatctggatcacatggatataataatacatattaaaccactctccctttttaaaaaaaattattgaaatataagtgattcacaatgtcatgtttagtttctgttatacagcacatgactcagttatacatatgtgtattctttttcttgttcttttccattgtggtttatcacaggatatgaatatagtttcctgtgctatacataaaccactgtccctctgttatgtattttgtttttacttttcactgttatgaataacattataataaacatctttatttttttttaatccctttacatgaatatatgtttatttcatttggatacatttctagaagtagaatttttggtttaaatattataaaaatatttgaagttcttccagtattgccacaatttttactactttaaataacctagtcttgtttgtaaatggtgttttagttaggacttaatggttcacaggcaaatgctatggtatattttgactcttgacaatttgttagtttgatattaatcgaattttaactgtgattctcactttaccacgtttgatatgcccattagaatattattgacttcttttgtttttttacctttcttcccaggtatagtcctagtagctataaatccttatgaacagctgcctatttatggagaagatattattaatgcatatagtggtcaaaacatgggtgatatggatccacatatctttgcagtagctgaagaagcttacaagcaaatggccaggttggtggaagctctattactatttcattacttttattggatgtgatcatttcttctttactgagtcacagatattttaaaatacagtgaataacaacttgtaaattattaaataaacagcctcaattaatttgtttcaggtggcctgcgttattatccaaataagctaacatttgtaaaaggatatatagtttttaaaaattacctttgttatctcactataatcctgtgactattcaaggacagatgtcatgttttatagatgaatgggtcaaggtttggaagtattaagtgacttgcccaatgttattcatctagtcagtggcagaccagaactaaaaggcctaaatgctgatagaaatctgtctgtatctggggtaattaaaacagaaaactgtgagttttaagttagtgaattttagggcatcagtgatcctgaacaacgtcaggaaaatgtctttgatgataactgtggaaccctaataatatttttagagtggagagtgagagaaaaatctactttcaagactagattatgctcttggtaatataatttaatgcaaaattatgcatgcattgaagaatagtctatttttaacctatttctccagtctacaggtaaggatgtggcatcttataaatatgatattggaaaccctcaagcagtttatggagagaaaactaatactgaagagttttttattttctcctttccaacaagagagaatgtttgtacataattggaccagtgtgtgacagaattttagaattatttcaatgacagaatccatagaagtcattctacccttttgttagtaaaatagtattgatacttctaatggcagttcagttcagttcagtcactcagtcgtgtccaactctttgagaccccatgaattgctgcagctcaccacgcctccctgtccatcaccagctcccggagttcactcaaactcaagtccatcgagtcggtgatgccatccagccatctcatcctctgtcatccccttctcctcctgcccccaatccctccaagcatcagagtcttttccaatgagtcaactcttcacatgaggttggcaaagtactggagtttcagctttagcatcattccttccaaagaaatcccagggctgatctccttcagaatggactggttggatctccttgcagtccaaggaactctcaagagtcttctctgacaccacagttcaaaagcatcagttcttcggcactcagctttcttcacagtccaactcttgcatccatacatgactactggaaaaaccatagccttgactaaatggacctttgttggcaaagttgcttttgaatatgctctctaggttggtcataactttccttccaagaagtaagcgtctttttatttcatggctgcagtcaccatctgcagtgattttggagcgccccaaaataaagtctgacactgtttccactgtttccccatctgtttgccatgaagtgaagggaccagatgccatgatcttcgttttctcaatgttgagcttgaagccaactttttcactctcctctttcactttcatcaagaggctttttagttcctcttcactttctgccataagggtggtgtcatctgcatatctgaggttattgatatttctcccagcaatcttgattccagcttctgcttcttccagcccagcgtttctcatgatgtactctgcatataagttaaataggcagtgtgacaatatacatctaatgacaggtaacagctattaagtactctttctgtgcaaggcactgtttaattgcctcccatttactaagtagttttatccttataggactcatctaaggttggtattatcattttatagatgagaaagttaatgatagaaatgaacttttacaaatcagaaacagagtcgcaaacatagagaatagatttgtttccaggggtgaggcagagtagaagagggatggactgggagttaggattagcagatgcaaactattatatacagaatgaataaacaataaggtcctatgtatagcataagaaactacattcattattctgtgataaaccataatgaaaaagaacattaaaaaataaattttattagtaaaatgatttcaaaatcaattagtctgacactatgaaatattgacatattaaatataaaatgacaaaacatggttttgttctacatgtcatattatttcagattctgctttagaatagtaaccaaaagtttacttttaagtttaaaagtgagaaaattccatttattgatataatgttttccccctgaaatattggactggccagagttcatttgggtttttccactacatcttatggaaaaacaaacttgaatgaactttttggccagcccagtagaaaagcctgccagtattttatttgtttggtattgagctctgcaaaactatgttagcaccttacaagttgaacctgagagctactgggcagagaggggattgcatggtattccctaccaaaaaataaatccctgaaaaattttttactgttcatagagaattatatgacttttttgaaaatactatttttaaaccttgttactggtaatctgcagttttaggtttatatgaatatttctagctttttaccctttgatttgctttggtttcttaatattacctccttaatattttccctgtgactccagcatgacttcttaatggcaagtttgttttccctttgttcagttttgtttttagatagttttaaaatatgtatcagtcaacgatggtattatgtttgccgcttatatgaattaatctacacccataaaatgtgccacaagcccatgcattgggagcgtggagtcttaaccactggaccactggaccctaaggtgattattttaaactttgaaattagtaagtaccttgtgggaaaatactttgagactatgcaaatatcctatttctcataatatactttcaccactaattttaacatccatcagcggttcttacctgcagtagttattactgagtgattgtttgctatttccatcattccttctgcaggtatgaataggaagtctcatctaaggaaaagctatttctttcctccccaacttacttattatttattttgtatttgtatcagtgtgaactcatgaacatgtatttcatactatggattattctgcattcgcgtgtgtgtacttagttgctcagtcatgtccgactctttgcaaccccatggactacagcccgccaggctcctctgtccatgggtattctccaggcgagaatactggagtgggttgccatgtcctcctccaggggatcttcccaacccagggatcaaacccaggtgtcctgcattgtagacggattcttcacctactctacattgctatcattatttattttgttcaaactgtctcagatttggccattgagagctctttccagtgtcctttcacattctccatcatcttttgatcatttccttactttctagcagcacctgactcattttctaattttcttgccccaacccccaatgaattcagccatttcttcaaggaccttgtactaaagaaatggtacttaggaactaagatctgggtgctagatgcattcactacttgggtatccttgcctataaaccttctcagtgctcacagctaagaaatatgttgccccccacaccttcaccaacagaaggtgttgtcataatttaaaatttccaccaaactgacaggtgagaaatggtatcctagtgttgttttaatttacttttctctaagtagcacctttctctaatggcaacccactccagtactcttgcctggaaaatcccatgggtggaggagcctgataggcgacagtccatggggtctcaaagagtcggacatgactgagcaacttcaccttcacttttcactttcacacactggagaaggaaatggtaacccactccagtattcttgcctggagaatcccagggacgggggagtttggtgggaggccgtttatggggttgcacagagtcggacacgactgaagtgacttagcagcagcagcagcagcagcaagtagcacagactttgcacatctttacacacacacacacacatgcctgtatctatataatgtatatatatttaaaacataaaaccattaaaattactgattcctctaatttaagttcaaatcacagtttttatttaatttacatttcatctttattttttaaatttttattgatgtttattcttgctttgactggtgttggggtaccatatggtgatcttctgttttgtttttatttatttatttattttttcgttaaattgggtcttcattgctgtatgcgggctttgtctggttgcagtgagtgggcttctcgttgtggtggcttctcttatggtgaagcatgggctctaggtacacaggcttcaattgctgaggcgcgtgggctctcgttgtggcgtgttgactcagttgccctatggcatgtggaatcttcctggatcagatattgaactcaggtcacctgcattggcagctgattcttaaccactggaccaccagggaagtcccaaaaccatagtttttattcttgatttattttttcttcttttaacttctttctttgatcttgagaaacctgactgtccttatccatagtatatttacttgtttgctcattcctagaatattcttagtttcagaaatgctaacccatagccctgcgaaaagcaaatttaccactcaagtgcagtattgtgtccaggtcattttgtctttagtcttacatgatatgaagaaccaatttccaaagttacctaggttggttcattttttccccacttattttattaatttgttgaaccactctcccatatatgatcacttagattatttgcaacattttgcaattacaaacagtgctacaataaataagtttgtatatttattatttattatatacatttttatatttgtatttctttatttgtttctcttccaagttgcttttaatgaagtcttgggaacaaaatatacagtctgactcagatacaccatggagcaaggcctagataaagagataattttgcccacatcttggagataagggtgatatatatgtctttatgaaaactattttttttaaagtgtaaactctgtacaacattctccaggagctagagcccaagagaacccactggcagtctattatcggtaggacctcagaggcatctcagggattgaaggagaggtaggcagtttttccacagctggaggaggctgcagctgtcctcatctgtgccaggaataccaggcagtggcaagcagcattggaagaacggagtggggcagtggtattgggcagccctcaatatcttgatcataaatatttggaacaatccatttggtgatatttattgccaatggggccagagctggagggagatttctcatccaaaaggggcagagagtgtacctctctgcttgaagaggcacaggagaggtgatgggagcaaagagatagagcaagggactctcacattcttggctacctcaactggacaactgccacagggccatgagcagcttaaaccacccaactgcttttgggaggagggtgcagaaactaatcactgacaggctttggtagtttaggttcatacctgtttcagagcttttctctaccaacttgttattacaggaatgcctcagctggggtagaaggtctggttgaatgtgtcttcatgtccaacattggtgcttttgctccaagccaggaccagttgctcttagaatctatggctcccatgtctagcacagtgctgtttgaactgaacaccatggccttggtgacttgtgacacaatggtttgaaaatcaagatcgctgtgtaagcagatggaggcattgctgggtttggggcctatcagctagtacatagcagaagtggagtttgacttcacattgtacacggtcttacccccaaatcctaattgcttgcattgggttacacagtgttcagtgctaatgcagtaaccttgaccagcctttaagaagacaagttagaggtggagcacatttttgtatttttaaaagtggcattggtaggtcaaaaggtaggtataaatatattgccagattccctctaaaagagttgttctggtttacatttttgcctaaattgttcaagagtgtctatttccccatagctttatcaacaaaatatgtaatctttgtgtgtgtgtgtgtgtgcgcgtgtgcatgcttagtcacatatgactctttgcgatcccatggaccatagcccgccaggttcctctatcccggaactgtccaggcaagaatactggagtgggttgccatttactactctgggggatcttccccactcggggatcaaacctgcatctcttgtgtctgctgcgttggcaggggattctttaccactgtgtcatgttcttgccagtttaatggtatgttaatgttgttttcatctgcatttctttaaatatgagtaagtttggatatcttttcatatgtttaagagcactttcattttttgtttgtttttttgtttatgggctgatttgttgattcaactttttccatttttctgttgtttttggttttttgatcctcaattttaatagttaaatatatatatatataagccctttatctgtgttatattgcaaatacttcccctcaattttattttgcttgtaatgtccttttccaagcaaatttattcatcttttttatttctttgaattttaagtcactgttagaaaacctttctctacaccaaagtaaaaaagatttaattctcttttcttctagtgtttgtattgtttttatagcttacctttagatcactgatcccattggagtttatacatttatatgatgagagatatatggatctaaatttgtcttttttccaaatggctacacagttatctcagtgtcacttattaagaagcccatctttggcccagttatttgagataccacctaaaatttatcatgccctcaattttcttatgttcttggtttaatttcttggctatattctttcctcttcctttattcatgtcccagtaccacactttgattatagtgattttatagtatgttttatgtttgtgtgtctgataccattaaccacccctcccctgacacagtgtctttttcgttattttcctggttatccttaggcatttgtttttatatgtagattttgatattaacttatccaactccataaaaaataaagctaacttttgagtaataaataacatgaaggaaaggaggaagcaagccattcagatattggagaaagaatattccaagcagagagattagcaattgcaaggaccatacaaagccttgaggacttttgtagcatatttgactttttctctgagtgtgggttttgagcaggggaatgacatgatctggcagctgtgttaaaaattcatgatagattcctaccaaaaatgtatatcctgaatctaatcataagaaaaactaaatgaggtgtatactgaaaaatagctctatatactcttcaaaattatcaagatcaagatagtcaaagaaaggctgaggaactgttcctgattaaaggagagggtggaaacatgccagtaaaatgcagtgaatatttagaattgaatccttgatgatgagggagacagggtaactttgtaaggggcaacactggatgattgtaaaataggaatatagactgtagattaaataatagttttttgtcaattttacatttcctgattttgatcacagtacatacataagagcaatgtcattgttcttaggaagtgtactctaaaatatgtaggagtcatcaagtctataatctactcgcagatgtttcagaaaatatcaaattaagagaaacagagacatttatgaaacaaatgagttctgatgagatggatgaaactggagccaattatacagagtgaagtaagccagaaagaaaaacaccaatacagtatactaacacatatatatggaatttagaaagatggcaatgatgaccctgtatgcaggacagcaaaaaagacacagatgtgtataacggacttttggactcagtgggagagggagagggtgagatgacttgggagaatggtattgaaacatgtataatatcatgtaagaatcgaattgccagtctatgtccgatgcaggatatggcatgcttggggctggtacgcggggatgtcccagagagatgttgtggggaggggggggggggtgggaggggggttcaggtttgggaacacatgtacacccgtggtggattcatgtcaatgtatggcaaaaccaatacagaattgtaaagtaaaataaaaaataaataaattaaaaaaaaataaaaataaaaataaaaacagaaccacaaataaataaataaataaataaatcaagttgaatttcaagaagaaaatataatttttggatttttttaaagtacttacaagctaaatgtataatatttcatataagaagcacatagttcatatatgtcaaggcatcagaataaaaaaaaaagaaacaaatgagcaaaatctaaacaattggtgaatctgagtgaagcatgtacaggaattcagtttactctttttgccattttctgtaagtttgaaatcatctcaaaggtaaaaatacaaacaaaacaaaaggactgaatgtaatgaaataagggtcaattccaggtaactagttaggaggattttgtattgatccaagtaagagctaatgataacctaatagaggagaatacagtcagagatggtgagaagtggataggctctggataaatttttaaggtagaacataagatggcttgcttatatgggggtatgagagaaaaagagaagtcagggatagtggcaaagtgtttggtctgagcacctaaaaggttggagttgctgtttactgagatggaagaaattcagacagagcaggttgtgcatgtaggggtggaagagttggaagaagaagggggtggagttccattttagatatttaagactgaaatggcatttttgacatctgtcctcaaagcagagttgacacaagtgattcttgccccgtagatacatgtccagtgacagcaacatagctaggatccgtggctcattacttctttctcagcatgacgcttacagagaatagtgtcctcatagaagattttcatagactagcctcttaattttaactgtcctgtcagcttacagaagagaagaactcagtgggctgctatgtctcatatttttgtttcacattcttatcagccttttctcatcctgaaactgattgctctctgataattaaagcacagtattattttccttaaaacatcagggctttttttttttaatctcttttttctctttaaaaccaagtaatattgattgcttgatttggtattgttttcctccactgtgaatggtagagcaaataaattttattgattgtttcatttatgggttttcttaaaataaatttgagagttacatgcataaccttagtgtaagggaaacaatatccatactagccaaagctacataaacaaataactatataagcttaagtcttctggtctccctggacctcggctttattatctgaaatagaaaacttgcactagatgacgtagctttacactgaaggcattctttggtgtgcatttgttttcatttggttcatggggattaatgcagaaatcttttagtctttccagtgaagggcaaaccatggtgaggagcctgcagagacacagaaggagcatagtatagacttttcatctggaaactaagagatgtggagtgtacaacttaccgctgctttaaccttggataagcagacctctctgcatctgacctctctgcatcattgtttcccccaaccaagaaaagagaatatttatcatgcttacatcagagatgaaaattaccttagatgataaacataaaaagcattttgaaagatactatttaaatctaagctgttaccatcatcacagtcttcatcatcctggagtctcacgactctattgctaggcctttgcttagggtgggccctttttgcatttgtttaggcagtctctgaagcttcactctgagtttcattggccaagtggatgctggctgttatagatcataaaatctctcctgttactgcctgtgactcaccagccatgtggtatcaattatttctacttatgcagatatgaagtagcacatgctatgtgataaggaattttatatatgatatatatatatatatatacatgtgtatatatatatatagggactaacttctgttagtaattaggagctaccatgtttagaaatatactgtgtgccaagcataaggtcaggcatgttacctctaatttcattatacccctggaagcaaacatcattagccctgctttacaaatgaggaaactgaggaaagtaactttcagaccattgtgctaatagtatctgggaactgaggtttgaatccggctctgagtctccaaagcctatcttctttgttgtttaattttcttacttccaattacatgaccctatttatatatatccattactggacaaaacaggctatttcttttgtggcatctttacattaatttcacagcctctatagaaatggcagcccactccagtactcttgcctggaaaattccatggactgatgagcctggtagactacagtccatggggtcacaaagagtcggacacgactgagcgacttcacttcacatcctgatgaagggcttccctgctggctcattggtaatctgcctgccagtgcaggatacataagttcaacccctgggttgggaagatcccctggagaaggaaatggcaacacactccagtattcttgcctgggaaattccatggacagaggagcctggagggctacagtccatagggtcacaaaagagttggacatgacttgacgactacacaataaaaacacaccgatgaaacagggaagttaaattgacatgagaagaactgacagtcatatgacagacttctcagcaggaattgggtgtatctctaaggaacacttgttctcatttcctgagtaatctttctgcctctgtagcccagctttcattggtgcaccagcacagtcttatagcaaatatttctacttaaaaactaataggatgtattatcttatttacttattatctagtaagttttagagtttaaatcttttcttcttgggattaattaaaagcagaaatcttggagaaacagagcagagcctatcttaatgcttggcaacaataaaaatgtagaaaaaaccttgtaccttctaacaagagaaacagagactacagtctcaagtaaaagccatatcacagtaaatatataactttggaagaaagcattttattacactagcttaatatttttctttttttttatcaaggaattgaataagggagaagcaattagattgagtgcctgtaaagaaataaacctctagattttgttagattttgtttcatgagaatatgttcacttataaggtaaaagttagaccatggcaacacctgagagttaatactgaggtgagtgggtatagtaaattgtattctgtgtgagtcaggctggcattatttagtttcctcattaatgacttggatatgaatggaaggtatgctcattaagtttgcagagaacaagatgatggtcttggaaatatgaataatattcagcatgagcacaataaactagagagattatgtttttaaacagtaaagttcagaggaaaatgtgtaaaataatacacctgatacaaaatgaaatcttgatagatgtaatctaaggaaaggctggacagaccaaacagatacagattgaaggaaaacagactaaagtataacatctctctctttcatcaacccagagtggacattctatccttgaataatttagttcctggggtttcaggtgcttctccatagtttaattctattgccttttcccgtacaaccttgtttctcgttattattatatatgagtcaattcaggcatcaccttctctagaaagcatttcctggcatctcctcctcatgtctccctctccttctccatgctttcataagatcctgggtagacctcttttcttgtaattgttgttgtcgttgtttagtcgctaagtcatgtctgactctttgcgacctcatggatgtgtaacccgccagactgctctgtccattggatttcccaggcaagaatactggcatgggttgccatttcctctccaggggatcctcccaatccaggaatctaaattgcatctcctgcaccagcaggcagattctttagcactgagccaccaggtccactatattttgactgtacttttcagtctgtctcaatacgccctgaccatagagtcttttatcttcataaagtgtttggcatattgtgactactcatttcattgtttaatgaatgaatgaagcagtattttggggtggtagcttttgattcacattctagactctggaagtaccattgactaaacagatcacaagagttcacttttacttcagggcacccagtacccaggccatttaggatcattgcagagacacttgagaggactggctaagccagaaatcataagttctcagttcctgcagccttaggatgctccagattgatttgtccttgatgaagaatggtaaatctgtattccttaatttggttttatcaggtccttgaaatgatatctacatcccagtagtaaatgaagggtcttataaaaggatgcgagtgccttaaggatcagctaatcaaaatttggaagaacaataaattattatttacatatttgcacactttcactttcaacattctgaaacttagagatcaaataagtagagtaggatagactctgatattcaccttaaaaccataaaattttttgtcccttatgtttttggctgttttctccctatctctattatacttttcctatttttcccttttcatgtctttattatgtattacccttcttccttttatgtctctagttgtctttcttacttctacctatctctgcttttgtctctttttgacatttcatcctgtgctcacatatagctgaacaacattttaaagatgactgtatcactgcagatggtgactgcagccatgaaattaaaagacgcttactccttggaagaaaagttgtgaccaacctagataccatattgaaaagcagagacattactttgccaacaaaggtccatctagtcaaagctatggtttttccaatggtcatgtatggatgcgagagttggactgtgaagaaggctgagtgctaaagaattgatgcttttgaactgtggtgttggagaagactcttgagagtcccttggactgcaggagatccaaccagtccattctaaaggagatcagccctgggatttctttggaaggaatgattctaaagctgaaactccagtacttcagccacctcatgagaagagttgactcattggaaaagactctgatgctgggagggattgggggcaggaggagaaggggatgacagaggatgagatggctggatggcatcactgactcgatggacatgagtttgagtaaactccaggagttggtgatggacagggaggcctggcgtgctgcgattcatggggttgcagagtcagaaatgactgagcaactgaactgaactgaactgtacatattttatacacatttctatttcctgttcttcatttaaaagcaggtagaaagagcttacatttttttctctttgtagccctgtgttgattttgaccatctcagattcaagggtcctacagagaagaaatgtttggccatgtcaaacatagccctttaagaccatctgagcatctgtcggcctgtcctattccaattgtacttggtcccaagagtttacttggcttagagtacaggttgtggcatatccaacatcttaaaaatcaactctggagttaaacttttagtttataagtattaatagtttagaattaagaaggactttgggtgctatttaatcattaaaatgagggaaactgtgacccagagagggtatgcagttgctcaaagtcatgaaattggtaaatgacaggtcaaagatcagagcctgattcagagaaatttctataatggaagagtggtgcttatttatatattggagtgctcttctaggcttggggaagaagagaagcctttgcccagaagcagggggatataataaatattggagtcccttaaaaactgctggtcatgtggatcctggatcccaaatctcctggaaaagaaaatgtatctggtgtgtgcttgatatcactgtgtgtatgtgtgtatttgtacaaatatgtgtgatccatctgatcaatcctcaaccgtatctcctttcagagttctctttttccccatggtataggaaagggcttctacataatgaagtttaaattttttggtataacattttatcacacatgcgtgcatgctcagttgctcagtcatgtctgactctttgcaatcccatgaactgtagcccaccaggctcctttgtccatgggattttccaggcaagaatactgcagtggggtgccatttctttctccaggggatcttcccgactcaaggatcaaacctgcatcttatgcattggcaggtggattctttaccactgagccacgtgggaagccccaactttttatcataaagacttgaaatagtattttaaaggcagtacagtttaggataagagttcccactaatatttccttttcatcagactagtggaagcctcttcaccttgtttattgttggaaagcatgctgggaaaattttgtcaaggtagctgtcacacaggggatagtgacagaactgatcatgcaggaattaagaagagataatttgtctaattatattatagaaaggaatccaaagactgccgatactgtcctttgattaatgtatctgagaacattaaaatgttctaaatgactgaaaaagagaaaggtggtactggtcctacagcgagaactggttaagagtgatttatcttgaaatcatttgtatagaggcagtgagagtatctgagtctagaaattcaaataaaagggaatgaattgatgactgtgagattcaaggattttttttagaaatgagaattatatgcaagcttttactgttacgtattaaatattccttagtgacaacctcggtcctaattttccccatagtatgggagtcaaagtgtcagaacaggctgtttacctgccctggtagtgtgatgtgaactacttaatcaggcctgagttggatattcccattgtacttttcaaattttctaaaataatgtggtaactcccatttctcaatgaaaaaacagcctttatcatagaaaaatcttcgtactttggaaacttattatgaatacttttgattctaccactttggtgtctcttaaacccacctgcctgtctcagtcaagaccaccacagtctttgttcagactttcataccttttcatctggaccccctgccactcatatccacattgctgccagagtaattttgctgattggattgtttattttctgtttaaaaccctgaagtagcactctgtgacctgtaggtaaacttcaaattccttaacatctcatgtaagatctttgtgatccacttcttactaacctctgtggccttatctgtcattacttcatgttctagccaaatgttctcctttccctggaatgtttctttcctaacttcttcccttgttttctcttactcatctttctagactttgctggatcatctctagggagccttccttgatcacctcttcttctcagtacctcattacacttattatagtctttaattattagtttgtctttcctctcagaccatcagccactggaggatacagatcatagctttttaaacttgtatcccttgtatctagcactgtgtttggtgtgtagtaggtgtttgctaaatgcttgttggataagtaaatctcttttaaaagatgaaaaggtcatcttctgtagcgaaataacttcccaatcttgtggtgtgtaggatagttccactaaaaacccctgaagtcatcttgtctctctgtaaattaagggcacaaaggataccacctttatgaacttgttcagttaatttgatgggttgtagctgattgctagtttcatctcaggaagttttagttcctgcttctatcccagtcaaagtcatagccaaggcagatttattcctagactcactttcactcagtgcacatttacagcatttgtgatgtgtagactctggactaggtgctggatattaacagtatggtaacataggtccttatcctcaaagaaatgttagtcttatgagcaagttcatcacctagagttttaagtcactgtatgagtgaattaaagatgtatgtaataatagatagtctttgagttctaacatatttgaataaatcagccagcaaatgaactgtttattctctggtaatgagggtactttagtaagaactggaatttgtgagagatactactttatggactgttagccagtaggcaatttgtctttttaattaagtagtattttcttctaggttcacttgctgtaactcctgtctcttctgaaggtggttgacaacagtgctgtaatatacaaaaatcattttgtttattaataaagtaatatatttgagatatgtacccacaaaaaattcagactgttacagattcattcttagatgcaatgctctcaaatttaatgcttgatatcttcttctccttctctattcattgttacttggtaagttgttatttttattaggaaatgttgttccttgggttcctcctcacaattttgcatatgtaaaccagcaagaactcaccttggctcattgatgagaacacagagaaaatgatgttaatcacatttagaagtgggcagtaatgtcagttactcttctttgttttacagagatgaacgaaatcagtccatcattgtaagtggagagtctggggcaggaaaaacagtctcagctaagtatgccatgagatactttgcaacagtcagtggttctgccagtgaagccaatgttgaggaaaaggtattggcttccaaccccatcatggaggtaagacagtagcagccacggccttccaactgtatcctctccataagaaccacactgaagaatttgattgaaacagcccatgtcagaaagtttgggacctcccaaccactaagagtaggaaaatactgttccagatattagtaagagatctaggaaaagtaaaaattcagtaaagtagacattttaagtaaagtccagctataaaggattccactgtattccatatcctgtgtttttaacctaccactacattgttgcctccaagtagctggcaatggcacttcttttcctcaattaatggagttgtatctattgctgcttgtactggaagtataagctattcctttcccccccaatcctgagcttatttaagctccttctaaaacgtaggattcactatgctcaagcatgaatgagttttattcttcctttacccacatttcattttctgtatgtagtctcatgtgtttagctgtaagtttttatatttttccaggtagaattataaacgtaaatcatgatcttggaaacatttttctgcatgtttctttcaagcatatcacacagttttagattagaaaaagaaatttactaatataaattattgaaaaaaggaagatctgtgaaaagatgtcctttttccccccttttgtttatttaacttaaaattttttttataatgttgtgttggtttcttccattcggcaacacaaatcagccataattatatatgcatcctctccttccctagcctccatcccatccccacctccatcccatccttccaggtcatcacagagctccagactgggtttcctgtgctacacagcaacttctcaccagctatccatcttacacccaattgtgtatatatgttgatgctactttctccatttgtctcactctctctcgcccccaagaccattctctaatggagtccgtctgtatctccattccttcctgccaataagttcatcaataccattttttcagattccctgtatatgtgttaatatatttgtttttctctttctgatttacttcactctgtataacaggctctaggttcacccaactcactagaactgactcaaactcattgaaaagatagcctttcaaaagtagactatatagacaaagtagacatgctcagaccaaagaaaacagaccttttcatgtgaaaatttgagtattttaggatttgtaactggaggattatttgtgtattgatttgattttaggaaagatacattaaatggagaaaataagtctcagtaaatggagagaaatgactttggacatgcagaaacaaaccttttcttttttttttttttttttactgataatcctagtcagcatgctcagcattctttattcctgtttctttccttttgtcaagtcttatttgtcacccaaacacagatggcgtttagaactggcctggtgcaccagtgatacaagtggtttttgcactaatcagtccagaggtaattgtgcctggtgtgcagtgctgtgtgtgacactttattatagtatgctgtgaccccttgcccacagggctaccttctagagcagcaggacttctgttcttgggattgacaaaataagagatgctggggacgttaagagcctcctggactggaggagctatggaaagagaactggaaatgttttctgaaatagcatgtacaagagaaaacagatgcttatgtcaaaagaaagcagtaaagatcttaagaaaatattaagattttgaaagaatttattattatttttttaatttttactatatagaatttaaactatatagatataatggtggatcctactcatgttactattgtgataatatagtctgtatagcccatttcttgttttggtttagataacagcagggatttactttctgttgttctttttactgtttttgattgtaacaacacattcttggtgttcaacagtagtttagtccattcttagtccctaacattagaagataccaaagtcctgattatgatggcattaggaaaccccatctcttctagattcagaccatataataacgtataagtctggaatatgtctagttgaaggaaatattttatgaaaataactacattttttcctacaacacagatttgtgttatgtaggagtgatattaaaaatttgaaatggctacagatactactttttaaatacaattataaggaatttacctcattcgctaggaagaacaaaaaaagataaagacagcagttatacattttaaaaaattaatttattaaaatgtttaatgacagcagttatgcttagctgcttcattctataatattgtttagtttctctgcaggaatttggattaataaaatttattaaagagatcactacttttcaacaactacaaataagggcatcccagtttgaaaggttaaaatggaatatagggctgaaaaatggtgacaaagagtttacagttacaggaagaaaacaggtaaaatattgaatatgtggcctagaaaatttgtagcttttaagcctgccttgggattatgtctttgtatcagagccctttacggtgatgtcaagaaaggcatgtctatgtctccagtgattacagtcatcccacaccttgaacattgtagcccagtgacttatgagatttgcaattatcctttggaaagccagcagctcctcatcctcagcatagactccttttgcaaaatacaaatgatgtacagagaaataaatgattcttttttgctcaattttatgatatttgcttttttgcccttcttatttcctagaaatttttatcctaagatagggaccaggaaagtgatgggggcacactgggtcttaatagttctttttactctttaataaattgtagttgaagatttgcatctccatttagtaaagaagaataatgcactcaacatgtcattgaaatcagtagtgaaatcaagaccacaaaacttctttcctttaacaatttcttgctgattgaaatgaaaacagcattagggaggctgttataaatacagtacttgtaaggctgatgaaacacttagggggaaaggacaaaaggcactatttatatccagaaccttgtttccgtatcgggttaaaggcttagaatcatatagttttatttttgaaagggatgctactgctcatctattctagaagctgaagctgaatggttctatgaagacctgcaagaccttctagaactaacacccaaaaaagatgtccttctcatcataggggactggaatggaaaggtaggaagtcaagagagtactctgttacctgtactccagttacttggagtaacaggcaagtttggccttggagtacaaaatgaagcagggtaaaggctaacagagttttgccaagagaatgcactggtcttagcaaacacccacttccaacaacgcaaaagatgagtctacccatagacattaccggatgttcaatattgaaatcaaattgattatattctttgcagctgaagatgcagaacctctatacagtcagcaaaaacaagacctggagttaactgtggctcaggtcatgaaccccttattgccaaattcagacttaaattgaagaaagtagggaaaaccactaggccattcaggtatgacctaaatcaaatcccttatagttatacagcagaagtgacaaatagattctagggattagatctgatagacagagtacttgaagaactatggacggaggttcgtaacactgtacaggaggtggtgatcaaaaccatccccaagagaaagaaatgcaaaaaggcaaaatggttgtctgagaagtcctcacaaatagctgagaaaagagaagcgaaaggcaaagcagctccttgggttttgaaatcactgcagatggtgtctgcagccatgaaattaaaagacacttgcttcttggaagaaaagctatgacaaacctagacagcatattaaaaagcagatatgttactttgctgacaaatggtctgtatagtcagagctatgatttttccagtagccatgtagagatgtgagagttggatcataaagaaggctaagcatcgaagaattgattttgaaccgtggtcttggagaagactcttgagagtcccttggactgcaaggagaccaaaccagtcaatcttaaaggaaatcaatcctgaatattcattagaaggactgatgctaaagctaaatatccagtactttggccatctgatgcaaagagccgactcattagaaaagaccctgatgcccgggaaagattgaaggcaggagcagaaggggatgacagaggatgagatggttggatggcatcaccaactcaatggacatgagtttgagcaggctctgggggatggtgaagggcagggaagtcttccgtgttgcagtccatggggtcgcaaagagtcttacacaactgagccactgaacaactactgcttgtctagtctagtcaattaacacatgaggacactaatgctcttcagaggattaaatgatgcaagttggtggtagggcctgctgtgatacccagatctttagacttgtatttcatttactcctctaccattctttgctacatgttcatataccttatactcaaagacaaaaggatctgtttcaaccctggcaactcactgctccttctcacagagtgtagtgatcttggcaggtccactccacactctgaggagatccaagggaggtgacgtgtggaggtcaggataggagtcaggagggaggagaagctgtggaccaccctctcccagcttgcgcagttgctggggaaggtgctgaggtcagcgccccagaagcactcagtgactctcactgctctgccgctgctaccacatgtaagctcatctgctctttgacagagtgtgttgtgttgaaagaaaactttgcattgatccattagtttcattttctaaacaaaataaaataataggaatatatggaggctttttgttgtgtattttatagtgtcaagttttgctggaaaagtagtttccagccattctttccatctttaatgttaatcttaaatttagcagtgttctcattgtcagaacagaataggataatacctgtcatatttcagagactaaacgttttctttgattgatcagagattctaatgtgttaacttttgtggctgtgctaccactgttttcatcacttgtgcctttttttcccttatattgctttcttaatgctgcagagcattctcatatctttctgctgtggtttcagtgtactaatcctagtagtcacaggctttgcatagggaaagatgttaattatatgaaattatctaattaagcgtttaatatatgcactgtgtgaacccttgcttttctaactgtagcgtgctttttgctttgccttgaaggtaaaaattatggaagcatgtcacctaaatcagaaggcagtgcatatgccgtttaagtgtttaagattgtattaaaaatttagcagaaagttacattctctacattctgtagcagatgtcttgcaagttagataccactatcaaattcaaagccaaattttactgtctctggtttctgaaaattgctttgaattgagggggtaattactaacactccactaataagcaattcagctgaaacaaagagaccctgaacaccatggcaatatttccaggaaaatattaatttgttttagccagttttttacatgaaacagactacatttcaagaaatcaaaaacctagttatttaaccaggatgacttgtgcctaggcagcccctggtcccatccgttcttttcctttgctgacatgaatgagtgtgttccatgccttcttccgtggtggagacctcccaaccgctggcctcctgtctgctgtttctgaaaatcacttgtgtgaaaataacaaggctgataccgactgttagtatatacctgtgtcattgtgcagtgacaaagcatgcagtctgcaggggcaaaattggttctgtttttaaaagaatcacttttaaagggttgtgttcacctctgttctgtctctccctgaacaaatctgttcatgtccgggcatgaattgcacttctaaaaccgtattttttttccccttgtttttcagtcaattggaaatgctaaaacaaccaggaatgataatagtagccgttttgggaagtatattgagattggttttgataagagatatcgaatcatcggtgccaatatgagaacttaccttttagagaaatccagagtggtgttccaggtaagccaggccagtatacatacagattgctgtatcattccagagctcatttgattcccagattctcttgagcatgttacgtcagtatcactacaaactacacctggacggaaacatgtgaaacaatgcctgtcagagaataccccttagactaatagtcttgggactggacagtgatttaggtttaatggtttttaccgtttcctccagacgcttgtacgaaaagattagttaagaagaggtgctgatagtttagtcttgtctgtcccatttcccagttgatagggaagacattggtctctgcttcagggagttatgaactcagcttgaacccagttcaaaaaaaatgttcttgacctttttccttccttcttttctttcagaatatggtattgtttagatggaatgttgggagttaatagatcctcataactcagttgtgaaccactgtcagagaacacactcaagtctatgtattggtataagactttcattcacacatatgctcttagtccttttgaagtggggagtgggggtggcttccaggatctcagttccccaacctgggattgaacccaggcctcggcagtgaaaatctggaatccttcccatccccagggaactcctgctcttactccttttttatttgtaaatgggaaacactatacattacaacactgacagacatgtttatgctcagggaatgtggacctaccgttggaaaactcctagtataggactcctggtgacccactgcaaactgtgagatggggttcctctagctccttcactggatgcctgcctcatggagattgcaatagccctggcactgccatatagctgagtctatagtttccatcacacaagtctattaaggcttagaacgtgtgtaggaaaaacatactgaaagtcatgagtttgggcagcctagaactattcaggctttgacttgagggatgtgcctgatttgtggctacctaaatgtaatactgtgaactgtggtgttggagaagactcttgagagtcccttggactgcaaggagatccaaccagtccattctaaaggagatcagccctgggtgttctttggaaggaacgatgctgaagctgaaactccagtactttggccacctcatgcgaagagttgactcattggaaaagactctgatgctgggagggattgggggcaggagaagaaggggacaacagaggatgagatggctggatggcatcactgactcgatggacatgagtctgaataaactccgggagttggtgatggacagggaggcctggcgtgctgcaattcatggggtcgcaaggagtcggacacgactgagcaactgaactgaactgaactgaaatgtaatacctgatttgtatagtaaagcaatagttaccctcctccattgttctaatatctagatacacgcagaacagtgttattgtacacacatgtatgcttgaatgggttaaaaaatatttagtagccaaaagaaacaatgggggaaatatatatctaagagaagactgaatctaaatagtacaaatttgattgataggtagacaatgaaagggaaaattggtatggtgaccaaaggctagtagtggggcctaacccttcttgtctagaaactgtgaagcagttctagctgttccccaaccctcatggctatataatattgaggatgtttggttatatcaaagtgagtcagacagagagtacatatgtgatattccttcatgtacaaacatgatcaaatcatttctgtagattctccagcttttctaaatgtctgtgtactgaatcccctaaaatattgcctgaaaagtgaaagtggctcagtcgtgtccaactctttgcgaccccatggactatacagttcatggaattcttcaggctagaatactggaatgggtagcctttcccttctccaggggatcttcccaacccagggatcgaacccaggtctcctatattacaggcagattctttaccagctgagccacagggaagcccaagaatactggagtgggtagcctatccctttccagcggatcttcatgacccaggaatcaaaccaaggtctcctgcattgcaggtggattctttaccaactgaactatgagggaagccctcatattgcctattcgtgcttatagtcattggtatattgtttttttgtttagggtcttctgtccatgtaataagttttctttaccagacaccagcccccattatgcaggaaacctgaccttggccttacttgctgtattcttctgtcaactgagttcagctggtagagaatccacctgcagtgctggagacctgggttcagtccctgggttgggaagatcccctggagaagagaaaggctacccactccagtatactggcctggagaattcaatgtactatataatccatgcgttcacaaagagcggacacaactgagtgacttttactttcaccttctgtcaactgaatacactgcagaattcaggaatatgatgatagaatataagaattatgttttgtatgagcagtattattacattgtattttgaaagtatgtatgtggaagaaggcagtcagaaaatactaagaaatggtcttagaattgtacacaatttattttctatctgaaatatatttttattgatttttaaatatataatctacattgatatggatgatgtagtgcattcatggatttcttacaaacaagtacagtagagggtccagtctaagatatgggaaagatgggactttttccccagagtgttaggaagaccatgaacctaagaggtactgtgggaaaatatgagtattgggccaacagagattttagtttccccaaaagtcactgatctcttatgacagtgccatatagcaagctgtttactagtttaaaaagcattactatcacatatattatgttgaatgtgaccaacagatacactcacacagatgcacatagttaataaatcacttttcaataatcatagatattaaacataaaacttttctgagttttagattaaaattctctaattgaaaactcttcttatttcaaaggcagaagaggagagaaactatcatatcttctatcaactttgtgcctcagcaaacctacctgaatttaaagtgctgcgattaggtatgaatatgacattagatttattgtgctggtattatcttctgtttatttccaagttcataactttacttcttaaaaaggagattatcttgtcctgaaatatttatggatgaaataagaggtctacagttagcctcaagataacccatgggatggataaggggtaagtggctgtataaatggaacaagattagtcttgagttgatacttgtttaagatgagtgtgatgagtacacaagggctcattatactagtttctctacttttgtgtatgtttgaaatttgccttgtttaaaaggaaagaaaatataaaggagtttatgtggtagaaccatatgaagtctctgatgaagaaagcaggaaagtgtttgaagaaattattctagcatgtagattgaaataaaacatttaggaaaggactgttcacttaaactctacaaacattttgctccattatttaatttgagtcttgtattaaaatgtaactaaaaatacagacagtcagactccagactctatacaattaattatgctttcactgcctctaaagcagagtggacataagggtagaagtcaaggccttttcatagactgcaaatcttttaaaattttttccttaattgcaggagatgcaaataactttcattacacgaatcaaggtggcagtcctgtgattgaaggagtagatgatgccaaggagatggcacataccaggcaggcctgcactttgctaggtatgtaatcttatccttgaattcttggaagcaatagctctctgactcaagcaacctttgatttggaatcttagcttagcttcatattaagtggtgaaaatttgggggagatttagcactttttttttcagatttaacattcttcataaaaaacatttagacatcaaatgggcatggagtttctcttggggatgatgggaactatactgaaaatatgttatggtaatgattgtacaactttgtaaatttacccaaaacttttgaattgcatacttaagatggatgagttttatgatatgcacattattcttcaataaagctatttaaaacatacgttcagggcttcaggggaaagatatgggactgtttacttaaatttttacaaaatctgaaacgtagagctgaatgaaatgggtctctattcagaaactcatgttttataggatttttttgtgtatttgttttttttcattttaggtatgtttttgaggcctggaaatgtggttgagctggcttggtaacaagataatgtataacatgtagtttatttgtttctgaaatggctcaggtcactgttttgtttctagatttaaaaaatatattgtatctacatataaataaattgacctttagaaatgtagtatacaacttttagtgctgaattatttatttaaatctttcagcatatgaataactctaaagtcatatattggtattttgaggagtaacctgagatgagttaatttaatttaaaagtattgctaatcagagtactcttgcctggaaaatcccttggacggaggagcctggtaggctgcagtccatggggtcgctaagagttggacacgactgagcgacttcactttcacttttcactttcatgcattggagaaggaaatggcaacccattccagtattcttgcctgcagaatccaagggacaggggagcctggtgggcttctgtctatggggtcgcacagagtaggacacgattgaagtgatttagcagcagcagcagcaatcacagtatgatccaggaccactatggagcttgtaaaaatttagaatctcagactactaaactagaatctgcattttaaccagatccattggtgattcacatatgcatattatagtttgagaaacattgctttacttccagtgctaactctgtttacaaacagaaaattgtgaatttgaaaaagccataacacaggagatggtagaaacattccttgtaaaatgaactctgaattacctgtatgtgattgcatttttggaaataattttaatttttttatgtaaacataatatatatctaatattctggaaaaatcttaccttattgaaaagtgaagcctcatctggtaaaacaccaagggctgacttgcattctcatcctgcctgacctttcaggtcctgctctagttctttgtttaggtactcacttgtcaggctggggcatagcaccagcctgaacatttttaattgtgtggtctctttgaattatgcttggtctgtagttaaaagaagtgattgaataatttgacttaaaacaatcttactgagccacaacttgcatttagagtagagctaaatagtagtgttagtgagatacttaaatcgtgtgatgaatttgtttagcacttaccatgtgtcacacagtgtgttaactttactaaatgtattttctcatttaatgtttacaaactccctttgagatagtctccaatgtccctgtgtctcaaatcagaaactagaagggtgaaggtgtctgcctgtgtgagatggcaggtcaggagcagagcccggcttccagctgaggtctgtctcatggcacagcccatggtctaaactatagtgctaaagtgcatcatgtattaaggtcaacaaaggtgaaagtgttgttaactatggcacattataatgtgtacaacatctggcagtattcaagtgttaaaaattaaactcttaaaaagttaaattatctgctttaattgtttaattgtttaattaatcactgttcatttactctgttgtttcaggaattagtgaatcttatcagatgggaattttccgaatacttgctggcatcctacacttaggcaatgttgtgtttatgtctcgagattcagacagctgcacaatccctgtgagttcagagcaagcttcctgtgatgacagttgatttgtgttttagttttgttgattctttatggaaacaatgtgtttgaagtctctctattaactaacattaataattatcagagagataattactagaaagatacactatctagagtagaattttgaaccgtctataaagaaatgtggattcagatccctggttcacagtgattgcttgtgtgtgtgggagggataggggaggaaagaacttgggtatatgtgtgagctgtataaacagaggcgggaaatattagatgtgaaagttggattggtgagtctacagtgaagatcttgtttggcctatgacacacataccagaattgttaagtttatttgtcctgtggaatatggattaaaagttactgaagaaattgttagcagtgattactcctgggaaaaggaattagatgactggagagatatggtgtcttcactatgatttacatattcttccccatgtagagatgactacacactgagaattaaaatctaattcatttgtttaaactgtaataaaacctaatagtctcagaatgttctcgttgggcattgtgatttgcagtattttctgatcatccctatcgaagatcacacccaatgcacacattcacacatacatgtagataaatattaggtgttttttaactttattaaaatggaggcagttttaatattattaactctttttccatcttgcttcctcaaggattataataggaaacaattctgagatttatgtttcactcttcagacacccaaattgatatttgcaaatctacatgtagattaattcatgtgacataaatttggataaattagactttatttttgaaatacatgtttcagcatctccgcctgggtccaatcccagctttactatttatgtactctatgttttggggtgagttagttagcttctctgaaccttagtttcctcatttttaaaatgaaagagactttgttttttaccaattttggactggttgctctgatcacacttcatactggataaattatattctaaaaatatttgtaattaatatataagaactttaatacatacataagaaatattttaatatatatataaactgagtgaaaataggaacttggaacagagcagaaccctgaagcatggactcacctgagaggcgtttgctgaacccagtgacgctgagctatggttttcatagccaagtgaagtgcggaagacaaaaaacaaagcctcagactcctataaacaggggaacaggaaggcaaacttctgcctaaagctgagaccctaaatgaggaacatactcaccgcctcctccaagagtacaaagaaaaatcaagtctttaagctaggcggggggtacgggggagggcagaaatagttccctaaaaatttagagcaatgagctgcccctcatacttatttcccagtttgttttcatagttcctggatggtccccaacagcaacatacacaaaacttagcttaaattgatcctggattggtagtgccctggatgcctgacagaagcaaatgcaaatccaccttcaatccaggcctcgacagagtcccatgagaagagttacaagaaatactgactcatagtcaaaaatctcaaatctcatgataaaacaaaatagaaagagctaggcaaaacaacagatagcagtcaaacctactaagaatgctgaaagaaattaatagcagatttgacacaactgagtagataaatgataagctgaaagacagacatgaagaaatgatccaaaatgcaagatgggacccacagatggagcccttaacaatagttagaagagatgaagaatggaataatagaatctaattttaatataatgagaatttctaagggaaagaaagaagagaatgaggcagacaaaatgtttgaagaggtaattactaacaaatttcagaacctgtgaaaatgacactacaccacagatttggaaaggagaaaaaatcccagatagaacagataaaaaggaacccacctctaggctcaccataatgctaccataggcagagagaaaaatcttgaaacagaaagaaagataagacatactagtgttgaaaaagtagcaattaaactgattgctcacttcccaacagcaataatagaagtcagaaaacagtggaccatcttcagtgttctagagtaaataattaccaacttagaatcatatatccagtaaagatatatttttagaatgaggaaaagatagatgtgtttttggacaaatagaaacttgtgagaatttgtcaccaataggccctcactaaaggaaatattaaaagacatggttaagacagaaggaaagtgatctggatacaagatctaaaattccagagggaatggtgaatcaaaaaaatgggcaaaatttgattaattaaaagaataataattatgaattgagcttcccaggtggcgctagtggtaaagaacccacctgccagtgtaggagatgagatgtaggagatgcaggttcagtccctgggtcgggaagatcccctggaggagggcatggcaacccactccagtattcttgcctggagaatcccatgggcggaggagcctagcaggctacagtccatagcgttgcacagagtcagacacaaatagtgtattgggccacaaaatactttttacaaaaaactcattacagagggaacggtagtagagaaacctcacagacattcctgtaaccaagcaaccagtcagcatcacatgagttctgatgcagcctcctgaggagggcgccacacgcttccctagtattctcgccagaaaggcatgccgaacctgaccatgaggcaacatcatacagacccacactgaggggcacacgacccttccaaagtaccaagttctcaaaagacaaaacaaaacgaaagagtgaagagctcctcaaattaacagagattaatgaaataagataactaaattcaaggtacgaccctagactggatcctggacatcgaagtgcgatcctggtccctaacaacctgattctcagaggacattaatagggcagtcagtaaaatttactaggtaatagcgacttagcagcagcagcagggttgtatcactgctaattttctgatttcattcattgtactatagttacataagataattttaggaaaatacacagtagagtattcagtaccaaaagggcatcatgcttgcaacatgctctcaaagactctgaaaaataatatgtatgtagacgtatgtgagagagtgagagagaaagagcaaactcggtaaaatgttaatatttagggaatctgggtgaaggaaatactttgtactttttttgcaacttttctgttagtctgaatttagtttaaaataaaaagtttaaaaaactaaagtaaaaaaaaaaaaaactaaagtgcgtcaccagccctttcttcctcccaaaaagataataaagtactggatagcaaagcttatagattgggattgagtgtttggagttcatgttatttaattacattaagataactaatgtatcaattcttctatcataaaaacagaaacagaaagtgaagctttcaaactaataaagaggaaaacgaactaaaaaaataatccaaatatagcaagaaaaggagagaaatttttagaaaaagagggacaagtaaaggcacaaaaagagtactaatagaaatagttacaaacgaacgaatgttttagttaatatggattgtcagaccagttttagaatttaggtatatacttttgaaagaagcattcctgaaaaataaaggtacaggtagtttgaaagtaaaaagttgagaaaagacacaccataatagctagaaaaaaacctggtagagctgcattgatactggacaaaatagactttgaggccaaaagcagtactagagatagagtcactatgtactgatagagacttttattcaccaggaagatgtaatagttctaaacttgcatgtacttaatgatgtagtctcaaaatatataaagcaaaagattaccacaagaataaaaagaaaacctgtcatagtgggatattactgacttctctcaattactgataggtaaagaagtctaaaaattagttaagttatagaaaatttgaaccaaacagttaacaacgttgacctcatagaacaaaatggtagaaccattcaaataaaatgtttagagtgctgatccacttctaaatgatgtcacacaattcatatataaatgaatgaaatcagctccttattcaagggagttgatccatgttgatggtgatggtgctgatttgtgtctgaagtgattacttgggaggagggaacgtgaaagaaaaaagggactgcttcagtgggaagggtcaggggaggaaggtgtcaagagacctagggtttaatgacaattctgacatatactggtggtgtgctttttgccaaactagtcttttggatgttatgtcctaatttgtcaattagagatagcagtgttcaccctgcctgttcctcaggaatgttatcagatgtaattgaaacatgtgagtgaagatgttaaaaaatataatgtactaacatgagttaaattaaataagtatttttaatttatgaatactttgcatgcctactcatgcaaaacctatggaagacattgtaggggatacagggatccctataggtaaggggttcccaacctccaggatctaatgcctgatgatctgaggtggagctgatatgatagtaacagaaataaagtgcacagtaaatataatgaatgctcttgaagcatccccaaaccattcctccactccacaatccatggaaaacttgtcttctacagagtcagtccttggtgccaaaaaggttggggatccctgtcatagatgatgcaggggatccttggattagaaacactagtctaagaagccacacaaataactattaagttgtctgtttataaccttttagtatctccacttcacatctccctgccattggccctcattgctcttagaggaaagaccagccatggaacagcctctggcttcatcccctgcattatctccctcacgtagcttcaatccctcacatctctggtttccctcccaccacattttataccagatgtcccctctacttggaagaccctttcaccaagttaaccccttcttattcttcagatctcaactccgtttctcaaggccactgtctcctgtctccctgaatagggcacattccttacacatggaatcttagtatagtgtcctcctttgtagtaattttaattttagggagcaatcatttagttaatgtccatttcccctagtgactataagttctaggaggacagggtgaaagtaaaagtgtcagttgttcagtcgtatatgactctttgtgactccatggactgtagcccacctcagtccatggaattctccaggcaagaatactggagtgggtagccagtcccttctccaggggatcttcttgacacaggaatcaaacccaggtctcctgcattgcagatgaatccttttactctctgagccaccaaggaagccagtacatgtcttttttttctgctggcatataatatatttgtagacaagctgactcattttctgactgactaaatgaatgtgcctgaagatggatgcaaataagtacaataaagagacaaaggaagaggtcattttttggagtcctagaagagattacaaaatgctgcctagattctggtttgatggatggttgtgattatcactgatcagcttcagatgttcttggtgtttgttgtagcagagaaattgtcaggtttaattgttacctctttgttaatatttttttagtaaattcttacttgattgatctggtcctaggaaataacccattctcttttgttagcccaagcatgaacccctcagcatcttctgtgacctcatgggtgtggactttgaggagatgaatcactggctctgccatcggaagctggccactgccacagagacgtacatcaagcccatctccaagctgcaggccacgaatgcccgtgatgcactggccaagcacatctatgccaagctctttaactggattgtagatcatgtcaatcaggcactccattctgctgtcaaacagcattcttttatcggtgtgctggatatttatgggtgagtgtatttggcttagtggtctgagcatttctttctagacattatctagtaactccaagtaggcatttgattatgtctcctactggtgagctaaagggaaaattagaagataattttttaaagtcttgtttcatttgctagtttgccttctctgggtacctttctttaatgttgaaccccttcctatacatttgtgctttttgatgcctaatttttcatcatctggttcacttttcaaaaaaaactatgatatttctattcccctcctttctgtgtttatgtaaacattgtgaatctgtgaactgacaagagcagtagctttattgtaattctgattgttccctacttggggatgaatatgccctcaaaaactcatactattgaatatattcacatgctgcagccttgaaaaaaaaatctctgccactttgctgatgtctatctgctgggtacatatttcgtgttactaacttagaaagccttatcttcactgatgtggaaagtaagttttgcaatgttagggaatttcctatttctctctaattagcacatttttaatattttttaaaagctattttttcctttttctcctctttccatattatttttgattttacagatttgaaacatttgagataaatagttttgaacagttttgcataaattatgcaaatgaaaaactacagcaacaattcaatatggtaagaattttcttgcttaaataatgttctgccaaaaattattctttgaattcctggtatgtgtttaaatactggctcctgaagtgaagttatgaatttcagttattatctatggtttaaagcagttaaactgctgaggaacttatgattaatgaatgatgcaaccttggaaagatgtttatggtccagattggattcaaggccatctgctgtctgagaatagtaaaaatttggtccaaataaattgagaaaaggaagcagaaaatgttttagatactgacataggggtgtgaaactttgaccccagggatatcattcagttggtcgtccctaaggctaactatatgtggagttaatactatcttagccctgggtgttctttggaaggaatgatgctaaagctgaaactccagtactttggccacctcatgtgaagagttgactcattggaaaagactctgatgctgagagggattgggggcaagaggagaaggggacgacagaggatgagatggttggatggcataactgacctgatggacatgagtttgagtgaactccgggagttggtgatggacagggaggcctggcgtgctgcgattcatggggttgcaaagaatcggacacgactgagcgactgaactgactgactgaactcttacttgctgtattaaaacctttagactatttgatctttgtaaaatattgcataaaatattgtacttggataaaaatttttatccctctttttagcaaattaagctacttagtatagggaaataatgtagaagtgatcttaaatttttaagctgcttccataagaatgtgcctagtatattttgtgtctctgcataaggaatattaataaaaacctgtcagacactaagtggaatattattttttctcaaggttttcctgagtttctcaatactttaatcaacagcggagccttctgctctttcccagtatattttggcacaaggtgactggaagtattaaggaactaacgccagcctcattagggactggctaatttgtttatttctcgaggacctcatgtctctgcatgtgtgtttctgactttcttgtttccctttccctctttctgtctctatccatctgtttcttctctctctctctttgctcacacacacacacacacacacacacacacacatgcagcttagcctctctgcacgagagagaggccctctttctcttctttctctcttccctccctcttattatcagatggcatatattttccttcagatggtatatattttgtctaggtttttgcttcctcacttacctcacacttcctgtgatcaagcagtggttgaggtgcttctatcttcttaacttgcttaaatcccattcatcttgacttcttgcagcatcagctttcactgttaattgtttcccagttcttatatctgagaaaagagaatgtgattaacccagttcatttgttcatcagagatctctggcccttgactagatatgtcttggagcatggggtcttacagtaaagaacttgatgctcaggctgctcccacagcaggggctgtggggtgggcggtgggcaggagaaacatggtgactggcaggtttagagcttggagtcattaccttatcgagtaagcatctcttgtcatattgaacctcatgcccttaattttgcaattaagaatggaaaatttttgaggtcccatggatcttgccaaactagacatagagacttgtatgagaaacaggccctaaagtttggagcagtgtttctattgtcaatgtgaagaccacactgcatatagattaatgaattaaaggaagataggactcatttgtgaggaattattggtaccatcagccagggcatcttgctgacacatggtggttcatttgccttctcattaatcaaaagaacagaagaaatttgctttctaattagcattacataaatattcatatgtatgacaagtttttttttttttaactaaagctttcacacctggttagactatgaatgctgcaaatgagccaagaacagcattataataagtatagaataaagtgggaaagttccagatgtgtgaggagaataaagtatcagaaatcttggtaacccttaggtttcatgggggtttgggttctaggaagtacgtgttgtctggtaatagccacagagggatactcttcccagaaaagttgcaggacatgtgagagaaccagtgtgacaaaggagacaagaaaggaaagcagaaccctgcaggaagaaatgggtacaggtcattagcacctatagaaactagaatttgtgggttggcgccattggctgatcagcttgatgcagcgcttctattgcccttccttcctagaccaacctaactacctttcactgcagacctcgggtcacacagcccttcctcaaagaagccttttcttgctaccatgttccaaattagttggggactcctgagctcatagctggccattatttttctctggaacattattacagtttgtaattctgtttcttgtgattgatttctgtctgtttttctcactagtcttcagtgtctattttgctaatggtgtgtagtgactgggacatggtagacagtcaatacatatttgtgcttaagtgagtgaatggagatgagaagcagtggctgaagcatttagcagaaatagtaatgtgtttgtagtggttgcagctgctggcagaattgaatgtagaagccagaaaagtgagccatagattccctgactgtggaggataatcaaggcagacacaaaagaccaactgttatctaattctgaggcacatgaacttcaacagcatggtcccttaaaagaattactttgtcatgctgtaagcatcacccagaatgtttcagtagtctggagggcatcctctctgcaggttgttcaaggccagctaaggcatttctgtgcccatatggttagcaacactgtgtgataatttaaggggccaaaagtacatagtgtggttttagatatgtacatatcaaaaaatcaaaagctgccacacttatcagatatttaaatattcacatacctagattttcttgtttgccaaaaatcctatgcagctgaggtttttccatgtgtggtttatatttgctttcttatattgttctctgcctgtaaatcatgtttctccaagattgctgctagaagccattgaccgtctccaattttgttttatacatgtttattgactaacatttatgacagtaatgtagtaatgccagttttttttctttttcatttcagcacgttttcaaattagaacaagaagaatatatgaaagaacaaattccatggacactcatagatttttatgataatcagccttgcattaatcttatagaatctaaactgggcattctagatttgctggatgaggaatgcaaggtaagtatgattttctgatgtatttaatatatcaaaattgtgagttgaggtaaaatggtaaataggtttaagcagagattcactagtataccatgaagtgccacagtggcaacaagtggggcttaccctaacttgcattctgaaggatcactagctccaaagggttcaaaatatagttgaaactaggagaatctcccttcccttttcagctgattctaagttatgtgaaaaactggcattagatacagctactaccaattttagtcacttttgttattgatatgcttatatttggtacttttgttcaatggtatgatatagttcaggaaatgtaagaaattgtacaaaaggtattttgaataatagttctaaatatctataattttaaacttgactagatgttctttattacttatatgtatggtaggtaaagagttttagttttaatatttgaagatgcagcatgtggaaaaaatattggatccctggcttcactgatgagtgattctagacaacctatcctttcccttagttgttctttagtttatatgtcataagttacaagttcatgtacactgatcctcctaagcatccagatttcctacaacattaagaatgcaaagacaaatactgtatgttttcacttatatgtaaaatctaaaaaaataaaatggacaaatgaatgtaacaaaacaaaaagagcctcctggatactagagaacaaactagtggttaccattgtggagatggctggtgggaagggcaggataggtgaaggcaggactaagaggaacaaactactaggtatagaataaacaagatacaaggatgtaatgtacagcacagggaatatagtcagagttttatagtaacttcacatggagtataatctataaaaatattgaatcactatgttgtattgaaactaatataatactgtacatcaactatgccttcaataaacaaaaagaatacatgtaaaggtgctcagtttcacttgaaattaaataaaacataaatcaaaacaaaaataagacacagttttttacctatcaggtgagtttaaatttgataataccaaattagcatttattgcatatatactcttgatgaaggacaaaagttagtagaacatatttttgaggaatatttatcaagattttaaatacacataccttttgaaccagaagtagaaatgctgagagtttaccctatacaacctagtagtcataaatacaagaatgctattattaagaagaagaaaaatacaaggatggctaagttgaggatccctcttggcaaatgtcacattgcacatgaaaatatgtggattatttttaaatatcttttgatactgatttctaacataattccacagtgataagagaacagactctgtttaatttcaatacctttagaccttgaaatttttgcaacttgttttatacccctggatatgtcccagtgtctccttgtttacagtctatgggaacttggatagaatttgtatcctactgttgtataaaaattgtataaatcttaattatgttgaattggttcacagtgcttttcagatctagtagatccttctacttctctgtctattcattctattaatttttgaagatttgatattgaaactccaactaaaaatcttaatttatctacttaaaaaatacttgtaatatatagtgaaactatatgtaacctggttttatatttttcaaatctcctgtaaatgtgttatcatacgtccttaatttaaaaaaataaaaatttttaaaaatgcaaggagtttatagaatgatactatttgtatccatgcctttaaagacagataaagcagttggtggaaatggtgagaggagactattctgttttatacctttctgaattatataaataatctactatgtgcaaatgttgtctttatttaacaaattgtttgaaatatatgataatcatggtgtgtcatctttcatttgtgaggctttcattgctataaaagtatattgagtatttatttgatgacccttggtccaggcagactgagttactcaaagcttgggctgagtcacccatgggcaggtctcagttgttgcttttcgttcccaggtggcgctagtggtaaagaatctgcctgccagtgcaagagacccaagatccctgggtcagaaagaccccctggagtaggaaatggcaacccactttagtattctcacctgaaaaattacatggacagaggaaaacacacacacacacacacacacacacacacacacacacaccccacctcccccccgccccccacacaccccaatcattgatttgggacctctgagagagaaatgtgaaaggaatgagttcctgaattggatgttaaagttgttgctgctgctgctgctaagtcgcttcagtcctgttcgactctgtgcgaccccatagacggcagcccaccaggctctgccgtccctgggattccccaggcaagaatgctggagtgggttgccatttccttctccagtgcatgaaagtgaaaagtgaaagtgaagtcactcagtcgtgttaggcaaagccaaaacacggtctcttgggggatgcatcagaagaatcccataacaatattcaccttgttttcttactctttttttctcctgaatgtagatgcctaaaggtacagatgacacttgggcccaaaaactgtacaacacacatttgaacaaatgtgcactatttgagaagccccgcctatcaaacaaagctttcatcatccagcattttgctgacaaagtaagaaagctttattatctcttttctatttgaatacttaagttcaaagaggaacaaaatcaagaatcgatagacagcagttttttctttgctgagctttcattctttagctctttttaggaaaagtaagcttaattgttggcttattggtttaacctaaatggaattatattatgaaatgagtgtttacagtcctgtatctataattctgaaatccaagaaactctgaaatacgcaagtattttcataattcatttagtggctaaacctgatctttgacctgaagtaacatgaggttatttatagtctttacttgtgccagttaggtggctatttatatatttcagtgtagaaatattaatatgtttgattatagattgctgcttcagatctacttaaagattctacttaaagattctggatagtgaccccagaggtttcagaaaagaaattatagatgagtgtggccctctgagattgattgagtgggtccctgctaataaggcttgcaggcctgctgcttcacaggttctagagtctactcagaacatctggagctgcgacactagtttatatttcaaggaggttgtgggggtaggcatctggtaagcgtcccatggtccctgccagcaattgagggttttcagagtctgtcctacgtctagctggagatctttggatggcttcagggccatctgagggctttgttctacagtctggggacccttgagtggtagatagctgaagtcttttagaaacagggagagtccagtctcatgtagtcctacttaccagctcatacagtatttacccagcctccacctctgtctgtgatcatcacttcagctttctgccagatagctgtttgttccttctgaccctccctctcacttcagtctcttcttcccaaaggagactttcccctgcagaaaggtgaagcaggtttggaggagatacagtggttggccttgggggagctctctttggtttacctgagagaagagaacagcttcttatgagtctgcttacgcatgaattgggatcatcttttagatcacagttaatcagcactgccactgttctctagaaaaagcagtatttgagagttttactctagagttaacatgcttcttaccaagaatgatactagtttcttagaataaaactaataacacttcactgagagcccatcatatagcctgggcccaatacttatttttgttgttgatgataaattgtatctattcaaagcttttattagctaaggagattttccaatgtgttttcaggtggaataccagtgtgaaggctttctggaaaagaataaagacactgtttttgaagaacaaattaaagttcttaaatcaagcaaggtaaccttgtataggctttctccaattgggatatattcattaaaatgtttatgactcaagcattagctttttaacatattataataataatttttctaacaaaatcagccctactgttgatttaatttatcaaatagatgtgtcatgtagcattttaaatgccttacaaatgttaattcatctaatcctatgatgaggtgatattatcactgctcccattttacagaggagggaactgaggtacagaaactttgtagctagtcagtttccaagccaaattaaaattcaggctgttgagctgagagtctgcatttttaaccacgatgcagtggtattttatgtgaaattattgcctcacagcaattctaggctcttttgtgcctttgtgagacaccatgagagaaaattgatggtttttggtttttgctatgtcattttgaagggatgtaccagaaacatggccttaagcactccatccaggtaaaaactgacttctagatcactgagggcaatttcagatgtggtccgaagcactttgaaattattcttcttaggcttacataccagaaacactgcattttagtaggaaaacaatattccagattgtaacaaactgtgatgtgtatctgaggttgattatgaggttgatcccaacctccaccctctgactctcatcagaaaagcattgggaggggagcacggctcatgtccatcctacagggagcaaaccaggaagttagttacttggttacttagtttaacaaagtagatattcaagtattcagtgaaagattaaaaatattcatgtgaattcttacagatttctgaccagcactttctgtttttttctaagaaagtcctttaacttcaatggaatgttatatgaacattttgattcttgtttttgaaataaaaacttttactttcaatagaaagatcatataagtaccaaattctagttttaaccctcagaaaataatgagtctatagtcttaactatctgtaggaaaagtcagtttttcacttatccttgtaagccctgaatattagtgctttataactcgtaggaatgatgtgtaaaagaaaatactctcacagtgccaatcattgatgttgtttagtttttgttgttcaaaaacagtcaggtccaactcttcacgaccccatggactgcagcaccctggcctccctggccttcactatgtcttggagtttgctcaaactcatgtctgttcagttgatgatgacatccaaccatctcatcctctgtcaccccctctccttctgccctcaatcttttccagcatcagagtcttttccaacaagtcagctctttgcatcaggtagtcagagtatcggagctttagcttcagtgtcagttcttccaatgagtattcagggttgattttctttaggattgactggtttgatctccttgcagtccaagagactctcaagagtcttctacagctctatttttcaaaagcatcaattctttggtgctcagccttctttatggtccaactatcatatccataaatgactacaggaaaaaccatagctttgactatatggatctttgttggcaaagtgaaaaatcatggaattctaatggtactgctctaaataatttagcttacacagagcattcaccaatccttattccccaggcacccagaatcttttgtgactttattctgaacttttctgattggctagtgaatccttaatttccagaaagtagctctgcattctgaggaatcatttggagtgacttccagtctctatggggcttcccaggtggcactaggggtaaagaaccctccagccagtgcaggagacataagagacatgggttcgatccctgggttgggaagatcccctggagaagggcatcttctcagtattcttgcctagagaactcctggatagagaaacctggtgggctgtagtccacagggttgcaaagagttggacacaattgaagcgacttagcacagcacagccagtctctatagcattgtcgcagttgggatagaggtggtgtgagatgtacatccactgctcccagtcagcaggaaaaacccaacccaagggtatgaactttatattttaatttttctgtatctgataagaagtaagtgtaacctactgttgatttgtactcttggaagtactaactttagaagatcaatatttgtgttatgtgctttatttttgtggtaatacagtgtggggttctgtttgtgtgtttatgtgttttgtcttcttttttttcctgtaattttgcagcttctggccaaaattgtcaacttaaaaaagaattaaggtattaaaaaacttaacagaaggtgtcttaatttatattttcccaccataaaaatatcttctgttgccacatcaagtatcaagaaacacataaatcgggactggactaaatactattaaattgcaactctaccaaataccatgaaaaagaattgtaacctctgctctcagtgttgctaattgataagggaaagcacagttcatctactgagttcatgctgcaaatctctcatctgtaaaacagaatcatgatagtatcttctttcaagtgttgttacgaagattaaataggttgtattaagctttcagagcagtgcttcacgtataaaaagcttagtgaataatggtgctgttactgagatgatttcccacatcttcatgaagcagtcacttggatgcttctgtcttttttaatactatttcatagacacataagttcagccttaaactattcagattcctgtcttaagtatagacagatcaaagaaacaagacagaatgtccaggcatatctacttacttatatatctgactctctgtttctctgcttttctctcttcaaataaagttggaatcctcagtcaatagggtgaggagtgctgagactgtataaactggttggtttgagatccatgaggaaggccagtgtggctggagtgagtaggtgatggtaggtgagtagaatgtgtaggatgggtagagagaggccactttttggaggaaagtatagtaaagagggcaacccactccaatatgcttgcctggagaaccccatggagcctgtggtgtgctacagttcatgggatcgcaaagagttggacacaacttagcaacaacaacaacaatggtaaacagtatggattttattcctgttgctttggaaagtttggacaattttcatgtgggggatgatatgctattgtgtggagatatgggggaggctggaagtggggagtaatattccaggggaaagacagtggattaagatactgaagttatagcagtggaaatagcttatcatttatttgtggggagagttgacaggtcttgttgatggtttgagtatggagagtgagaaaaggggagaaattgaagattatttctgtgttttgggtctcaatgctggatgaataatggtgccacttactgagatgaagacataaaaggtcaggctctgagagaaagaatcgaaagagttctgtcttggactcattgagatggaaaacagacttgcggttgcccaggggaaatgggttgggggaggggtggggtgggaggttggagttagcagatataagctattatatatagagtggattagcaacaaggtcctactgttgcagcacagggaactatattcaatatcctatgataaaccataatgggagagaatatgaaaaaagaacaacgtatatctatgtataactgagtcactttgcttttagtggaaattagcatgacattgtggatcagctatgtttcaattaaaataaaagttctgtcttggacatgttttgcctgagatggcaattaagtagtcaagtggacatatcatataggaagttggaaatgtaagtcagcaggtcagaaggaaagtcagagtaggtcatataaattcatagtctttagagcaagatggcacttaaagcagcagtactggataagattgcttagggagaacaagtaggtaaaaatagtagagaataaggctttcaacttctggagactggcctgaggaagaaccaggagagaagtctgagaaagatggccatgaggaagcaggaacgctgcctaaagaggaaatcatagagtagtttctaatatgacaatgtaaaactcactttttagaaatggaaactcaacgtagagaattttaaattcataatttgtataaagaggacacaaaactcatacatgtgtgtgtgtgtattctgaactctcaacattgagcagttttctggtagatattgtagagatttgttaaattgtagcaccactggtgaatatgatatttcaaaccagctctattaaccattgtacacagacaaaaacaaatttaggtaggtagtgctaatgtagagctagcaaattacttgtgaatgatagaacagtatagatagattccagagtacttggcctattatcaagtaacttaacatcttaactccatgctgagttttcagatcaaatctattaggaactcttatttttcccctttgtaatacaatataatggtaaaacattcccccctcccctactttgtagccaaccaagctatatgaactctgtaaatcaaaggatatatttatttgtgtagcaaacagccattattggtatgtcatgtataacaatttgttatatacatcatgaattatatcctaaattatccttatagttaatatacacattgtagcaaacaaaattaactgattttgttgtgtaatgaaagatttctcttaaaaaaattatttcttctggagattctctgagattattagataaataattggttgttgcagttatagtttgacttataagaaggatttattttatttctatggaatgcatcactattgtaaagatatgtacatatatcaaaatgttcctgttgactagtttgaagtctcttttgttccataaattttttttccaaccactttaacttatactatacatccatttattaactatcagatcttttaatagtctttctttttgctatcctggtagaacacaaaattgattacaggaattatgcagttaagttataaatcctttgaaaacaaatgcaaagctttactctttttcctataatccaaactactttctaaaaattactgttaattcatgattttttaaaatcttatattgtagaactagttcttgacacccttcccaattgtaatgttttttagctggtgctcatcatttgaattggtgtgtagataaatgaagcacgatgatggaatattttatggaactgaggtgataagataggactttcagttagtcttttgctcataaaatagttatcatttaaaaccagtaaaatgtttagagtgggcatttcccatggattaagatttcagatctcagaggagcagttttgatttcattttccccccaaaaggttgtagaattattgcattttccacctatatttctgtagcacttatgtcccttctgctcatatttttggctcctaccacagatattgattatttctggaatgtgactctgaaaggagtaacttaaggaagggaatcactatagattgcaaatcatcctaatgtttctgtaaagatttccatttgagtttgggtttagagtgatttccttttactgtttctgactcagtttaagatgctaccagaattatttcaagacgatgagaaggtcatcagcccaacctcagccacctcctcagggcgcacgcctctcacccgcaccccttcaaagcccaccaaaggcagaccaggccagacggccaaagagcacaagaaaacagtagggcaccaggtgagttcagggagccgccgctgcggggctgcttcccttagggctcagctgagctgcggggctgcttcctttagggctcaactggagccccaggtcttcttttgtcagcctcccaggtggggtcctcaggtgacaagaggctggagtgctcaccctgagaatgtggaactctgtccattcatgcttccatacttctcctctcatatcatagaaccgtgactgcagaagctttgccccaaatcattttttctacattttaattcttctagtgctcatcttccctctcaaaccactgctgcctttgttttggtctctggctgtttcctctctagagctgcaactgcttcagcccaggaaccctgccccctcatttctgatgtcttgtgcactcaggggttgggggtggggggaggcctgggaaacatgacacacaagctttgtgcctgaacaagggctcgggcttgggcaggggactgagtgctagtcagtttgtttgcctgaggagacaagaagcagggcctgacacgggcccacagccctcagtctcatcccgtgtcccgaaagggaaccctggcctggctgtactctcagattcttcccctcatttcctatccttttttgaagtcaactgctactttttccagtattgatcagcaagatttccactgtacatgattaaatgaccttaatatccttaaagcaaggttgtgtttttagtcaaagttttgagtgtacaacagaaaaccacagaaatctatattaaaagtggtggggggatgtatgtggaagagtgaactctaatataataataatgatgatgtgtccaaataggttcatcaactgtaacaaatgtaccactgtggtggggaaagttgataatggggaggccatgcctgtgccagggcagagggtatgtaggaagttactgtgtcttctgtctgactttgctgtaaaccttaaaccactctaagaaaataaagtctatattttaaagggtctgggggagagggaaaattaagaatgtcacagagtaagcatgtgaatggtagagtttaaggaaatttgaaccgaaagccctagcagctccactactgggggctggccaggttcacaggtggccaagtcatctccactagcaccattagaagaaaagtttagttgttttatgtcatctttgactttgacaaaccttgatgcgcctttctgctccttttcatgcagttccgaaactccctccacctacttatggagactctgaatgccactacacctcactatgtgcgctgtatcaagcctaacgacttcaagttcccattcacgtaagtatttctcaactgctgaatttaaaagaatccatatctcataaggattgtcaaaccagcagctgggaaaaaaatacgtgagtaaatcttcatgtcttgtagaaggaatagttaatataatttttttcagtttttgttctcttttaagagtttgagaacagggacttccctggtggtccagtggccaagactccatgctcccacttgttggggcccagattcaattcttggtcagggaactaagatccacaggccgtgcagtgtagacgccccccgcccccaaaaaagtgagaacaaattagcaggtggccttatgacaattttaaacatttgaggtcaaccacacatttctagttctactttctattttgaatttacttccgtttaagacctttttggttaatttgggcttcagttaaaaccagagctgggtgagataagattgctttagcaaaggcttacagtcatccctgctgcttttcaactgttgaaaacatcagaggagtctgctttttaccatgcatcttatcctccatcaatatcatacgtgagaagaagttttttccaaaacagaaatatttctctaattttgaaggtaatgcatgcacattggaaaaacaattttcaggaaatatagaatagtataaaagtaaatgaaaaagcatttcattatacctagagaggtaataagtattaactgacatagatccttcttgatcagtccttccctgctctgtgtgtgtatctgtgaaagagagagagagacattaataagagagaagaaatcgtgctgtaattgctgttttacttcgctttcaacttaataaattgtgagtgttttccatgttcgtaaatacaaatcattatctccattttaatggctacatcatatccctttatagagtcataccatcattcatttcagttattccctgttgatggccatttgggttattccttggctatgataaacatcttttgccaaacatttctgtatattcgcctgcctgaatatctccttagactactgtattcctaggacaggaatttgtgggtcaatgacaggcgccttcccgaacactgtagtaactcccactctgtaccgtgtgcgcgctcctttacctacgcccctgctactcctgcccgcgggagattctgtcttagactgcagggcacttctcaaagactgctgtattcttctcattcccaagaagcctttctggaggaggtgagaagcaggaagaagctttcatgccctgggcaactctcctggacagccccagggcccagtaccttgggtcaaccaaccccatctcccatcaccaacaaaacactgagaagatggcaccacagaaacctcagataggtcattcagggcacaactagggagtaaggggagtgatcatcctgtaagaagcaggccttgctacttcctcttttagtgtcaattgaacattaaggtgctgtttatctagagtgaactgcaggtaagatataaaatagttttcactgacgtggacactgttaatgattagtatgtatacactgagttaaatagcttttagaacaccagtaattaacaacaacaacaacaaaaaccgaatggggcatgtttaatttgttcttcttgttaaagaaatctccagagctggccagtctttattctggggtagctctggatggtgaactaaagaattatgagaccagctagtcaggccaaggcatgtaatgagcattgcacagtacagaggagcttgggctttttaaatatgctcaggtggtatttcttacgagtttttggtgtatgttcttactgctggtgatcttacccactctcaaaatggagttttcaattttgaatcagtactccaacatttgaatttttttttctaatttattcattcggctccttacaaaagaattcagtctctggattgaggacagtagtttgtggctagaaccagacttttttgtgtactaatgatttccacctttactcataggtttgatgagaagagggcagtgcagcagctgagagcatgtggtgtcctggaaaccattcggatcagcgcagcaggtttcccctctcggtgggcctggcagttttcaaatacaagggatcctcatgggggaggttcctgctcctttagataagctgacatgagtctcttttcataggtggacttaccaagaatttttcagccgctatcgggtcctaatgaagcaaaaagatgtgctaagtgacagaaagcaaacatgcaagaatgttttagagaaactgatagtggtaagaaagattttcactcatctgtatctgaacagatgtttgccaaaggccttgtgattataacctgtacaagtcctaggggtgtccaaatagcactaattcaatgaagtcaggaatgggagggtggagaggcacactgtcttggagtttgaggctcccaggctctacgatggaaggactagtgaggacaacagcccagtgtcaagaaacaggatggtgaggcctgaacccagacttccgatgcattctttttagaactggatcattttcaataaaaatttaccaagtacttacttatgaaagacaccaggccaaatgctgtgtgattaagaaaaaataagtcttatcctcaggtaacatagtatgtctttgaaatcaatgcattttaaagacaagtatagtataccttagtgtctatgaaatgctgagtgaatgagacaagaaatcagaggaaggcaaagccacttctgctgtggggaggaggaacaattcatgggagacatgtattttgagtcaggccctgaaaggtgggtaagactgtgtaaaactggaaggagactatcctagtagggagcaaagaacgtggaagcaggaaagcatagttttctcaaaaaaacagtacagtaggatttatgtttttgcagtgaaaaattggtgcctgggaagtaaggaatttgttaggaaattggggttggtgtttgaagggtcttgcctaccaagctaaggcatttgtagaccttagaatgcatcagagtcacctacaggacttgttacactacagattgccaggccccacctccagaatttctgatttggtcgtctgggatgtgcccagtaatttgcatttttatcaagttcccagtgatgctgatggtggtttggggactacacttggacagtcactgatggacgctgtggagaacttaagattcatgaaatggtttttaaagaatattatattttcatttatttgacattaggttggatggattaactcactttgaagtaattagtaataattactagctattaattagatgtagtatctcttctctggcaataggttttttttttccttgaaatagcttaggccactttcctggtcatgtgtaaaagaattgggtccattttgaatttggcccaagtcttttctagggaatgaagagcagaaagtagggacagtcatcccacaccagctttctcccctagacctctcccggctgagctttgggaccacaaggcagaggagggcaggcttggggagcaaggagaggggagctgagatgagattgggctgcgaaaggaaactacttgctagcttttccagctagcttcctttgtaagattcattgatttaaactgaagtagttttagatgtatgtgatttcctattttctcttttcatgtacaagataggaaatatttgcttacagtgaaaagttattttctgttttcactttgaattttagatcacaatattgattgttacaaataaactctactctttcaatgtgagatgcttaataaatcacatgcttttgaatatgttggatcagaatgtaatagaccgaaaatagcatgcctatctatctgtgtttacccctcaactttgcttataatcagaagtcagtgagcattataaatgattatatttttgaaatttgtagacagacttactattgataaaaccaagagataactgttgagaaacttaactcttaacatgaatatgcagcgtttttaatctttttgtttttattttgtatgtgttacttcctgcctttttcttcacactggtgtttttgtcccttcagctttctcatggaacttacagcccgatgtaatccttacagccggggtcagtcagagggagtgtcagcatctccatttccttgagatatttaaaatacaaacaagcaaatagtagctgcctataacccacaaccaagttttgggcttcagataataattccaggtagactaattctggaaaataactcttaaactgcagttttccttaaagtcccttctattcgctcaacttgcctaggatcaaaatgctggctccattagatatttgtgatgtagcccaagttttagctaatagtttcatccctttattgatattgcttttagacatatttttttttctctttaaaattcacttatttggtcatcatttctacttctgagtatacagtttcttccaaatacaggacaaggacaaataccagtttgggaagacaaagatctttttccgggctggtcaagtggcctacctagaaaaattgagggcagacaagctgagggctgcctgcatccggatccagaagacgatccgagggtggctgctgcggaagaagtacctgcgtatgcgcaaggctgccatcactgtgcagagatatgtgcgaggccaccaggcccgatggtaggtgtcctggtggcatgtacacgctggctcaggggcagccaagattggagagtgcatctgacttattgtctaagctaggatatagtttggggtggggtggtcaccctaccactcaaggcagttcagttcagtcactcattcatgtccaactatttgcaaccccatgaaccgcagcacaccaggcctccctgtccatcagcaactcccagagtttacccaaactcatgtccactgagtcggtgatgccatccaaccatctcatcctccgttgtccccttctcctcctgccttcaatctttcccagcatcagggtcttttccaatgagtcagctctttgcatcaggtggccaaagtattggagtttcagcttcaacatcagtccttccaatgaacactcaggactgatctcctttaggatagactggttagatctccttgcagtccaaaggactctcaagaggcttctccaacaccatagttcaaaagcatcaattctttggtgctcagctttctttatagtccaactctcacatccactcaagtcaacaccttatcttttcttagttccaaggaattaacttataagacagttaaatagaatataattttacttacctttaggaatcagattgaacctcaaaaaaaattacatattactgtctactcatgtcctcagtatttattttttatacatttatattgggcttccctggtggctcagctggtaaagaatctgcctgcagtgtgggagacctgggtttgatccctgggttgggaaatctcctggagaagggaagggctacccactccagtattctggcctggagaattctatggactgtatagtccatggggttgcaaagagtcagacactaagtgactttcactttcacttttaatggacttgaagaaatcatctgtaaattaggacaatcatgaatataacctgttaaaaatgattccattgaggtggttttaggagcaataagctgagaactatagaaaagaattaacttacatgtgattacatattaggataattttaatttagagctatcagaagacatgaattaatgataataaaaacttatgcccaagtaagtagattgaggaagaacatcatgcgttcacaatggatagagctcaggaagctggtgataagtaggtatggtattactgtgtaaactggtctgctgtgtaaaggggacatagcctggggtaatgagcacagtcctaaaaggaataaacctttatgacctttagcttctttattgtaaaatcgagtaatatgggacagcccacattttagggttaggtaaggttcatctaagataacagatggacagatattcggggatcataaaataactacaaatataagaaatataaatgtgggtttaacatgtatgttattagaataatcaatggaagtactacttattatggcaagatattggtgctttcatcctctacaaaatgcgttcccgggtttttctgactactgacaactcgccactctttctctaccagctatgctaagttcctgcgcagaaccaaggcagccactatcattcagaagtactggcgcatgtatgtggctcgccggagatacaagatcatgcgaactgccacaattgtccttcagtcttatttgcgaggctacttggccagaaataggtatcacaaggtgaggcattgttttcaacttttttattcatcccattaatgttaatcaagttccacgtctatgtaggacttgtatggaaacaaggaagagcccctggagaagggataggctactcactccaatgttcttgggcttcccttggggctcagctggtaaagaattcacttgcaatgtgggagacctgggtttgatccctggtttgggaagatcccctggagaaggcaaaggctacccactccagtattctggcctggagatttccatgtggttgcaaagagtcagacatgactaagcaactttcactttccctttcaaccaactattgaaatatatttttaaatattaaataataaatacatatttatttatttattaacatgacttagaaaaagaaagcttacctttttattccctttgcatatgtaatttgggggggggttacatttttgtttcctgtggctgctgtaatacattaccaccaacttggtagctagaaacaagagaaatttctcattgaactttctcacagttctagaggcaagaactgtgaaaacaagatgtcagcagagctacactccctccagaagctatggggggaggatccattccttgcctcttctagtgctggaggccaccactattccttatacttttgtgtccatatcactctaagccctgcctccatcttcatttgcatcatcttctctctgtgtctaactttacttccttttgtctgtcttgtgagaacacttgtgatggatttgggtcccacctagataatctaggataatctctccatctcaagatccttaacttaattataccttcaaagaccctttccccaaataaggtaacatttacagattcatggaggaatctaggggtctttattcagctaattatggtgagctttgaatagctaaagtatataacagatgagcagaagattaagagtaaaacgaatttggaagaatttaccatgataaagtgaaatcaaatgtaatatcaatgtagttaaagttgtgttaactggagtatgatcctatagaaatatttgacaagtaagctttatgtctagcactaatcattatgactagagatagtggatcaccagattagtcttacctaatcatcacctctaacaatatatggtctggttgatgaacattttttctctcttttatttcagcaaggttttgagtctgttctttaggttcatccaccttattagaggcttccctggtggctcagacggtaaagcatctgcttgcagtatgggagacccgggttcgattcctgggttgggaagatccctggagaaggaaatagcaatccactccagcactcttgcctggaaaatcccatggacggaggagcctgataagctacagtccatggggtcgcaaagagtcggacacgactgagcaacttcactttcaccatattagaactgactgaaatgtgttccttttcatggctgagtagtattccattgtgtatatgtaccacagcttctttatccactcatctgttgatggacatataggttgcttccatgttctagctattgtaaatagtgctgcaatgaacattggagtacatgtgtctttttcaactttggtttccttagggtatatgcctagtagtgggattgctgggtcatatgatggttttattcctagttttttaaggaatttccataccatcttccatagtggctgtatcagtttacatttccaccagaaatgcaagagagttcccttttctctacaccctctccagcacgctctccagcatttattgtttgtagactttttgatgatgaccattctaacctgtgtgcggtgatatctcattgtagttttgatttgcatttctctaataatgagcaatgttgaatgtcttttcatgtgtttgttagccatctgtgtgtcttctttggagaaatgtctgttgaggtctttttcctactttttgattgggttgtttgtttttctggtattgacttatatgagctgcttgtatatttttgaaattaatcctttgttagttgtcatttcctattttttttccattctgagggttgtcttttcttcttgcttatagtttcctttgctgtgcaaaagcctttacatttaattaggtcctgcttgtttattttgtttttatttctattactctaggaggtgggtcataaaggatcttgctgtgatttgtcacggagtgttctgcctatgttttcctctaagagtcttatagtttctggtcttacatttaagtctttaatcccttttgattttatcttggtgtgtggtattaggaagttttctaatttcattctttcactcatagctgtccagttttcccagtaccacttattgaacatgctgtctttgcctcattgtatattcttgcctcctttattaaaaataaggtacccatagatatgtgagtttatctctgggctttctatcttgttccattggtctacgtttctgtttttgtgccagtaccatactgtcttgatgactgtagctttgtagtttagtctggagactgttctttagaacatattcctaataagccagaaataccctgatgctgggagagattgaaggcgagaggagaagaggatgacagaggatgagatggttggatggcatcatggactcaatggacatgagcttgagtaaactccaggagttggtgatggacagggagtcctggtgtgttgcagtccatggggtcacaaagagttggacacaactgagcgactgaactgaactgaacagtctagatcttggagccctttaggcatcgttaggagagtcagttgagtgatataggacacttctctaatcataggcagtatgtgggcatgccctggaccttattcatgtatgtattttactttcttaatttaaattaattttagacaacaaagaaacatggaaagctaatgaggcttgaatgagcatatttaaatagctgtgctttgaagaaaatttgaagacagtttctccaggtgtttctgctcatgcctgctttatggttaggtgttgtttcttttcaagcatgagctttcaagggaaggtaaaaccttattaaacttgacctattagatacgccaaaccagttactcccctgctttcctcagtactctctttgggaacatctgaactggggtttgaggctattggttagcagcagaagtctctagccagcttagctcccactgtgactggacctagtgagggtaccagcttagagactagtttatgtgtaggccggtggcacccccttagtggtccttctagctgtgattccaatctcagcctctccttctccagctttgggaggtcttaaagtgaaagcaagtgttatttaatgtctctgactcaccaatggaaatgagattgagaatggaagctctaattacataccatttccatttgactgaaattatagaaatgaaccaatgtctgaagttacatgggagaaggaaattaaataggaaaattggcattaatagctttgccactctgtgctgcttgagtttttttttaattctgaaagccttcagtttgccatcgctgagttttacccagtttgtcactagtcatccagataggcaggggcttccctcaggattctgatgttgagtgagagcaaaggatgccctgcttcactgcagcctgatgcatggtgactgcacttagtggggactgaaggctaccttggcattaggaaaacaaaggtgcagtcttgagttagctgaagacactatataggtctctgaaacacctatgtttattttgctgttgtttagttgctaagtcatatctgactcttttggggaccccatagactgtagcctgcaaggctcctctgtccaggggaatttttaggcaataatattggaatgggttgccatttcctacgccagaggatctttctgacacggatctaacccatatctcctgcttagcaggctgattctttaccacggagccaccagggaaacccacgtttattttttatttgatgactttaaacacaaccacttatttcttttgtatcatctgggatggcatatgatttcattatttttctcagctacataacctaaaaataggaactgtttattcaatgatcttaacaaattgctactatctgaatagaggtttcagagattttttacacatttttaaaaagtttcataaaagatatattgtatccctttatcataatcactagtgagtacttaagtgaatatattgtaacattcatgtcacacaagttcagttcagttcagtcactcagtcatgtccaactctttaggaccccatgaaccacagcactccaagcctccgtgtccatcaccaactgccagagtctacccaaacccatgtccattgagtcggtgataccatccaaccatctcatcctctgtcgttcccttctcctcctgccctcaatccttccagcatcagggtcttttcaaatgagtcagctctttgcataggtggccaaagtattggagtttcagcttcaacatcagtccttccaaagaacacccaggactgatctcctttaagatgaactggttagatctccttgcagtccagaggactctcgagagtcttctccaacaccacagttcaaaagcatcaattatttggcactcagctttctttatagtccaactctcacatccacacatgactactggaaaaaccatagccttggctagacggaccttggttgacaaactaatgtctgctttttaatatgctgtctaggttgttcataactttccttcaaaggaataagcgtcttttcatttcatggctgtagtcaccatctgcagtgattttggagccccccaaaataaagtcagccactgtttccactgtttcctcatctatttgccattttataaaatcatagtcttgaaaggacttcaaagtcttgctagttcaacccttcctaaaatttaagaatattcccatcattcctggaaattatttgcacaatctctgcttgatggtcattgtgacaagagatttatctcataaggatgaatgagtgtttatcagtttaggggaatatctttttttaagaaaacacaaaataaaattaagatctgtttactttatcttccttttagctttccttttaaagttctatccctactacctttgaaccccatgagcggatctgtgccacatttgtaaaacaatgggaaatcctcactagagtggtattcctcaaaaatggcaaatgagagaatcattttttttttgtttgtttctggggggaatcaataaattaataataaacttttcagtaccctaagtgttggcttctatagcctgcttaccaaccataccctgtgtcctcaagccagagacctaatgcacagtgatatggaaccagcagtaagggtagtgggtaaatctattttactagcacatgattcacagggtatcaagttctgtttgttttctgaaggataactggttgcttttgaaatcatgtagtcataagaaacctaatgcgtttttctttctttttagattagttttctatttagtaatctggtgcctttaattttgatggctcttatgtgtatactctgtttatcatcatacatagacatgtaatcccacataggacatgtggatataatacatgttttatatatgtttctcaaattgccttttaaagattacatttcaatcatctttcaaaataatttgtgcctccatatatttgtgataagtacactccacataataccttgttgcctcagcttttccagcatctttccctttagttaatgtgtggttctcagactgcatccataggttgatagagttgaacattgagtgtagtccaggatctgacattactggcacctacccttctctccagatactccgtgagcacaaagcaatcatcattcagaagtgggtccgtggctggctggctcgcacctactatagcaggagcatccacgccatcatctaccttcagtgctgcttccgccggatgatggccaagcgcgagctgaagaaacttaagattgaggcccgctccgtggagcgctataagaagctccacatcggcatggagaacaagatcatgcagctgcagcgcaaagttgatgagcaggtgtgttttgaacagcagccctaaaaatgcagcatgcctaatgaaatacactgggattatcttcagcattgtctcctcttgactttacctttcagtctcagcaaaaaaaagtaaaacagtagtgacattaatgagcatggaaatagtgacaagctcataggtaagattataattgcgaggaccaaggcaggaaattgtttttgagaacacggacaggtttactaacagtcccaaaggttaggactgaaagtcatattttacacacctctttcatcattatcattcagttatgtgtagtgtattgttccttttatagatgagttgtttagcactgagatggcaaaagaagcaggaagatgtccatgcttctgaggaatctgcagtctatttgcagagataacagtttgatttctaacagatagttattaccaagtaatattttagcacctgcaaattatataggtagttagtgacatataaatactaacgatgacaaagaaaaacagaaaacagaatgaaataaaattcatcagaaaggttttctgaatgggaggagtttccagatgttaaacaaagagatttgtaagacgtgattttgaggccgttttaccattcctatacatcagtagccagcccatggctttcagtagcacactgatttgtttctaaaaacaaatctagattttcctattcctggattgagaatcaggaaagataatttagtatggtaactctccttgtgactatgagagaatcacatctatgttgctcatctcatgtaaaacataagtaattgtgtctgttctcttttggtatcactaagagggtactggtagtgttactttaaatgttgtcactagtattctggttagaggctgtatcagtgctgcagtgacatagcatgaatatgatgaataggcatggttttctcactaagtacaattcatggtgtgtatatttacttactgtcactcatgtgtgtgtttaaagaacaaagactacaaatgcctcatggagaaactgaccaatctagaaggaacatacaactcggagaccgagaaactacgaagtgatttagaacgtcttcagctaagtgaagaagaagctaagattgctactggacgggtcctcagtctgcaggaagaaattgccaagctacggaaagacctggaacaaactcagtctgagaaaaaatccattgaggaacatgctgatagatacaaacaagaaacggagcaggtaagagctaatgttcatatcctcatctacttctttcacaaagatgtgctgtcatattgacttggttagccattgtagctcgaggtagttctcggttgaaggtaaaacacacatttcagtcggttgactgttcactattagtgtttttccccaaggagttcttctgtatgctggatgagtagctataggtcttttagtagaacgttttactctactaagaagagaaggaaagcagtattataagaagaaaattgatggccaattacctattatacactctttttgttgaatgtatagatctgtgtggagtcagccagcttaaggtgattaagaagtaaattaaacaataaactgtcaatagctaggaatttttatggaaacctacattaaggctgttttgagaagtccaccagaaatccaaatgtctgcacactggccatagtcaagaactgctatgcaaaaaataacaacaaaactacttacagattgatgaatgtttccacactacaaatttttattaacttatatcaaaattttattaagtatagaaaacacgaaggctctcaagaagtaatgaggagtattgtttaaacataaaaaaaatacctcaacataaggcttacttggaaaaagtaatagatttttagagatcctactagtattaccatctttaaatgaaaacagagttgactctgttggctgtaactgcttctgaaccttaacagcagctcatgcaataataacctctgaaggagcttagacagttcaggtaagatagtgtcactaataagatggcaatccttccatgatattcaggatcctgattaaaataaacctgtctatatcttcaggttgactctgtgtctggaaacagtttccctggtagcctagtccataaagaatctgcctgcagtgcaggagacctgggttcaatccctgggtcgggaacattccctggagaaggattcagtattcttcagtattcttgcctggaaaatcatatggagagaggaacttagcaggctactgcccctgaggttgcaagagttagacatgacttagcaactaaaccaccatcaatatatgttactttgacatggcaagcttgttctattgaatatatatccaatgagatactcttgaggtttaggatctgtctctctcattttctctctttctcaatctcttttttccccatttcttgagtccctgaaagcttccaaaattccttagaaactacagagtattaacttggttaggggtattctcttttccttttcacagtcaaattcatacctttctagttagatagaatagtatacgcaaacatattcagatttctcctttcttcttgttttattatctgcggttttcacagggatatctataggcactaccattaagtcttttagatggagtgtggtaatgaagaatggaaacatttccctgggagagctagccttgtggtcaggaaagctgcattgccagtccacctgatcaaggagcctagaaggtccagagagctgtgcttcttaaccaggaatgtgtatcagaattggctggagagtttttaaaaagatacctgcccaagctctgggagtgtgagtcggacacatttattttgaaaaagcacaacaggtgattggttgcatagccctgacaaagagcggcttctctcaagagcacccaaagaacccagcctttgtactgagagcacaccttctcaggacagaaggaagagagtggacaatcagaaagagcacctcctggcctgatgtctgccgtggctcagtgctgtaacttcagttctctgttcttcagggatcctttgtcacaacccgttgtctccatcgctgaactcttcatacgttctcattattactaaagctgtacctttaagagttctataaacttacacttacagaaaggaattcacatttcacttattcaggtttcacttcagcacacattctattacaaagctaaactatataaattatcaactttgcaaagttacctttggttttgatttttgcctcctgagaatccttatctaaccaggaaccagaaagttaaaaggtcaacatttttttttttttgtggtaaaatatgcttatatgtaactttaaatttactattttaattgttttgagtgtaaagttctatgacattagttatagtcacatagttgtaaggccaatgcttaaatgtggaataagtttacgaccttgcaaaactcttaaaaggagatgaaagtagaattcaagacagagagcagggagctttggaaggtcttccagtgaatttcatacttttcttgtcctctgtaatctctctgttgaatcttgggtacacataagcattgtgttagactgttggggtgaaagggcattatcattactttaagagcaaatgtttactaggtgtcaggcaattggtaaatgctcaaggtacaaagtaaaacaacaacagcaaatcatctttgtcctccaataatttctagtcaatcagggaagtaaaagtaaatcatttataagggctataaagagtcatttacagagttctgtagcagtccaatggggagacatataattggaagaagtttctgggaaagctttctggggggtaatgcctgaaccaagtgctttctgggaggtaatgcttgaaccaagtttaaaggatgactgaatataactcagcaaagaagtgagacaatgagacatggaagtaaggagtgactactgtgtggtctttgtatttagtatcgggtttcctctgtctgttgcagccatatcagtttattgtttcattttatagctggtatcaaatctgaaggaagaaaatactttgctgaagcaggaaaaagaggccctcaatcaccgtatcgtggagcaggctaaggagatgacaggtaaggctcatgtgggcccagcctgctgcactccaaacaacctgagaccaagggtttataagttacaactttgcttgtttaggctggcatcaataaggtttcagagttccagaggcaggcactctaaataattgattgaattagttggtgaatttgtaaatcgtatctccctatgtacaaatatgaattcatgcttagtcaacattgtatataacttaaaaaataattgtatgtatgatttatagcttataggagtcctcttgatttaagacaaattcttgagctaaaatgtatatttataggaatatatgtatctgtgtatattattgattttgctaaatgagtgaatactaatttcctaagatcacccactctttgccatcttaaaaaaaaaaaaagacactgactagaggtagacatttatttgctattggtaagataaattaaaatggtgataatttacaagaaatccatacataaacatgagataagaagatgtatatctaaactacagcaattggtggtagaaataaaaaggaagatgtaggttagagtgaaaatacatgaaaagaattaacagattattctcatttttgatatggtattcaaaagaggagcaaaaattttctaaagtgttgcaatgaattattaaaacaataatgtgttattagtaatgaggaaattgaggaaaacaagtctctgtttatgaggcaaatcagttaaaatttggatgttagctagggtctccagatagagatgatctgaaagcaaattgagattaaagtgagaaccctcaggggttttccccacaccatacccttcttcccaattgaagggaatactgtatagaaaagagaagaaaatctggaatttataggataatcataaaaaaaggagaaggtgaagaaaaagagtcgtaaaagaaagttaagacggaaggagaaaacagtcattgaagacacggaaagaaggttgctaggatgcagaatatagtaggaaaatccagaatgatgagaattcttctaggaaaataggaaatgttatttgatctaaagagaacaaaacaaatagcagtggatttgcctagggaaaatttgttggtagccttgagcagctttccacaaacttgtgagaataaaaggcaatttatagaatgttatcggagaaggcaatggcaacccactccagtactcttgcctggaaaatcccatggatggaggagcctggtaggctgcagtccatgaggttgccaagagtcggacatgactgagcgacttcactttcacttttatagaatgctgtatagagaaaaaattctttcattcatttatttgcaaattattaaagctctaggacaggggaacactgtggaggcagtcatgacaggacactgggaagtcctcaccctcgtggagccgacagataaagagatggtgagcaccagaagcaggcaggacagattaagatacagccacaaaatatgaggtaggaagcccaatatttataaacgtggctggttcagctcattgagagaaagcacatggctgagatttaaggcttttttactgatactttgatctgcaatcaagggctagtctccagtctccaaatgatatcctctctacatgccagcccctagtgatagagagggtagagtgaggtgagtaaatgggaaagtccagtccccggcagcacgtaggagtggtgacaacagagaaccaggcgtggcaagttacctgcatggaatggaaggagtaacaggacaagggcctccgcagtactggggaatggtaagaccaaagccagggactgagatgagtagggagactctggagagcaggacagctaggtcctctgagaagtcactgttcccctagaggcctgaggaatgtctctaacgttttcaacaaaagaattttatgagtagcctgaaacagaatactattggaataaaaaagtatattctagttactaaacgctgattagaggacgttatcaagaatgtgctataaccaatgaacaaactagttctgttcacggaagaacatgatagatggttgttgttattaataaattattttattctttggtcatgatattttctctttccctgcctccactaagatactcttcataggtcatagtgctgctaaaagtagaacccctcccaaagactgtaaggcagtgcccatgtttttcttctcacattttgtgaagctgtctttggtatgtttttctctctctcttctttcagagactatggagaagaagttagtagaagaaacaaaacaactggaactcgatcttaatgatgaaaggctgagatatcagaaccttctgaatgagtttagtcgcttggaagaacgctatgatgacctcaaggaagagatgactttgatggtggtgagtcaaatacttttgcccattttttataaaaaatttccctggtggctcagagtctaaagcgtctgcctgcaatgcagaagacctgggttccatccctgggttgggaagatcccctggagaagggaaatggcaacccactccagtattcttgcctggagaatcccatggacagaggagcctggcagactgcagtccacggggtcgcaaagagtcggacacgactgagcgacttcacgtcacttcacttcacttcacatgtgtgcaaaactagacagatagtagcataaacccccatgtactccatgtactcatcactcagttccaaaatagtcatcacgtttctatctcccattctaacctatatcacactccatccaatggattggattgtcttaaagaaaatcccaggaatcacatcactgtattcataaacagttttataaactcaaacactttgaagactagactataagtcactattgctggactttgtttatgtactgaatgacaatgtaaaatttgcttataaaacaaatatttataaggtcaagtattttctcagtagtttttgtaatttcaaaggcatattcctaaacaaagaaaattcatctgctatttgtaataaattgtcttacctatttcatggactcttctgcatctggacgagtactttttgtacttttgatagtgctacacaccatccccggtctacttatctgatatcaggaaacagagttccctgacactcttgttcctgcaactatcagccttaaatgtaacctaatagctgagacattattttgccaacaaaggtccgtctagtcaaggctatggtttttccagtggtcatgtatggatgtgagagttggactgtgaagaaagctgagtgctgaagaattgatgcattagaactgtggtgttggataagactcttgagagtcccttggactgaaaggaggtccaaccagtccattctgcaggagatcagtcctgggtgttctttggaaggactgatgctaaaactgaaactccaatactttggccacctgatgtgatgagctgactcattggaaaaggctctgatgctaggagggattggggtcaggaggagaaggggatgacagaggatgagatggctggatggcatcactgactcaatggacatgagtctgagtgaactccttgagttggtgatggacagggaggcctggcgtgctgcaattcatggggtctcaaagagtcaaacacgactgagcaactgaactgaactgaatggcacaaatagccagaaatgccctgaaatatttgctataaacacaagataatttggatgggtgtggtcaagatggcagaagaggaagaccctgtgctcaactcttcccacaggcataccaaaattataactattttcagaacaattgtgtataagaatgacctgaagactagcagtgttaaagtgctgttaaactgctgctctctatattccagcaaatttggaaaactcagcagtggccataggactggaaaaggtcagttttctgtccaatcccaaagacaggcaaatgccaaagactgttcaaactaccagataattgcattcatctcacatgctagcaaagtaatgcttaaaattctccaatctagacttcaacagcacctgaactgagaatttccagatgttcaagctggatttagaaaagacaggggaaccagagatcaagttgccaacatctgttggatcatagaaaagcaagagaattccagagaagcatttacttctgcttcattgactacactaaaaactttgtgtggatcacaaccaactgtggaaaactgttcaagagataggaataccagaccatctgacctgcctcctgagaaatctatatgccagtcaagaagcaacagttagaactggacatggaacaacagactggtattaaattaggaaaggagtatgtcacagctgtatattgtcaccccacttatttaatttctatgtagagtacatcatgcaaaatcctaggctgggtgaagcacaagctagaatcaagattgccaggagaaatatcataacctcagacacgcagatgacaccacctttatgtcagaaagcaaagaactaaagagcctcttgatgaaagtgaaagaggacagtgaaaaagctggtttaaaactcaaattcaaaaaactgagatcatgacacctggtcccatcatttcatggcaaatagatggggaaacaatggaaacagtgacagactttactttcttgggccccaaaatcactgcagatggtgactgcaaccatgaaattaaaaaattcttgttccttggaagaaaagttatgacaaacctagacagcatattaaaaagcagaaacattactttgtatacaaatgtctgtctagtcaaagctatggtttttccagtagtcatgtatggatgttagagtttcataaagtaaactgagcaccaaagaattgatgcttttgaactgtggtgttggagaagactcttgagagtcccttggactgcaaggcgatcaaaccagtcaatcctaaaggaaatcagtcctgaatatttattggaaggactgatgctgaagctccaatactttggctacctgaagtgaagaactgactcattagaaaagaccctgatgctgggaaagattgaaggtaggaggagaaggagatgacaaagaatgagatggttggttggtatcgccaattcaatggacatgagtttgagcaagctctgagagttggtgatagatgggaaagcctggtgtgctgcagtccatggggttgcaaagacttggacactactgaatgagtgaactgaagactagcagaaattatttcatgcaactaaagatataaaaaaggaacctcaacaaaataggtagaagattaaaggatacacagaacaaaaagatgtaaaatatgatgacaaaaacactaatagtggaagaggaactaaaaatgcatggttgttataaagttttgaacttgagatcatatttaaataattatatatgtgtgtgtatgtatatgcaaatgattgaacctcctttattattgcttatatgatccttgtcgtaaccacaaacatattatagatatacacacatataaaaagagagtaatctaaatataatagtaaagatagtcatcaaatcacaagggaagaaaggaaccaaaaggagctataccaaccagaaaacaactaacaaaatggcaatacgtacatacctatcaataattactttcagtgtattagactaactgctgtaatcaaaagacatagagtggcagaatggataatggaaacaagacataaagacacacacacacacacacacacacacacctgtgagagagtcacttcagttataaagacacacacagactaaaagggagagaatggaaaaaagatattccatggaaatgaaaagacagctgggatggcaagagtcagacgaaatagactaagacagactgtaacaagagacaaaaaaggacattacataataacaaaaggatcagtccaacaagaggatataatagtggtaaatatatgttcacccatcataggtgcatctgaatacatacagaaaatattaacaaatgtaaagggagagattgacagtaacgcaataatactaagggactttaacaccccacttacatcaaaggacagatcatccggaagattgagatcatatcaatcatctttttccaccagagtgctatgagaatagaaatcaactacaagaaaaaaacctgaaaaaacaaatacatggagctcagtatacactattaaacaaccaatgggtcactgaagaaaccaaagaggaaatttttaaaatacctggagataaacgaaagtggaaacacaatgattaacatctgtggaatgcgacaaaaacagttcaagacgggaattttaatggcaaataaataagcagtctagccttatacctaaaggaagtattgtcgaaaaagaagaccaaacaaaattcaacattggtaggagaaaaaaaaaagattagagtggaaaggaaatagaaactaagaaccagttaaaaagatgcacaaaactaaagagctggtcctgtgagaagagaaacaaaattgacaaactattagccataatcatcaagacaaaaagagagcccagataataaaatcagaagtgaaagagtagttataccacagaaatataagaggctactagacaattcagttcagttcagtttagtcgctcagtcgtgtctgactctttgcgaccccatgaatcgcagcacgccaggcctccctgtccatcaccaactcccggagttcattcaaactcatgtccatcaagtcggtgatgccatccagccatctcatcctctgtcatcccctgctcctgcccccaatccctcccagcatcagggtcttttccaatgagtcaactcttcgcatgaggtggccaaagtactggagtttcagctttagcatcagtccttccaatgaacacccaggactgatctcctgtaggatgggctggttggacctccttgcagtccaagggactctcaagagtcttctctatgtgccaaaaaaatgagcaatctagaagaaatagataaattcctagaaacatacaatctcccaatgctgaatcaggaagaaacagaaaatatgaacaggtcaaatatcagtaatgaaattgaatcagcagtccaaacacttccaacaaaagtccaaggccagatggcttcacaggtgaattctgtcaaacatttaaagaaaagttaacacctttgcttctcaatctattccagaaaacttccaaactcattctatgaggcatcacactgataccagaatcagacaaaaaatcatacacacacacacacacacacacagaaaattgcaggcctatgcttctcgatctattccggaaagcttccaaactccttgtgtgcagcatcacactaataccaaaatcagacagagaaatcacacacacacacacacaaagaaaattgcaggccaaaattactaataaacatagaacatacaaagtggtctggcttgagacacccaactactcctgagggcttgtttccctgtggtcgcacagatgggtctgctttgtgtaagcctggatgttggaaggaacaaggcaaaaagctctttgtggcttctggctcttttcctgcaccttggaaggagtaaaggaaattggacagatcacaaagctttcagaggcctttctgaagctctcaggatttgtaaccctaaaagatccaggccactgaacctccacctcttctgcagggggcaccctcagagcaaggggcccaaagcccacctttttatttcctcttccttcaagtcattctttaaccacttctccagaaaggaagggactgcaaatacctaatttttctattccccaaaggcttgctgaatactagttcattagttaccacatgtcatgaaactatcacttggactccctgaattaataacccagggatcttcccagagcagcttcctgttctgctcactcatccttgccactgctgactccagagcttcagttgcatgcataaaactgacagaagttgtagttgcctttgtgaaaacccccctcctgtgacctattaatatggtgcagtaaaatgattatgctgtcactgaatatatcctgtggactttggggagattttgtttgattataatatgaaagtcatcatacttatgcctcccctagtgcgactagccactcacaactttaagaggcgatctgccgataatcagagatgatttttatttgagtgtttagttttgcgactgtactcttcacaccctcctggttcatctttctgtgtctttgaggagctcaggaggtgaccccttgtaagagtttgttaagacaacatggaatagattgtttgggtatgagagcattaggtcatgaagattagaaccaagttaaggtggatgcttaactatgccaagttcaattatttaattatgttgtgttaactgtagctgcttatttgtgttgcagaatgtgcctaagcctggacacaagagaacagactctacccacagcagcaatgagtctgaatacacctttagctctgaaattgcagaaactgaagatattccatcaaggacagaggtatattttagacacctatcaataaaagtaagatatgcccatcctgttattaacagagaacatttccattgcagggaggatcccatttgttcataaatgtaacatttgttttatattctttataataacttgaaggtgcttaattagctatgtatatacatacctattacatattcttgtcaatcgatatttaaatttttaatgtgattttgaggaccagattttcccttttgtaattcccttttataccttaacatgctctgtgtgtaaaaagtatagcctatcatgaatttattttagactgaggtcattttttaaaaagtaagcttttatcctagaatattataatataaataccaatgccctagagtttagcaaaattgctgcctgtttggtggcagtttgtaccaatgtaattctcttctacaaaaatgcatggaaaacagcttatgaatctgtcttagtgttttgtattacatggtttgaaatcaaaatgacatattactgtaactccaagagtacagtgactttaagttagattgttcccaaaccaattctcatatcttcttcaaatatgatattagtttctgtaatgggtaattcaggcacattattttctatttttgtctcatgagaaaatgagaaaatggccaagtcagaaatagactgcttctggcagaacagctgaaaaaaattgaatgattctttcctttcttagttctacttgggaatgaaaagtttctccatctcattctgctcattttaaagaaattgtcacatggttggaatgtgatatagttggactcatacatacaagggggccaagtaactggtccaaggtcacagcttgtaagtggcagagccagtattctaactgaggcttgtctgttcagagctgcacacttcacctcctcccactcaggggttctacactgcagttctccagtcccctttctacctacacacaaacagataacattagtctggggacattgatacagcagtacggccagtatgtaatagcagaggttgttcaagttatctgttgtgcaacaaagcatccctgactttagtggtttcaaactacagcagtttattattgctcacagttctttgggttttgactgggtggtacttctgtcccttatggtgtgggttgaagtatctccctgcattcagctggagtgagaaggtctcctccttgggtctctccatgttgcttctctcttcaataatgcagtgagtgggttctaggaatgcaagggcaaaagatgtcaggctgttagggccagacccagaactggcatggcagctggttctgccacattttatggtcaaagcaaagtatgaggccagcccagattcaaggggagaaatggactccatctcttaatgggaagaaagttatttttgttgggtgatcgttggtagccatctttggagattaccccagagttagactttgaagattttaaaattacagcttctgagcctttagtggatataaagatgttttctccaaattcttacagatttgaggggagaggtaacctttttcatttctcattctcacttgttttatgtcaagtgactaaactgaactgaattgaacagtgggatttggtacagttttcatcttttttgaaaaatgaagtatgagttgtgcttcagaaaccaccagcagatcttggggtactgatactgtctgtcacgtgcattgaccaccagcagtgggtcatacacaggaagtctcctctcagtaacgaggcagggtattgactgaactagtcatgcttgttgcttgtgactgagtgcgtgcaactgagatgtggctggctttggttagtgctgtcttcatcatgcagcagactgcaataactctcctccttaggactgagtccataaccttagcttcagtctctctgcatttcagtttcctcgtctataaagtggcactgctattattatcttactttatagtgatgttttgaagattaagtgagttaatttttacacacttgcaacagtgttagatacataataagtgttcaataaataaaggtttttgccctaataaacaggcttcacacccagtataataaacagactgggtgtggccaggatcagaaagatgggaatctgtacaactgataatagaaaaagagggactgatcaccaagggaagctgggcaggagacatggcagtctaaggctgtggctgccactttgctcttcaagtcacttacgaccttcaggtttgcgtttcttcctgctgcttcctctataatggccaggtttacaaatcacctctgaacaaactaaaggaaacctttcaactcctatatgtagtgttcccaagtaactgctttagaatccaggggcccagggcaataatgggatcactcttgcttataaattgattttttaaattaaaatagattgttttgaaacacagaattctgacctcagtcatgtattaatagcaaaatttaatgtaaaaataaaggattaatgtctctttagtcacaaatcacagacgtgtgatttgctgttcacaagtcacagtggcaccttctctgctgtttctctctggagaactcaccagctagctccgcttgccttgtagcccgcccacacttctggtatctttgtggtctggggttgcaaagaccatgtaacagttttgggaaccattgctttccctgctgtgtcatgcacctttcttagtaatctttgactaattatctcagttctgcttctgctctcaagcttcctcacacttgtcaaatccagggaaagcgtcactgtaactttctcagctactgttagcagtaattccaggatgactgccaggcctatcatgctaattttgtgaagaaattctgttattttcctgattttcctctaatgagagattgttgttattttttagattagtttttaaagcttcactttcttggaaaagccctagatgacaaagtccttacaaaggaaagaaagcaaaaacaaaaccctagacaccttcctgagctagatggtccagtcatcctccttgctcatgtggtatgaggaggacaatatctcttcgattatacacgtcattagagataagaatgggcaccatttggagcactcttagttcctaatcattatgtctcaaacagttttgcacttgtctagtgttcctatccataaaattttgttcttatctataccaattagttaattttttgtgtaatattagctggtatctaaagaattatcccaccctattttaataaaaggagtccttttcaacaaaaatgaccattcaaggctggagaggaattattcccaaatgatgacattttaagtacagtgaatgaaatattatattcactcataggatgaaggcttcagttatagtatgaaaaaaggattaagtaattaaaattttcagggatgtatacatcattaatgggcttccccagtgattcagtaaagaatcctcctgcagtgcacaagagacacgagccacaagagacacgagccacaagagacacaggttcaatccctgggttggaaagatcccctggaagggagggaatggcaagccactccatcattcttgcctggagaatccccatggacagaagagtcaggtgggctacagaccatagtgtctcaaagagtgggacacgactgaagcaactttgcacatatatatatatcattaataatatgaacaaacattaaaatacataagatggaatgtttatattataaataagctaaaatatcagtatttgtgaggtgtatagaaataagtatttatatgaatgaaattctgtagtgattttatgttcagggaatatgttatctctattctactaagtcaggacagactatatacccaaactttttcttactctgagtatgataaaatggacagtaagaaaaagtccaggtctaactagcttgtagataaatgacgctgatagcctataagtgccccacttcttggtttagttgattcttcttaggtgtttgttttttttagaactagaatgatgctgaacttggcactactaggaattcacaaatgatcaaagatagctaatgaatataaaaattattcagcctcattaaatggcaaagaaatataagttaaaacaatatgaaataccactattggtatgtcaattgagccaattttttttttaatgatataacagtcattgctgctccaggcaaggtggtggttactgatggaagtataaacaggcctaatagactttaaaacattaatgtttatatatttatgtactgtcctaggggcttccctggtagctcagagttaaagcatctgcctgtaatgcaggagacctgggttcgatccctgggtcaggaagatcccctgtagaaggaaatggcaatccactccagtattcttgcctggagaatcccatggacagaggaccctggtgggctacagtccacggggtcgcaaagagtcggacacgactgagcgacttcactttcactttcatttatgtactgggatgtttattttagtatatttcaatacaaaagttagaaataatttcagtgctcatctgtaacatgatgatgaagcaaatgatggtatacattttaatacagccatcaaaaataatgctttcaagtatcatatataaatttggaaaacatttataataaatgccaagtttttaagatggtacaaaattatgatgaaatgtttttcctcttctttaaatttatagaaaaaagattggacaaaaattatgagttttctctggatatgaggttatacttacagttctcattcttgtacttttcttatttcctaaattttctatgaaaacttatttagcttttatatcaagaaaaaccttttttttttaaattgacatttggaaatataagatttgctgatcagttaagagggcttcccttgtagctcagttggtaaaaaatccacctgcaatgtgggagatctgggttcagtccctgggttgagaaaataccctggagacaggaaagattgataattatgcttattaattattattaattataaccattatttatatttattataattaataattatactttgatcatttaattaaataaataaattgttgttaccattctttttctctctgacaaaaagagactctttatcttctccattgagtctaatgataacaattctttctcttcagttcagttcagttcagtcgctcagtcgtgtctgactctttgcgaccccatgaattgcagcacgccaggcctccctgtccatcaccatctcccagagttcacccagactcatgtccatcgagtctgtgatgccatccagccatcccatcctctgtcctccccttctcctactgcccccaatccctcccagcatcagagtcttttccaatgagtcaactcttctcatgaggtgggcaaagtgctggagtttcagcttcagcatcattccctccaaagaaatcccagggttgatctccttcagaatggactggttggatctccttgcagttcaagggactctgaagagtcttctccaacaccacagttcaaaagcatcaattcttcggcgctcagccttcttcacagtccaactctcacatccatacatgaccacaggaaaaaccatagccttgactagacagaccttagttggcaaagtaatgtctctgcttttgaatatgctatctaggttggtcataacttttcttccaaggagtaagcatcttttaatttcatggctgcagtcaccatctgcagtgattttggagcccaaaaaaataaagtctgacactgtttccagtttccccgtctgtttcccatgaagtgatgggaccggatgccatgatcttcgttttctgaatgttgagctttaagccaactttttcactctcctctttcactttcatcaagaggctttttagctcatcttcactttctgccataagggtggtgtcatctgcatatctgaggttattgatatttctcccggcaatctcgattctagcttgtgtttcttccagtccagcgtttctcatgatgtactctgcatataagttcaataagcagggtgacaatatacagccttgacgtacaccctttcctatttggaaccagtctgttgttccatgtcctgttctaactgttgcttcctgacctgcatacagatttcccaagaggcaggttaggtggtctggtattcccatctctttcagaattttccacagtttcttgtgatccacacagtcaaaagctttggcatagtcaataaagcagaagtagatgtttttctggaactctcttgctttttcgatgatccagcagatgttggcaatttgatctctggttcctctgccttttctaaaaccagcttgaacatcaggaagttcacggttcacatattgctgaagccatattggagaattttgagcattactttactagcatgtgagatgggtggaactgtgcggtagtttgagcattctttggcattgcctttctttgggattggaatgaaaactgaccttttccagtcctgtggccactgctgagttttccaaatttgctggcatattgagtgcagcactttcagagcatcatctttcaggatttgaagtagctcaactggaattccatcacctccactagctttgtttgtagtgatgctttctaaggcccacttgacttcacattccaggatgtctggctctagatgagtgatcacaatatcatgattatctgggtcatgaagatcttttttgtacagttcttctgtgtattcttgccacctcttcttaatatcttctgcttctgttaggtccataccatttctgtcctttatcgagcccatctttgcatgaaatgttcccttggtatctctaattttcttgaagagatctgtagtctttaccattctgttgttttcctcgatttctttgcattgatcgctgaagaaggctttcttatctctttttgctattctctggaactctgcattcagatgcttctatcttcccttttctcctttgctttttgcctcttttcttttcacagctatttgtaaggcctccccaggcagccattttgcttttttgcatttcttttccatggggatggtcttgatccctgtctcctgtacagtgtcacgaacctcattccatagttcatcaggcactctatcagatctaggcccttaaatctatttctcttaactcattaaaaattcaaacacaaagtaaatgaggtaaaacagttatgacattctcagaatttccatgatggttaactagttccttttgcttagcttgaattggtgtatctttatttatcctgatagttcttgctgtggttctgttatggaacaagttgacatacttttaaatgctactaggttatcttttagtttattaagggctatatatgttttggtttttttgttttctgtctgtatgacctcaatatatttatactagcatttcaccttttcaaaaatcagttttcctaattacaaaagtagtacatgcttattgtacacaattcaaatatagaaatgtatgaaactgaaaatgaaactttcccacagtacctcccattctctaagataaccctgatggccttctagatttttgtatgccatgggcttggtatatttaaaagtcacgtgttttttttttttaagaataattagatcacaatatagatactaacctgcaagttgtatatttcacttagtacttttatctagaacatatttatctacttgtgtagatctactttattctttttaacagctgtaaatatttcatagtttgattataccagaatttatttaagtaggtctcctattgaccagtatttggagtcttttcaggttttatgattacaaaaatactacagtgaacatcttttgtattgatattattgtatacttgtgtaagtattttggtagaattaattcttaaacatagattgctagtttaatggatatacagatttaaattttaatgaatgcagctcactttctcttctaaagggcctacttatactgccaccaacatcatgtaagacactgttagtctttgtcaatatgatggaggaaagtggtacctcactgttgtttaatttgcacttctccatttattagctggttggatgtgctcttcatatactctttggccatttatatttttcctataagttttcctgtttttctatcgagctgctcatcattttctcatcaggtcttacatcttatgaatcatcttgaccatcttataatttctggagtttaggagccaagtgagaagaaagtgcctctggacatgtcattgttcctcaagctccagaagcgggtcacagagctggagcaggagaagcaggtgatgcaggatgagctggaccgcaaggaggagcaggtgctccgcagcaaggcaaaggtgagcagtgctctcccagcctagggccacggcaaactgggttctgtgggctcttctttaaaggtaactcaggccagaagtactttaatcaagtaggatttccttcaagtgaggactgaactctccttactgttttctgcagagctaggtaatattctgagtaaaaattaacaattaaaatataactacttatttataaagttcttaactttatgtttttccctaggaagaagaaagaccacagattagaggtgcagaactggaatatgagtcactcaaggtaatggggagtgtctggtcaagactttgaatatcttgttttggcaagaaacccattcagagcctctttctctcagagaacatccttaatggtacctgaggccctagcttaagctcttttcaggcattatttctagccttgtgttgttacctttttaaaattctctttcacataagctagatttcagcctaagcagtagctgcctttggaggctgtagaaagtagtaaaggacatggaccctggtgtcagactgcctgggttcaaatgctagatccaccactatatggctgtatgcaaataatcctttctgtgcctcagttttctcatctatacagtgggaataatgataatatttgtcttataggactttcatgaggattatatgaagtaattcatgtaaactatgtagaatagtgctaagcacatagtaaagacatgttagctgctgttattatcttcattgttttaaaatacatcagccttaatttttaacaacaatcctgcaagtaagcattttaattcccattttatagatgaagaaatcaacactaagaagtataagtaacttcctaagataaccccactagaaactgacaggagccgactttgaatgttggtgtctctgactccaaaccccatgttctaaccatcaaatcccactgaaactatgtgtttgtagagaaagacagatatttgtttacagagaagaaacatattccaacatattttaaagaatagttggagggaaggggatggaggtggagaactatatcttcttagtggttcaaggcagagtctcactagatggagataagctgccactgtatgttctagagcacacgaatgcaggaaaaggcactggttaggaacattagttcctaaaatgcagagcatcttgggtaacacagagatgaagcccagaggggagactgtcccattgcttgattcagagctggctgtgtaccacctggctccttcctttgctttccagaatcaaaatcttgagcccctagaagtctgagctatcagattgtcagctgtcaagtcacccccagctccaaaagttccctaggctattaattaatttattagccttaaatttattattctcgatgttttctaattatgccagtttttaaactttttttctgcttttgaaaattgtggttttaaatagctggaaaatagcaataatgttcgtaattataaccaaacaaaactaaaaattagaaaagccacaaaatatttaacagtaggcatttatatatacttgagaactcctgaggtctctctaaacgatcatgaattttttttggtttgtttttagtaatattatgcaaatctagtcctgataaattatttcctaatactgtgatttagaacataatctatgcacatttagaggcccctgttctgtgtggattgctacttcccacagtccagagccgctgacacgtgcctcctctccaggccgtatggcatcttggtgtggagaatgcctgtcctctacccacccaaacccacaatgccttgttcagctccttcccctgaagacagtaagagtgattctaaacacttgactgataataccttatatttaccttacaatttgaaatgtttttccttcaccttaccttctttagtcattgtcacacttctgagataattttttatttcctttataagatcaattaactgaggccttagaagagtgaagagacttactattagttggtaaagtctgatcttgaatccagatcaccaaacaataggaaacatgctacgttcccatcacaacttgcttgaaaactaattttcacccccaaaatacgatatttacttttaaaataccctgcaggacctttccctttctaaattataattaaatattttgcttccccagtgaaagtactactggggtagtacatttttatgtttgtggaaaaagaaaagggtggcagcaaagggtcatctccattattctcctttgtcttttatgctctttgcctagaaaaccaaatcaggatatgggttatgcaagacaggaatcagatgggatgggttgggacaggccaaaggaacagggataggaatctcatctccagatcttctgcttctgcctgcctttcacaaaaaaatggacaaagagagacattctcatgtaaaaatgaagcccggatcacagagttccaaagtgttagcacagtgtttcttgaaatgtggtccctgggccatctgtgtcaacatcacctggaaacttgttggaaaagtgaatctgtgggcgtcacaccaaatctaaagccctccaccttctaggtgattctgatgcacgttaaagtttgggagacatggcatcagagcttaggtattgaagtagagacattcatatgttttctgttgcagaaacagaaatatgaatctgattactttggtgggatactgaagataggaaggagcattcatttacacatcagttcagttcagtcgctcagtcgtgtccaactctttgcgaccccatgaattgcagcacgccaggcctccctgtccatcaccaactcccggagttcactcaaactcacgtccatcgagttggtgatgccatccggccatctcatcctctgtcatccccttttcctcctgcccccagtccctcccagcatcagagtcttttccaatgagtcaactcttcacatgaggtggccaaagtactggagcttcagctttagcatcattccctccaaagaacacccagggctgatctcctttaggatggactggttggatctccttgcagtccaagggactctaaagagtcttctccaacaccacagttcaaaagcatcaattctttggcactcagctttcttcacagtccaactctcacatccatacatgaccaccggaaaaaccatagcctaagaatgaactaatccatgaaagaaaaggttataaattcttaaaccagaaaaaaaactgtcttcagatagtcttagtatgacatattaaaaggtctaatttggtactacaaacctaaaattgcttctctggaagaaacaataaaatgttttatgtttgtatggaagggtctcactttcattattgtaaaatcttagcaccatctgctaaataaatcagcatggtacttttaatgcctgtctgtttcactatttcccacccagtatcctatgatctttgtattttagtgtcagtaaacagagtttagcatcagaactctattctgggttcctgttgccattgtttgagcagggcgtgccaagggcagcgctaactggtgacgtgaggatggctggtggtatgtgatagtatggagatggtgaaggatgtgtgtgtccatctggatggatgaaggaggaggtggcccatcctctccttccacttctcaaggtttctgccagcaccttcacaagactgtcacacaggataaagtttcaaaaatatattgtttgttgttattgaaacattatagagaattttattagcttaaatgtcatataatttcttaattagagattagaagcctaaaatttcagtggtttttctcatccgctttacaaaggagataagaggatgctactcaccatttcagggatctgctcatctgaaccattcattagaagtaacctgacagttgggccctcatacttgctcttatatttacacataaagaaaacctgagcttcttagtacttatccaaactcatacctgaggacttagcattctctctaggcctgtgaacacacctgggcagattctaaaacctgggttgatgaagcaaactatcactcatcttgctcagttccacttgatgttgactttctgaattgcagagctgagttcccaggggagccattccctagggtggctctggcggtgttttccatcagaattcttctgctctcctggggaaaggtaagtaatcctatgtaaagctgaggaagacggcgatgaaccattctttgtctcgtcctacagcgtcaagaactagagtcagaaaacaaaaaactgaaaaatgagctaaatgagttacgaaaggccctcagtgagaaaagtgcccctgaggtgactgccccaggcgcgccagcctaccgtgtcctcatggagcagctgacctctgtgagtgaggagctcgatgtccgcaaggaggaagtcctcatcctgaggtctcagctggtgagccagaaggaagccatccaacccaaggtgagcatgagcaagtggcgaaggtgggtgctggggactggcctcttcctgttctttccctccaatttatgtgacagaaacgtaagtgtatttagtctaattgaggatatcatttgaaaaaaagaaactcaacattgtttaaaaactgttgcaaacaccaattagactgagcaagaagcaagtgaaatcccaactgcttctcaaagtttcacctctcactcactaagaaagggcttttaaaatgaatatttttatagtaatctgaccatgataaattttgatcagaaatataattaagtacaaaaatccataaattaccttgctgtgggaagccattaaatacaattttaaattatttgttgaaaatagcctgtttaactgggaagataacacatgtaaagattatacatgagatcagtgaagagaagcatggagatgatttctgctcacctcagggaattctgtttaatgtgggagtgggcccagatggaaggggccatatttagtgattccacagaagggacctaggatggagatatacatggttctttgaagtccttccctgccctcaggtaacttcagatccaccactgctgtgtgttggtgagaagtgggctttttgtcatttgataccagagagaattcgagtaatcatcataaaacgtggtctgcgttcctccttgcccatgttcatgcagcaaagtgttaccaagaattaggcaatcacgtatcccagctgcatgacatgtcatgtgaaaaatgactgtaagtcagacagagaccagtatatgccatacaatatcattacacatgaaatctaaaaacagaagcagattcatagaacaaactagtgattgcagggtaggaggcatgtagggtgttgggtaaaatcggtgaaggcagttaagcggtacaaacctccagttataaataagtcatagggatgtaatttatggtgagatgaggtgaagtcgctcagtcgtgtccgactctttgcgaccccatggactgtagcctaccaggctcctccctccatgggattctccaggcaagagtactggagtgtgttgccatttccttctgcaggggatcttcccaatccagggattgaacccaggtctcccacattccaggcagatgctttaacctctaagccaccaggaagtaatttatagcatagggaatatagtcaatagtactgtaataactctggtgacagatggtaattagacattttaatgatcatgatcattttgtagtgtataaaaatatctactcactttgttgcataaatgaaattaatataatattgtatatcaatacaattcaatttttagaaggctatagtatataatgaatgggatgcctagaaggttcaagagcacttctcttagaaatggtagttctgcacgtggttaagataccagacctggcagatgacgtacttgataacaactcacacagaggactgagcctctgggaaaccagcctccctctgcatgctagctggagtagcgtccaaaatgaggatccctttgcctggtttcctgtggcaatctgatattctataataaccaaaaactttagtaaaagttaatggaaagaaaaatgagccaaggaacataaaaacagctcagctcacaagagcatgtagttctggtatcacacactctcacctacctgcctcacatattccatgtgacgacttctctccagcccctgttgggctggacctatctaaccaaggtccctgctttccaggttctcagcccacagaacgcatcagcttgttctctcataagaaaaatgcacaggacactgactaagacctttccatcccagggttgtttgtcccactccgtttctagtcaagagacgtttcacaactcctttgcaggcagtgacatcccatgagccaggtgatgatagagcccagccacatctagtttacctgctctacctctgaaagtattctgggaggcttcacttggactaatgcatgacctcttgtcaaggcattactgaaactctcacaaacctaagataagaatttcaccccaatacatgagcagaaggcttgttttctcacatcctcacaaatactgtacaattagaaaaatcaaaacaactcaaaaagaatttcaactgagaattaagagttgccattccataaatatatgttaatgtccaccacatgccagttccatggatactaatttacatatagagttagttttaggagaaaccagccatggttgttttcacagttagcttttttctgttttgatggggactcattgatggaatttatttatggaactaagagtttgttttttttttccatttgtttttcttgcttgctgacttgtgatttttcaggatgacaaggtaattctgattttttaataagtatcccccaatatacacagttgatcctttctggccaccaaatctactttggtatttacaaattaatttcttgtttgacctcttcctatttgagaagtcagtggtaaaattatggatgtcataggttcctgtctggaacacagagaggcctccatgacttttgaactcatagtcagctctgtgaccctcagtggtggtaatggtgggcccccacaagcagggaggaaagcccttaactcagaagcacaagctctcacttctaccagctgtgggtttgttagccaagggtgaggaggagcctgaggagctgagcatccccttcttgggaagggtgggattttcctacaaggcgcagccctttcagaacttctggttcctgtcttggcagaaactctttgagcagtgagtaaggaacttcatagtgctggtagtctgagtctgatcccatacttacctgtttcttagctgaggtagaacagaggagggaaggactggctactttataccatctttcctttggactggctcactagatcaacttacctaatttactacaagttcaaaaccacatcatataggttctcagatgtcagagaatacatgtagcattatttaatatagaaattggttctttgagttatttcttaacactaaaattctgagtgtgaggaattccctggcagtctagtggttaggactccatgcttccaagctgcagggggcatgggttcaatccatggttgggctactaagagcccacaagccatgcagcaccggcaaattaaaaaaaaaaatctgagtatggctttttaagaacagaaagattttatgccttaataaaagagaaaaaaagaaacttcctatcaaatgtatagtaaaatatttataaaacatagctaaaatactttttaaatgctatatgtagtgtttatgtgaaagatttttaaagttcagtagaatataaattctttatagcctttatcatattttaagtatgaatttgtaaactcacaaaaggacagcattagcatataagtaagatttttttaaaaaaataaatactggaattcaatagcaagtatttatgggcctcttgttggcattaaagttatcttggtctctaagatcacaatatttgaagtgtattctattatctccactttactgtgagacctgggtttagagcaagcattgactaaaggattaggcatatactatttagacaaatagagtgggcccatggattctaaagggtgttatgctttagagactattagaacagttgttcttattgtctatttttgccctggtttaggagggatagagagtggctggagtagaagcaaaattttgaaattatattggttgtcagattagaccaaaaaagaaaaaaaaaaggaagtaaaaatgttagcagaaaagtcctttctatacaaaatcattcgtttttctgacctgctagatgtttatttcaaaagcttatatactattcctataccataacagagtaaaaaacattaaataacagtagatcgtagatatttccaaggagctatatccttcccatttatatctctctaaagatgtgagaaaaaactttagttttgctgaaacatataatctaaacaccacttttttttgtactgagtttttaacggaaaaatgagttttgtgtcaaacttttcatatttcttagggcatttgttttgttataatgagtccagaagtaaaagaaagaacagctttgtacattccattgaatactttcttggtgttcttgcctagtaattgttttaaagctatatatgctggatggatagatggatggatagatagatagaaataagtatatttaaaagtatatatacagcattagaatagtaaccaggcaagaacactgatatttatgtatgtatttcacacagcataaaacacacatggcccatcagtgattttgttttctctggaatcacaccatctttgtagtagagtgttagggattctcaagagagggacagaggtgcctcgagaggtgcctcgttctcttgactgcctgtgccccactctctgtagtcaccctggggctagcgtagatctctggtggggcaggtgtgttgtagaacatataaaccccctattctgttggaaagaaaaatgttacatgtggtccacagcttttgagttaacacttaatgtggaaatgtcttttcccctttagaacacaatgacagattccacaatacttttagaagatgtacaaaaaatgaaagataaaggtgaaatagcacaagcatatattggcttgaaagaaaccaacaggtaagttgatctttctttattcattttgatttaatcatgttgatctttagtcttcaagccagcctcttgtacagtgagtacaaatgtttttgcattattttgttagacatcagctgaccttcaaaagagatctaacgtttccaatatattcccagttaaaatctcatttataagacagtagcattactgataagaaattgaaaggaaaatgttctttaccatcaagggagtatatttctgtgtttttagggccttagccttgagaaagaaaatcaattgcttactctgtagcatggactctcttgggtagtcacttccatttgttattcaggatggttatttgtgaaggtttgtaggggcagctgcggctttcagtaattgaaatttaacgtaaagagaagtgatgaaatagctgaatcacatccatgttggccatataattctcgaagggtaccatgacttcccaggatgcgaccttgatatttgagaccaagtttttgtcatgtttcctaaggtgttctgagaaaatcctaacactggtttttatctcatttactctaaacatgaatgaagttgaggatggcacttagctcagtcttaagagtcttgggtgggctgagagtgcagatttgcacactcactaaatgactgaactttccccaaagctttccctgtagctaagattatcactgctcatttctgaaattcctcagcctttctgccactcctgcttcccaaagaaccttcatgctattaaactctgaacttaaaagactacatacttaaaagaacttggccagtgatgataacagagattatcagtgtacatctagatctcctgatgcataatatcagaattggtatacagaaatacttcacagactaaaaaatactgccatgcaagatataaggtatttactaccttcttttatggacaagagtagagaatgcttattaaagtatttggttaaacttaaattttaatttatgaatgtaagttgtaagcataccttatagctgagaatgtgttaatgtaaaaaaagctatattaaattgttgatccatctactcagctattcagtcaccagatatatattgtatacctgtttcatcccagaccatgcaccaaatactggcaatagagcattaagcaaggtaaatgcagtccttcccttcacagagtttgtagagtgttggggagatagccaagagaatttggacttccctccaatgacagtggaagctgttgaaagatttttagtaggagaatggtatgatgagattggaaagctagcctttgcttttatgttagagcatagactgtaatggaacaagattaaaatcataaagaccagttaagaggttactcccataattgaatgactggttatagtgactttgacttagttggtagccattaggattgaaagaaatgggacactgagaaggatacttaagaagatgaggtgagcagccttgcagtttactggatgtgtgatcaggggagagggatcatgaagagcaactccgcagcatctgtggtggatacttggttgtacagagatgccacttcacgacgctgggtctgggatgtagggaagtacaggaaattatcaatagatttacaaatatttaaggaagtaggaagacatccaagaagagaacttcattcagagattgaaaatatagatctggaacaggagtgacgtgtgggctgagatgtaactattgaagtcatcagcatgtaataatacagtcgagaccatgcaaatagaccaactctccagggaaagatggtaaatggaaagtaaaagagcaatctatgaaattcgttttatgtaaacatggtatcaacaacaaaagtctagtaagaggagtaagatcctgggctctgtagtcagatagcacctgccaggtatctaacttctaaactttggtgtcttcttctgcaatatggcaaatgatatatattgttactaggagaactaaatgaaagaatgcctgtggaaggatgtaaaacagtgtctgatacttggcaaacactcaaaatattatttttatatactctaatcagtttcatcagttttatttgttaattatacattcttttaataaaatgtgtgacttttctagtaaaaaagcactttccccgggtcttaaaattaatttttgacacaaaatttttttttaagttgtgtcataaaagctgggaactttggacatatttatcagttactcctataagaacttttaaaagcaattttaaaaatacaaaactagattttatcaagctaaaacaaattcctacccagaagacttaaaactttattttgaagtgaattataaagattgccacatgaagacaatagcttaaattttcattctatatgtgtatgactgttgtggttagtctctaacataatgtgtgacataagatcactctgctagctgaacagaatgttaaaaacagatgtctttctcacctcctgagtcatttattattttgcaggaaaagtagccctggatccttgattattttgttttaaattctccacctttacatgtgatgttacatattactcattagaaaaagaatattaaccaaaaataatttccgtggtaatgtcttgaagtcgtctgtaattaataaaggcagtcctagtgatttaataacatgttgaatgccgtgtgctcctgttgaccatcgtcatctcattaccgccctgtatcccttcctgttttgcattgttgttccttttgcatggaagaccatctgctatggactgccatgagttgaatgaggatggagagctgttgctggtttatgaagggttaaaacaagccaacaggttatacttgtctcctcaaaatggaatgttattaatttgttgtttttcttactaacagtggcctcctgactttaacttctatatcttttatacactgtcttcctgggtaaatttccgacactaaaattcgtgaatgtctcactaagagtggaagaaaacccaaacctctcaactagagcccaaacaactgtaggaaagattaatacatattacttagctgtttcttgtttggaatcatgatcagttcaaaggatacctgtgcctgggcattatagctacattctcatatattatcatcatgctgcctaacagcagtattcagtacatgacttggcattcagtgtggttattgtgaaattcagatttgtgaaacagcaaaccaggagggtttcctgcacagctgtagttcaaaataattacccaaactcatcatgttaaacatgtttaggagaaagcaaataaaatggaaacagcaacaattttctaacatagacactcatctcctctagtgatacttgtgtcttaaaatcttaaaaatactggggttttttggtcctaaaaatactgtttttatgtcttaaaaatactgtttcagtgattaatttttaaactacttaatagactgttttgttcaaggagcttctacttattctgcttttttcttatcacatactgttgtcattaactttgtggtgttattggttcagatcctttggaaatttcgtaatccccaaaatatttttagtctgttgtttactctttgcttataatagtatccgtaagtttgcccagcatttgctaaccaaggggattggaatgaaaacatcttttctttcttcctgttagttaattcctatctataactttgtcttgtctttgggaaagggagtaaatgtagaatgggggtgcctgttagagggaggttgccagttggctctgctattctctggccagtgccctagtccatggcacagctgacctgtatgtttgctcaaagcccaagaacaaatctgttggtcccactaacagtgatcttccaaaaccatatcttgttaggattctcttactgataaggaagttataggggaaaagaagatgacaaatttaaaatataaacaaaatttcagaactctgcatttgggtaaatctgtatttcagaatagcactctagcctttctccccttcagagataaaagtgggaccctggtcacaaacccccacctggaattagtaatgctgaagatcttcaaggcagatttaattaaagtgagcatttgtaatcttgccctccatagtgattgttttgtggcaaaggcattatagtaatactaattttgccaacttaaatgctactttaaattaatgctactgcaaatgtagtaagccaggttaaagttatgtcttttaattgttttaaaagacatgtcttttaattgttttaatttcctatgaagctttcaaaggagtaaaattctcctgtttttcagggcctctgagaactttgtatttgtagcagggtcctcaattcagaaagacacatatgtgagtgcattcatttcgtttctggctccatttgagtttctagactctaatcaagtcagaagctacacagacactacagagtctccatttttctgcccttgcaagtgaacacaaagcctcacacccaccaggtagggactcagatgtcacctccgtttcctccctgtgtggcttctccgcaggctcctggagtcccagctgcagtctcagaagaggagccatgagaatgaggctgaagctctccgtggggaaatccagagcctgaaggaggagaacaaccggcagcagcagctgctggcccagaacctacagctgcccccagaggcccgcattgaggccagcctgcagcacgagatcactcggctcaccaatgagaacctggtaaggacagcagagcagccctccatgcttttggagcaaaacctccttctggctggggaagatgccgttcactgccccacgcttatgaccctctttctctaggccagacacagtaaggaaaatacaactatgttggtagaagtgaaaaacgcgtgtcctcgggtggtagcacctcagcccttgcttggcgggtgtggaagatgctggccagctgtgtgctggggtcttgataccttgagagctcagcttcctccgctgcagccgcacagtctgtgccatccaggaggttgtgtggttgccacaacctttggtccccaggcaccactgaggccctcccagccccttctcaggcagacagcagggttagagttagtcagcgagcagatggcagaaccaaagagggctgtaggttgaccttggttgggactccagggtcaaggagaaacatcaggattcaagtttctacattcttgattctttttaatagaattcagacagtgaatggagagatttattttttccttgccagctagattctgagtaatggcacaaagtccaagttttttttttttttttctctttctgtccttctttcttttatagaaaatattttccaaaatatttctttctcagccacaaaataacttttattacagatttctacttaggtttgatgaacatatttattaaattaaaagtcactgaaaagttacatttccttttttttttttttttggcggatggtggtggggctttgccacatggcttacagggtttcagttctctgaccagcgaactcctaattccacatttctatataaaatctatactgaagtgtcagactggttttgagaaaagctgtttagggctagtggtaattgtttctttaattcagaattttaataacttgtgataaaatagtttggattttctctgaagatttagcaacctgaattatccattagtgatcatttgcattacaggtagttttctagtgtcacctgttcaaccaatttttatattagttggaagcaaaacccaaaggtattcttctcccagcctgtccttccttctgaggacagcatgctggtgagactgtggcaatgggagagatgggtgagggacttgaagtccagactctttccaaagtgcctgaaatatcactgatttgtggaggaggatctgaatcgtgatgttattttattactcacaagtatattgttgcttaaactaacagtgcttcagtgcctaagaattgataaataaactcaataacataataattattgattagcatataaattctgtgcttttaaatcattatcttaaaatacaaggtgaaaccatgaaataaagatgcttctgggtggtagattctcagagttgttttgctaagttggttaagcatttcctttgcaatcatgtgtgcattattacttttctttttgattttgtatagctgatacaaaaataaatcaatcccttccatattctaagctggtgaaacctagtttgaattttaggaaaactgtaggttcataggcttctcctgcctcactgattgctaattcaggagaatggattcaaacttacctacaggggatgatgcagtttttcactgtcattagaatgtcttatttttgcatttctattggaagcacttgggcagaatattaaagcaccggtgggcctgggctttgtgttcttcgaaactctaccctgaaaacccttcccacaaaccctcccctacaaacgcaaacacagagatgagtgttctgcctcctctagtgagcaaacttcacaggttgccccaagctgcccttcagagaaggaaggcacacagcttctgcccagtccttccaacatcaaacaagagctccaactttgccattattctcacttttgtttgaattcccttccccactcttgctgctgctgctggcagcagagaaagtgcagcagcctaggagcaggtcagaggagtgaaataacagccttgtctggggaatatggaccacagctctgtttacctgctaatatcgcctatttcctccaagcatgtgaaaatgtatttgtggatatagaatcagaatcatctgtactagaaaagttagagggcaatgacagatgtcaaatcagagccgtttgagtctatatatatagattccttatctgtgttttaaaatattttaaaattgattttgctgagatagcattcccctcaaagacacagagaaaaacaaatgtccattgtgcctgttttttcagtattttgaggaattatatgcagatgaccctaagaagtatcaatcatatcggatttcactttacaaacggatgattgtatgtaaaagagtgcttctctgtcgtcttcctcactgtttctagccctctataagcgaagagcactctgcctgcccttcctgggaggtctcttgaggaactttcacaaaacctgtttctacccacagctgtcttttagccagtgatgtcgcctctgtcagtgtcctgcgtccattgtcacctttggtttgttattaacactaggcttacagtgtgatggaagcaaaatatgatttgaaaggtaaagtaaaaatccaagaagcacaactgaacactgtgaaatgttagcaactgttccttttgaatcattggtcgaatacctaaatcagccctgtctaaattggaaaaagaatgaatacttgtatctataaacgccttttaaaatccataacctgaataacaaccacaaacctcttaaatcattgctttatttctgcttgaagctcctggtttgctgttgcccacttttcttcttaaatattgattgtttgtctctgcctgtcatttgaaagaattcttgattagggagccaagtatcacaccttttttttttaacccctgcccatgaatgtactgcttttgttttctctttttgcacaaatcatatggaattatcctcttttctccctataagcaaaattatattacccaggagatttctatgggtgtgttatctaactgccacttagtctgtcaaccactctgtactgttctctgtggttattttttaacttaccttttaattcccgaaacctcttaacttttcttaagttacaggactagttttagcctctccaaagggtggaactcatagagacagtgcttcacacacataggtgtcagttaaaaacccccaggtgcaaccatccttaaaacttcacacaaaagtgtgtgcattcatcaaaatttaccttgcttattccccctttaaatgaaaaactttctactgaaatagcagtacgttttatgagcatttaattgttttgccccatggaggctactggagtctactccctccatagtgagcctgctgtccatcacgctgtaaaggagttattgcactgtatattttaacatttgctttcattatagctgcctttcctattgcctgccagttttagccaggtggggctccaccaatgagcttttatggagcttttatgtaaaactaactttttatgtaaaactaagtactgtttctgtaactttgtgtctgctttccttcctgcattttagatggtttattttgatctttctgttatatttcttattttgatctttaggatttgatggaacaacttgaaaaacaagataagactgtccggaaactgaagaaacaactgaaagtatttgccaaaaaaattggtgaactagaaggtatttaaacatgtttttatgacagttgctgaaccttggttttatatactatactcgtggcttaagagtgtggctcaatttgtgtgtgaatattagggacaataacaaaaatgactttagcaaacctggcctccgtggagtagaaattttcattgctgagtggggaaaaaatggtcttttcatgatagtactaacttacaaagagagaattcattgaataaacatctaatggctgtcttctgtatgccaggcactgtgctaggcaatgttgcatgtcagttaagggcatggattctgtagccaagtttcttgggtttaaatactggctcttccactattaatcatctgatattgggcaagttactgaacctgtctattcctcactattcccacctgttaaatgggaatgataatgatatctacctgacatggtttgtaatgattaaattaattaatatgtggaatgaatttagtatggttcctgacacatagtaaatgctatcaacaacttatatttattactgttattcttagtattagggatactaagatgagtaagacagagtctgtgtcctcaaagaacttaccatcaaatggagaacaaaaagagaagtaaataagaaaaaatgagttgtagttaaaaaggagattctataaaacaagatttatatatgatgatgatgggaaaacaccttgagaaagaatcagatatcagtttttattatatacaaacgattcttgtgggtgagcgtttgttccttcagtaagtaggtgccagggatgtagtagtgaacagggcgaaagccacattgtaagcttatcccagcaacgatctcattgttctagagatttggagcccctctttggaattgccttcagacctacgcaagctattaccattttgaccagaaatgacactgtgcagtctgactacctatctattctgtcattgtcactgaataatttttgctctactcaaagggtgaacattccccatcactgggaatgttcaaaagaatctgccacgattgactgtctggcttccatccctccaacatgccaggcctgccataactctcccacctgtttgatcttcccgcttctattagtcgaggcctgcttatcctttgagaccagagttatatgtcacatgctcaagagcagccgttcctgatcatccagacagaccctacggctgtaccctctgtggcaccacagttcatctcccacctttatggtcttcactgtcatgtttttagtaaatttgctgtctgatactggcttcctcaatggattgtgatctttttgagcatggtgaccatctgttatttccccttgttttcacagcacctagcatattgtctgacctgtcataatcattccattagtgtttgttgaatgggtaaataagtgtcagaaatatttagaacagcaacatggatatttactttgaagaggataatattccctcccatgttcaaatactgaaatatttgtttagatatcagatagattactgatagattaaatctataatattatatattatattattattatataatcctttagcattatgtgattcatctattaaaattttgaacctccaaatcacatacatgggctataatgtctattggcagaactttaaaaaacctttattcagagaacctttctgcacttaactctgcattaattatatcatgagatgataattagacagcagagtatctgcttaaaagaaactgattttaagggtattaacttataaaattattttttaagctcctaatgattcatttaccatatgttagtaacttttgataaatagaaaaatcacttattttacatttttacttagctttttttgatatgtatatttttacttaaagggatacctgagaatatttcatgatgttaatgattttgagccattatcagtcagaattcaaccttatcagttaaactatcctgccaattgtattcttaaatctataacgacatttgagaaggcaattcatagtttaaacaaaaaagacatgatagtcttaaaaactgagctaaatgatacacagtctacagaataagatgaaattggcttatgcgtcttgagcacttactgagtgcagtgtccttcccctccccaaggcagagcataaaggctacaagctcttctcacacctttgtctcctgttgtcttatccccacggtgtgtagaaaacactgataactttgtatagcaaagcaccttctaatagctaaaagttttcttcttttttctaaatatataataatgtacttaaattcttcaggttgaaaatagcaagacttacctcctcctatgggctacacttaattaaagagacatttttagataccatctaaaactgtttttaatgccaacatgcctaattttagcagaaattataaatttaaatcaagagtgtttcaaagtttgatgtgctttgtgctatattttaatccaggagtgggtgttccatctcaattttcataaagtcagtgaatttagacctaaaagaattctataaatcagttaattacttcataggagaagagagctgagacccagaaacggtgaattctaaagtctcagccacttagtggccaaagtggaactagaatccatgcctcctgagaaccactgacttctctcctttgtgttgtatttctcaacagtctttcttcttatagtaattcattgactgtctcagttaaacctgagatcaaggtcctccctgtaccaaaagtgaggggggcggaatcttccaatttcctttctttctctaggataaaaaggtccaggaatgtttttctctcaagtataaataatctagatgatagaaataggtattgcttcagatctttctagaaagatgtctgtattagatggagcattgggctaaatgacccccagcatcccttgagtctttaaaaactgtgtggtattctggcttctctcaggctttatattttcctgatactacataagggttgacattttaattaatatatgatttgttaaataaatcaaggttatgttgagctgatacctatattttatctgtgaatttttgtaaagactctaatctctgacaagaatttaaagacagagaaaattttaatgaaaatatagcaaattttatctctggcatttttgtacagaaccgaaaatatcttctttagagatatatgaaaggaaagtgaaggtttcttttaaaacatgtaatctcttagttaaaatattcactatatttcataaattctgaggcggacaatttttcacattttaacatctgaaattatgatgtttattatcgcagttgttagattgtagtttaattggcaatatttttccttccttggtgttatataaactaatactatatatcataatcaaatatgataaaattggtaggtttaaaatgttttgagttattcagagtccacatatgtgcattgttcataaacttaatatcaatacgttgaatctgtttccttcgtttcccctcatagaattgttcctgtggctcaaagcaactagttcatagatggcaggggttctattgttttacatacagaacatattcaggagctgtgagggccactgtatgctgattctgagatccccctggtgttgtgtttaaactgtctccagaaataatttatgtaaaactaaatagcttgaatctcatatctcttgtgaagatgcatgcatttcccgctagtcctgtggttccagactgtatcatacatctgaaacactaggttacggaaggtggccacagccctgagctgtccagttagagtatgatggttctctaggtatcataatattgatagacggtggtgcttttcagcgctgatagccccgatgtgtgatgctgcagcgtgaggtggacgaggagtcaccaggccctctgccacatgagcaagagcgctggcaggtactggtgttctctttgataaccttgtgctgtcaaactggcttcccagagctaacacaggaaattgctcagagtgactggagaagctctactcagcaagatagaactttctaatgcatctgatctgcattttgtttgcctacagtctctgaactcaaacttaatctgcacttaaatagatgtcttaactgctgctcttcctatagataagagaattaaaaatgtgcttgctagcatttagctccacaaacactgttgtagctcgtgttcccttgcatttcccagatgagatgaaattggagacttttaaccccgagttcttttctcacagctgccatcaacaatggtgattagttttaacatctgaaagggttgttcaccagtggctgtacatttttggttgcaactttgtggtaggatttttaacactttactacaaacaaacaaacaaaatgaataaatttaggaaattattttaatattaaatacagagacttccccaggtggcccaatggtaaagaatcctcctagtagtgcgggagatatgggttcaatccctgggtctggaagatcccttggaaaaggaaatggcaacccactccagtattcttgcctggaaaattccacgaacagaggagcctggcagactatagtccgtgggatcacaaagagtcaaacacaactgaacacacacagacacaaacatattaaatacaggttgttttatctgctcatggtttcttcaaggaatgaggggtgcctctatagaatattgaatttccttctatgaattaaaatctaaatatatttagacatttatgattgatactgattagttaactaagaagtgaagtgacgtaaagtgaagtagctcagttgtgtccgactctttgcgaccccgtggactgtagcctaccaggctcctctgtccatggggattctccaggcaagaatactggagtaggttgccatttccttctccaggggatcttcccgacccaaggataaaacctgggtctcccacgttgcaggcagactgtaacctctgagccagttaagccacttactttggggacatttaatcttattacaaaataaaatgtattacaaagagatacttttgaatcaagtaagattcttgatgttgatagtaataagtactagttgttgtcagagtgacaataacatgtaattttaccatctatccatccagttttaccaaaaaaaattatttaaagaaggggcaattaagtggcaaatatggcaagtttctgttgttacagagttcacttaataggaacatgaaaccgctcatcttttctacctggaacacatttttcttcttttatttctaatgaagtgggccagatggagaacatatcgccaggacagattattgatgaacccattcgtccagtcaacattcccaggaaggaaaaggatttccaaggaatgctggaatacaagaaggaggatgagcaaaaacttgtgaagaacctgattcttggcaagtatttcctgtgtgacatgaagggtctttctggtacgtgtcagtggtgggagagattagtcactcatttattacatattcacaccggtttctttggtcaaccttgcgtgctgtgtgcattctgaccccctcatggctgtcagtcaccctgcaaggccaccagtgaggactgcctattagggtcacgtgaggtcttctcagctcctgttgcctgttataataacccaggaagcttttgaaaagtgttgatgtatgttcccccctgcagaccaattgcatcagaatgtctagaggaaagaacctggccatgtccctagttcttttttttttttcctgtctctcaatggattctgacgtgtagctagctgcagttgaacaccactgccctgggccatttaagtccctgaatttctcttgttccttacttccctaggaaggtatatggctaaatatgtcaggaaaaacagtttaatagtaggaaaggaacagaattaaggaaaagattccagcagtgggaagagaggactgactggacgatggagacgggaatagaagaagcctgtcagagcagcagaaggcctttgagtctgggtatgagcccactggctctgcaagaaggctttttaggggagcatgggagatagttcaggagtgtatgcagcccataagttgtgagctcaaaacactacaagcctctcctttcggcttttgcagagcattcctccccccaggtgcctgggtggcagcagtgtgatcggcagtggtttaatgttcctagagttcgcaatgttaaacttagaactatatataggtgcagaggcgcttaggtttcagtgtgatcttcattttgaaaaaatggtaagaagccactgatttttaagcatagaattaaaaaagattcatcaattcaataaacgtttggggcattcctactgtgtgctaagcattttctaggtattgggtagtgaacaaattctctcttctcaaagagtatattccatgggggtgggaggaggtagataaaaacaaataagggggtgagaaagataaacggtgaaggcaggtgtgcaaatttatatgaagttgttaggaagggcctctttgacgaggtgatctcctttggacagagaccaaaggaagtaaggaagcaagtcctgctgatagctgagaaaagaacattccagacagaaagcctaggggtgggcacatgcctggcgtcttcatccagcaacaaggagacccatttaatgggggagcacagtgagctggaaaggggagcaggccagatcacgcagccacggtgaggatttcgggttttacaaatgagtgagatgagaagctacttggaagattttcagaacaagagtgacatgacccgattacattttcttatagaattactctggttgttatgtggacagtgtactactgaggagcaaggcgggagtcagggagaccagttgggaagctctcactgggatcccggagaagatggtggcggcctagactaggggagctggtagagaagtagcaggattattctggacatgtcttatgtgtagagccaacaggatttgttaatagattagatgtgtgatgtgagaaaaggaaagaagacaaagatgatgacaagatttatatcctgagaaactagaaggcagagactgccacttactgagatgggacaactcctggaagagcaggttccatgggggatgggctttgtgggacaggcctgagcagagatgtcaaaagccacttgttacatgagccctagattcaaaggaaaagtcagggcagaagatagacatttgagagttgtcattgtgtaagcaactaagattctcatgtccctacagtcatgaaatcctctactctaaaatatgcttttttaaaaacatgacctatttaccctgaatgattgaactgttacatgagaactgtgcttttatatctcaaaaagcattccttatgaagactttcaaagttatgtaagactgtttttcctcttttcttttttagagctgaagccacgtggtgtggcagtcaatttgattccagggttaccagcgtatatcctgtttatgtgtgttcggcatgctgactacctgaatgatgaccagaaagtaaggtcgttgctaacatcgacaattaacagcatcaagaaagtactgaaggttagttcatgttcaacaaatctctcataatgaatattaatgatgacagggtatctacagaggtatttttccatccttagacatgagctaagttgccagttatggccacattttagtcttaactgataccttccattataggaaatatccattatgtaatgtgtctgtgtgcattctttcaaaacagggctcagattgaacaataatcaaaattaattcaatatacttacatttagctgtgaagtaaaccaagtttcttcatagaaatagtctgctttgaggtctgtcttagaactaaattaaaaatacttagtgaagttcatatatacagggaatatgatgctatagttaaaataggtgtttaaaatatttagtgaccgaagcgacttagcaggagcagcagcattccattcatataaaaagctgtctgataaaatatttaaaattctcttctgacttttcttcccattattcttcagctcactccataattttccttgttacctgaaatgcctggtttcatgtgagcagcaacacatagatactaatcagagaggaaacttggaaaaggcagcgaagttacataatagaacagaaagccctacataactcagtaatcactgagtcacgttgcataatcatccttttgacaacctagaaaaacggtgaacgttattcttagtttgaaccatttttcagtgcacagttctgtggcattaagtacattcatattgttgtataaccgtcaccatcatcatctccagaactttttcatcttccccagctgaaactctgcacccattaaacactctcccccagctcctagtcataacttttaatgccagttctcagtccctactgcacagatactctatgtggttacattctgcagtggttactaaagtatggagtttctaaatatgttaacattcaaaaactgatgaatgtcttctgaatggagctcatgtaatttctggtatattgatggtatactgcatttattagactatgaattttactacttcttaagtgaacacctatgaagacagcaaaaccaagtcatgaagttttctccctctcatcttaattacaagaagaagtttatctaatttgactaattattgtaccagattgtttagagatttaaaatgagtagctacttgggacttccctggtggttaagacttccactttccaatggttaagagttcaccttccagtgcagagggtgtgggtttgattcctggtcagggaccaaagatcccacatgccttgtagtagaaaaaccaaaacataaaacagaagcaatattgtaatgaattcaataaagacttcagaaaaaaataaaataatttaaaaatgtaaaaagtgtagattcttgaacatagcactcttttggaacatccttcttttaaaattgaagtacatttgtcttgtgtcctgttttgatttagagctgttgtttgacatgtggcccaggaccgatgaaaagccagactgtccagtgctctgcacaggactccttccatcccatgtctgattcgttcctcagaaattgtatcttaatcactgacaagatttttaacctaatctgggttttagtgcttcacagtgcttgtgattctcttttgtacctttagtcctttcttattcccttcagtaacccccagggaagtaagtttgggtaagctagacttggtaaattgttttctgcctaaagggactagtaagctaatatcaacggaatgaatgggcatcactttctaatggcaagaaaacagatgccaagcaaggtaacaactaatgaattcagtggttgaattctgtagcagcaacatgaggctttacaacggtaatgtgactgatttttataattgttgttaacggtaagtgaaggaaacgggccttctagtatcgattcagttttttcaggcttttgtttccataaggaaaatactaatttaggcttattctctcttttagaaaagaggtgatgattttgaaaccgtctccttttggctttccaacacatgccgatttttgcactgtttaaagcagtacagtggagaagaggtgagaaaaccttggttacaaaactggcatgctatactttgtctgaactttttaaggaaaaaatttaaagcacaaaatgtttagtcacttgttaatttagaaacctgaattcagaagtggcttgacagcttataggtctatttgacattcattatttatgaaactgacttgggaagtggtgtagtttcttcgctctgagagtttgtattatgagaaagcacagcagaaataaaatgagcattggtcattgaatagttatcgcactgaaactttttgttaagatgtgaaaatggggttttcaaggattgatatatggagctgtttaaagaaatgaatcaattttagctttctataatacattaaaagtgatcatgttaaaaatatctcaagactttttcaaaaatatattttgcttttgcttatagtgatgtgttcatcagttagttgatagacttcctgtttcaaaactacatatttataattattatttattaatggctacatagtatatatcagacagcacccactatatattatgttgtttaattcttacatctctttgaggtcggaattctaacccagttttacagaggaagaaactaaggctcaagcagttcaccactttgcccatgtcctctcagccataaggagctgagctaggattttgggtctgcccaccttcaagagcttgtgcccgtaaatgctgcccttcatgcctccccatcctttgctgtcaggacaggcagagaagctgagtagtggccactttctgagcactcacaggcttggagcagaagactatcctggcaaatgatgggaaatacagtatgaataagacatggcccctgagcaggtgggactgacagaccagaatcccccagagggcctgttaactgccctgtcagtccccagttctagaccatgttgtcaagtaagttgtagagaggcagatgcttgagtgtggccagaatccatcacgtaggcaaaagtacctgcctgtacagttggctttccgtgttaaccacataccatcaaaagattccattctaagcttggactgagaagcctgtatgaataccataaaatacaattaaggaaaattttttatttattcaccaagtctctgtagaaatgaccagttttaagaaaattatatatgtctttcaggttcggaatttataaataagactctatttagtgaactgaagttaagaaattggtgttttacataatttagtgtttggcagtaaaccagctgtttcataagtgaaaacactcattatttttttttttttttcaaattgagttcccctatctcatttcattgacattgctggtggaaaggcttaaatgctagactgccaagtttagatattattcaaacgctagtaagaagtggaagcagggatgtgatagaaacaaacacgcagaatttgggaaggattatcctggcacttatatggaggttggatgggaactcttaggagaaaggtaaaaaagatcatgaggatgttgatcaaatgagagagttaaacagacaggagacattttatttcatgtatgtcattaactctgcattatggctctagggctttatgaaacacaacacctctcgccagaatgaacactgcctcaccaattttgacttggctgagtaccggcaggtgctcagtgacttagcaattcagatctaccagcagctcgtgcgggtgttagagaacatccttcagccaatgatcggtaagtccagggcattgctgacatccaggtctgtcttgtggcacatgtgtcagagcatgtattcatgtggagaaggtaaagtagtaagacgcagtctcaaaattagctgaggaatctcagaaccgcagccatgactaactggggcacatcaaaatccctgcttctacgtgatggaaatggcaggatctattaacagtttccctctctaatgtgtaatgcctctctcttaagattgggttatgctttatatccagcaacagactcagaccttgtccagttttcaaaaacaaaaatacttgaaattttcatcgagggcactactgcagagaactttctagggacccaactaaaactaaagagtctaagaagggtttgcagattacctgataggctatagtaacagggctggaaaggtaccacggcaacaaaaacaggtctcagacactccatgctgagtcgttcatctcatggccccagtagaatcattaaaggcaatttggtttaaagttgcagtttctcttggatgagcaactgatcagcatgtgtgtctatgtatatgagattccatgtacctctctttatatgtgtgcattcactctgggtatgtatgtacgtattatgctacctatattcctttggaaagtgtagcaggtgtgaaattggaattagagggcatgtgaaaattgcaggctgctgattttgtgcgaaaactcagggcaaggaagggcccagctctccagccccatgtggctgctctctcccaagaccactgcctggtctcctgcttttcttactacttgatttgtttgcttctgaggctcgatattactggagaatacttatcttctccctaattgcctctctcttgaaaacctctctctcaaaaatcctcccaagaaactttacacatgtgctattaagactactgtttcatattcttgaaaataatccattaaaatttgatggtaaatttttgcttttaaggataattattttattaaatttaaaatccagatgcctttttacttgtagttcctctcccctctagtttgatgctcaaatcattttcctaagttgtgtgtgtgtgcgtgtgcatgtgcgtgtgtttccatcagaatcttcttctctgacgtatgaacttctcccttagtctccggaatgctggagcatgaaaccattcagggtgtctctggggtgaagcccacagggctaagaaagcgaacctccagcatcgctgacgagggcacctacacactggactccatcctgcggcagctcaactccttccactcggtcatgtgtcagcacggcatggaccccgaactgatcaagcaggtggtcaagcagatgttctacatcgtgggggccgtcaccctgaacaacctcctcttgcggaaggacatgtgctcctggagtaaaggcatgcagatcaggtgagcgaactccagcacccgtcgtggccttctcgggctgcctaactgtgtgctgggccgcacgtgaggcccaggcacctgacgtctgaaaccccccaggtgagcagtaagggcagaccaggcatggagccgcttcctcctgcctgcctgaacttcctccactgtcattcatggttgctcccagcatgtcttcagccactgcttgttggaacccagctccatgtaaagttaactcatttgagggagtaaatcttttactgatatttgaagtatgcccctcacagttttaagaaaagctccactcagttttgtccaactgctccttagcattaccttattaacataatagaattattttttggcaaataattcattttaaaacagctagaaaattcaccaagagagggggaaagtatttctcctataaaagtctatagttattcaatcttaggaaatttgaccttctttccaaattttccattctgactcatgttcactgtagacagcagtcagaaggtaatgccttccactcaagtcattgaatttatttctctgcaagctctggtcatacctacgaagcccctctttgcctgattacgaagtcctgactgtggatgcatttatctgactcctgttttgcaaaccactgtcacttgattggccacctcttaaaaactcagcatctgcctagtttctgtgtctctctccatattttctgtttgcctgttcctctgcccccacttgcccttcttgcctacatccctaaacttcctcaggccactacctccatcatccaggctcttctctgaaaagggtcagagcacagggtctagatggggatcttattatatccactagcttggagtttgacgtagaaacagagtaattagaggattatcaattctctcctctcaagttgtaaaaagctggaagatgttttctgctctgctgtttaataaggacacaaccatactatgtgttctattttttttaagcacactttattttataacttgctattatggcttcatttctgtcttccattaaagagaattatagtctctagaataatactcatataattatgattataaacctaattatttatagtgataaatttttaagcacagctaatgatttaaaaaacagaattcaactgaaattcctaacaaagccatgcacagaaaaattaagacatttatgataacattcggtaaatttgcatccccctcaacccttttttgacataggtacaatgtcagtcaactagaagaatggctgcgtgacaagaatttgatgaacagtggggctaaggaaaccctggagcctctcattcaggctgctcagcttttgcaagtgaaaaagaaaacagatgatgacgcagaagccatttgttccatgtgcaatgctttaactactgcccaggtaaggcaactttccctaatataaaattcatcaaaggtaacatttagggaagtcacaaaggcttctagctattgctcttgtctctgagctaacttcatctgtgtcagagatgatatatatcaatactgtagatcttgaagacaggtgattttaccacaaggtatatttcagtattgtcacactcatgcacatacaacattcagtaaatatttatccattctctacactgttctgtgtaacgttccagccactcagataaaaccaggaacaaggcaagtttctgtttttatggggtatacattctatatatcctatggaccttgaactccaaagagtcttgtatattatttgataattgaatgattttttagacttatctatttaagacagataattcttttttaattgaaatgtagttgatgtataatattatgttagtctcaggtatactactcagcagtttgacatttgtatacattatgaaatgataaccatgaaaagtctagcaattatatgtccccatataagattattatattataaatcatatttcttatattgtagattgtatcctcatgctttatttactttataactagaggtttgtacctcttaatcccttcatctattttgaacaccccatgtccctcccctctggcaaccaactgtttgttctcagtatcacttaagttgtcccagaggtctcttaaaaccatccttatttcattttttttcctataaagtttcagtgatttgatttacactactgtcttccatctcacattccctccgttgtatcatttagtctactgttgatgccttccagtctttttttatttcagttattgtattattcagctttttctggttctgtatattttctaactctttgtgaattcatccctatttcccctgagtacagtgagcatctttatgatcataagcttgtactctttatcaggtagattgctcatctccacttcatttagtacttctgaggttatgtctcatccctttggttgaaacatattcctgtcttctcattccccaccctccttttttcttctttttttctatgcattaagtgagctggttatatttcccaatcttaaagaagcggccttatgtaggaagcatcctgtggagctcagaagcatgctgccctctggtcgccagagttctgtgcccatgggtaccccctgtgtgggctgtataggcccttctgttgtgacagggccacagtcgttctactgtgggctccctagtgggcagggttggcccctggcctggtcggctgccccaccctgctccctttggtttctgctggtccctttggtgggaccagctcctagcacatctggctacagggctagggaaacccagggctggtgctaggcccttggtaggtggttaagccctgagcactaataagctagtgggaggactccagatgttgctgaggatcaatagttaaccattcagggaaagtcttgaatttgaggcagtgaaagatgggaagggcattggaggacagtggctacagcatgaggcaaggcacaggcataaacatgcccacttttcttttgcctagttatttttgtgctgacttttggattttttaaaaatgttcatcacttatctcaaaacacagaaatcttacataggccttacacatagaatatatatagaaagtaattagctgaatactcaggacactgataactgttgctactttgagagaatgagagcatgagagtgggagtacttttacttttcatgatttttcaaatttatattgcttcttaaaatgtacagatattatataatacgctcttattgtaaaaatttaaataataaagataaatgtgccttcagaacagctccctctcccatcttgtcctaaccaagccctgagtagaattgaaagcagtaggcaaagatccttctctttttcctgattagaggtacctggaatgtatgtatttgataatatggtaaaaattttgatcattttatttctcccagattgtcaaagtgttgaatttgtatacaccggttaatgagtttgaagaaagagtttctgtgtcatttattcgtactatacaggtaagatctcctaggcttccttttgcttcagtttaccaacacagttatttggatggaaattttataatttattgaaggataatgcagtttttgttatattattgtatcattttcatagtgcattaattttttgataataacttattgaggaaatgaagtgattttaaaacaaatataaacatttgttattcactgagggtttttggtagaattttgtctaaaaaaataagtttatagattcaaagattgatgttctggtttttttttttccctcagatgcgtttacgagacaggaaagactctcctcaactactcatggatgcaaaacacatctttcctgtcacctttccttttaacccctcttcccttgcgctagaaaccatccagattccagccagcctgggcctgggattcatatcacgggtctgaaagtgatatcaaggcaaatattgacaatacatttcttgcctgaaataagaacccattatttcaagtgagctactaaaaacacattttaaacgatagtacttattatctcccaaataagggattattgactagaactgcccctagaatacttttcatcatcttggaaagaaaaataggttcctttgtgctgtgttaccttcataacaacacttgtccttggtcagttaggtgtctgccattgacgtgcaggtgaatgatggaagaaaagaaaaaaaaaatgtgtcttcagctgccagcatttattttaaatccttatcactgcatctaaatgatataaaaaacctgaattccagatatgaatatgagctgttgttaagaaggcaccatcaaggaacctcctgtgtgctaaccagaagaactgaaagaaaaatcaccactgagtacatatcataccagcttaggaatcaattatgttgataatgtcaaactggaacaaacaa

SEQ ID NO: 82 - DNA, 44637 bp, Hippotragus equinus
  source 1..44637: mol_type = genomic DNA
gtttggaggtggaagtgaggggatgtctggggaaatcaaagcaggccccaggcacccctggagctttctaaacaatgctggctcaaaccacccttgtctgacatcatttcttttgggattcaaaaaaggaaatcaataaataaatggcatttgcacatcatgaatctttgtttatattttacaaatacctaggagtctttatcctaagtaggaaaatcatgactgagaactagtttattttcttggagcagataaaagtttctacctgatgccatacaaaacagtacatataaataaaaaggcagtgtttccatgtaaaataaaagtacataaataaatactaaaaaaaaaaattaaaaatccttgtcctcttattttgtataaaaacacatttgttgaaaaaaagctcctttggtcggccccggcattcatggagcgcacgcacacgccccagcagggcttgggaaaggaagcgcagggtcctgggggcagccagctgtttacttgaatgcctccgggacgtgggcgatctgggacggcacgctggtgggcgggctggagatgccctcggaccaatcggagatgttggaatgtggcgaggagctggaccactggtcgggggactcgggggacggggtgaggaaggggtgctcgggcacctgtagctggtggctgggggtgttgtccaccggggaggacgagtagctgtgctgggagggtggcgtcaggaactgggcggtggtcatgggcggggccagtgtgggcggggccagcgtggacggcagcgacgtgggcaggacctggccgtcctgcggcaagacggtgtgcgccgccaggttgccgggccccagcggctgcatgtccgcctggctcagctcccctcccaggaagctccggcccaggtggccgctggcggccgagctcacgccgaggtgcggctgcggcggctgcaggtttggctgcggcggcatgctcggcggctgcatctgtaagctctgctgtggctgcagctgctgcgtctgcaccaggtgaggctgggaggccagccgcgtgttgggcagggcctggtagctcatcacctgggacagggcgggggcgtgcagcgggcccaccgtaccatgctggaggccggcagcctgtgtgctcagggtgcctggcgtcacgccccctcgcagcgggttgtactggttgggcaccaggccgttctgcagccgggacagccactcacactggccattcaagcctgcggctccacccacggtgaaattcacagccccaccgcccccactgccacccgcgcccaggatagtgctggtgccggaggccacgggcaggtgggagaggcgtggtggccctgcctcaaaggccagccggctgcccccgctcagcgccgccatctcgggtttggctgccacgctcaggtggctgacgcccaggtgggcctcgggcatcccgggcaggtggttgaggggcacggagggagacggctggaaaggggaagacaggaggggcggggaggccacgtctgacaggtagccgtggggggactcgagggagtccacgggtgacagcacactcccgctatccagcaggcagcccttgccatcttgggacttcttcctccgagccttgaggtccttgggctccttgccgccgcaggccaggcccttggtgctgggcttgcgggccttcttgccctgcatggggggcttgaggttgcccaggtagccgttgggcgagcagagcgggggcgacagggtgggcgcgccacccagggtggcgccatgcagcggggggctgcgcaccaggctgtactcgtccagcagccgcacgatgtcgtggtgcatgcgctcctgcgcgatgtcgcgaggcaggcggtccatgtggtctgtgatatcccggttggcgaaatggtccagcagcaccttggcggtctcgtagctgccctcccgggcggccaggaacaagggcgtctcctcctggggggagcagatgggggcaggtgcaggggtcaccagtcaccagatggaccagcggtcagccccgcctccaccctgctgcggaggggaggcacctcatctccaccctccccctagggtcctaccatcactattatgtcttacaaacaaaaacaccttaaacccaagacccacccagaggacctgtgggatcctatattctaaaccagtggggctctaccttcactgggtcagagaccccacgggaaatctaacagaatgtgcccccccttcccctcctccaaaaccacacagctgtggggtcactaaagtgtgtctgtgggcatccgttggtctccgaggaaccctgacatcttagctccgtccccagggcatagttttctcatctgtacagtggacatgccacgtatgccccccgaggctgctgtgtggggtgaggctggacggtgtctgcctggcacacacgtggccttggccgcagctaccaccccgccacggtggtccctgccgccagtcaccctgtctccccagaaggaggcgggatgatgcctctgccccatggcagactcagaagtgatcgggcccaacagcacccctgcgtccctcccccaggacaggagatccttcaggggtcagtgaaggaaggggtgggtctggggacacaggagcccaaagacaagtgcaggagactcagggccaggctggggttgggcaggaaggaaagagcatacttagactgcggggacagactgcggcgaggctgagagagaccagaggtggtccacgtgtagaaggtggacactcaccattccatctgggggcctggcaacgcagagccccccaccccgcccaccagcctcttggctcagcgtgcaccatctgggtcaacccgccccggccagtgacagacaaggacagaggtgaggtcgcaggtcacagtgacattggcgggggaggggacagctgcagctgcccgtgccctgggcccgggaggggaccggtaatgtggccagagggaggcagggagcgccgaccacacaggcgcccacgtctctgttttcccgcggcttctcctgggactttatgggttagggagctgaggcccagaagctgaagtcatggctcgggggtcccccggtcgggaaggagtggcagaggggaagcgcctcgccagccagcccaccttgttgttctgcatgtccttgttggccccgttcttcagcagcacgacagcggcctccacgttgttcaccgcggctgcccagtgcagggcggacttgcctgcgaggggagcagagggcgggtcaggggtgggcaggcgggtcaggggtgggcaggaagccgtggcgtgccccctccctcgagccggcccatccgggctcacccaggtcatccacggcgttgacgtcggcgtgggagttgatgaggtcctccagcatgccctccacggccaggcgcgcggccagaatcagcggggtcgtgccgtcatgcatgcgggcgtccaggtcggtggctcggttccggatcaggatctggaccacagggaaagtctcgggctcagcaagtgtgagcacgaggcccccacccgcgccgggacacgtgcttgggacccaacccctgactcggatgcagccctcctggggtcgggcggccccagggagcccggacacacgtggtgtgggagcccggggagtgggcagaactccaccaggctctgctggaggggtggggccggagcacgagagagaaggacggtcactgtttcgggggcaggaggggggatgaaaggagctggggaagagccgtgtgtggaccggcctctccccgagaagcacccaagggaatgtctatgtgccagagaccgcccgggcaaactcggccagggcctgcctagaggggcttgtttaaattgtccccaatctctcatttccataaaagacaacatgtcggaaatcattagacttttgtgacaccccccatttgtgccccatttacctgcccgcctgcagagcagcatggcctggggcctgggggtttgtggccgggagactggcaggcagctttcaaaagctgcttctgccagggatgctccccagagacccaggcacccacatccctaatccatcttcatcctggaaggccagcaaggccagagcccccccccgccccccccccccactgctcgcaggcagcaaacagcagcctctagcccttctccccactgccagaagcgatcgatgcctccagccaaagaggggagggtgtgggggccgggaggggcaggcacaggggatgggcctgttttgggtgagggtgaggaggccctgcccctgtaggtccctgtggcctctcccgctttagcgccaccagcctggctgcctgaggggacgacacaggggatttgacaccctccctggcctcacaccccctccagggtgcaaaggtttggggtgcagggggaaccccagctgcccctgctctggccaggcttggaatcagggctctggggccagatcaggaaggagggaaggcaggtgagggcgtgcagaagggcacgtgagtggctgcccacctggaagacgccctgcgcatcggcagacacagccgcgtgcagcggggtgcgccccatgttgtcctgtatgttggcgtccgcgctggcctccagcaggcgcttggccgcgtcggagcgcgagtagcgggcggccaagtgcagggcggtctcaccagtgcggtccgtctggttgtgcaggctggcgccctggtagatgaagtccgagatgaccgcgggcgcgtcctcttcctcctcgctgttgcctgtctctaggccccctccgctgcaggaggcgatcatgaggggcgtgaagccgtctgcaggggggcgggacgggggacggggccaggtgaggaaggctggcccctggcagctgctcccagggataacagacctcagcggggacatggcccacagaagcccagtgcacacagccacactgcccaacgccagtgtaatccgtccaagctccccgagggcagaaccaagtcagggctccgcttcctgacttgcctgagaccttcacccaccgccctgtccaggagacacaggaggtaagctaacaggcactctggatgtctcaaaagacgcattttgaaagaagaaaccaactcagagcgcagagcgcggtttgagacctgcactccgggaggggaggccacgaggaggctgaccagctcctgggggttctcaccgcctccaaggcccagggagttttcaggtaccgaccctgaggcttgggacgggggcgggcgggtcaccaggtcagggaagcgcgggctgcccagcgccaccaggtgcctgggggtggagccctgggtggggggctgcggtgtctggccagccgcacctacccggcccgcggacgttcacatccatgcagtcggcatctgcctcgccctggggaggcgtgggggccatggcagacacgcgcaggtcagcggcgtccaggtgctgctgggtccactgccggtggtctgtctggtcgtccaggtcagggaggaccacgggctcctcgaactaaggaagggcgtggagcagagggtcacaccctgtggggcgagcggggcggggtggggcggggcggggatcctggagccccgactcacccggaacttcttggcctccaggccctcgtcgccccactcgttctggttgtcgtccatgagggcgccgtccgaagagttcttcaggggcctgggggtgatggggtcggggggaggtgggactaagcgcggggaccgggggtccacggagattcccctccccttccaggccccgtgcgtgcccagggccccaggaggggccgcggaggaggggagggggcagccccgcctcccgcaagcctggcccccacccagacgccccgccgcgtccactgacttgaggcccacggagtcctcgccgaggggctcgcgccgcttcttcttgctggcctccgacaccttgaagccctcggggaaccagagctggccatgctgccgccggcgcttccgcgacagcagcaccccgcagcccacgaagaacagcagcacgaaggccaccacggccacgtacatgaagtgcagcggcgggggcgggggcggctccactgtctcacctgcgggcacagcggatgcgggcgggcgcccggacatcaggccgcgcagccaggcaggccggcggccgggggcagcgcactggctccacggcccgtcgcgtcctcgcccgctcgcctccatcccgccccccaaaataaggtcattttctacgtgattaatcagaattgcaaactatcgctaaattctctcctgcaccagccggctatctggagacagcttttacttttttctcctttaagggagaaggattaggcaacttcaaatcgctgcactcgcatcgagctgttaagacaaaggatttagggggattttccagatacaaacttcaacacttcacatgacatcgatcaattctttgctttctctctctttaaaaaaaaaaaaaaaaaaaaaaccgtaatgattttgaaataatacccaacaaagaaaaatcgggaggaaggggtggggcgagaaaagtctccacccgcccccccccaccccgaatttgctggtggatgtgtggactcccctgggccagcctcacagacagctgttgctaggggagcgagagcatgccgggtgggaaaccccagaaaagcgctctccgaactctggatggcgtgacacacacccccgtgggtggcaactggtgcaaagaacaagagcatcctggggtggggggtgacctgggagacggcctcccatgcacaaccctcccaggatggtccagagctcccatgggagtgcggctgggggagcagggccggccactcactctgcacagcctcgatcttgtaggggatgttgaggctgcccagcgaggccagcgcacccaggaaggcggccacgtccgtggcgctctggaagcactgggaggacgactggacgcactgccggttgtcaatctccaggtagacgatggacctggggtggcaggggagagcctaggtcaggggggcttgggcgccggcccactcctggcgcccgcccggccagcctgccccccagggatgggctctggctcctgtggtgtcaccctgatggatgggcggggagagagggtgctcccagaaccccaggggggcagcctggggaggcggagagctgggtctggacaggaacaagcctggaggtgcacactggccctgagggcccgccgtgtccagcaccagcagggcacccacggtgctcacatggacactcctcagagtgctcccctgccagcagtggggttcctgcagagccccgggcagccttggtccccatctcgggaggatggaggtgtctggagcccggcccctcgcctccgtgagagccgagcccgggcgggaatgccatctctgccgctcgcccgtcacgggagctgaaatcccaggtctctttccccatctcaggaggacagcgctgccctctctgggaggggggcatccctgagggtcagggcgtggaggccgccaagaggggctcgctcacccgcggacgtccatggggtccagctccctgcgccggcgtctgcccgcgccgcctgggagcagcggggccccgccgcccgcggagcgcctgacggggtgcttgtgcagctcctcctcgcggccgtagtaaggaaagatcatctgctggccgctggcgtcgcgcctgaagaccacgttggtgtgcagcaggcggctgagctcgcgcaggaagtgcagggagcggtttcgcagctgctcgggcggcatgagtaccaccagcactagcgtgccaaccgccagccgctcgggcacgtgctccgcgcagtccagcccgtcccactcgcactccgcactgttgcagccctggtcgcagtgtccatccctgaagtggtccttgcagtactggtcgtacagggggctgggggcacatggcaacagctcagggctccctccgcgcccaggtcccccagggccacgcctgcccctgtccacccggaggccctcggccagcacccggctgtggcgctgccctgcctgcgaagcccagcgtcctcctcccgcctgctctgctcctgctggtgagcggacagccccctcgcctgcccccaccagccccgtgggacaccatggacgcttagcggcgtccccgcgggcctcacttgcactggccttctgcacgctggcagtcgaagccgtcgaagaggcagccggccgagtcgcactggctgtcgcagcggccgttgctgaagtacttccagcactgcagagactgtgtgcagttctgccaggggtcgtcgaagttgagggagcagtcgccgccgtcccagccgcacgcgtggttgttgcactgcaggctgcagaccttgttgccggcctcctcgcggcagccagggagctcgcaggtctcctcgatctgcggcggggggatgtcaaggcccacgccgcccccgaagctgtagtccaggatgtggcacaggagcccgttgaacttggcggggcagcggcagcggtagaaggggctctcagcggtgggttcacagatgccctggttgtagcaagggttggcacccacgcaggggctgctggctgggaactggcactcggggccggtgaagggacccaggcacaggcaggtggggctgcgcgggcccgcgatgcacgtgccaccgttcaggcaccgcaggctcccgcagctgcgggcgtcgttctcgcacgtggcgccctcgaagccctgtgggaggggccgcgtgggtgtgaggggtgagctgcccccccaagtgctggggacacgcctggccgctccattgcgccccccaccccccacaagggctggcggcctttccttttaaaagaaagtcaacacgaaacgctcgggggtcgggagggaaggagggaggggtgggcacagtaggagcctggggcacttttagggcaaactaacaacctcctgggatcctgcacaggggtctcatagcactgcgtgtgtgtcagaccgaaggaacacatgacatggagtggactggacttaacgtgtcagcgtatagatcacttgctgctgctgctgctgctatgtcgcttcagttgtgtctgactctgtgcgaccccatagacggcagcccaccaggctcccccccgtccctgggattctccaggcaagaacactggagtgggttgtcatttccttctccagtgcatgaaagtgaaaactgaaagtgaagttgctcagtcgtgtccaactcttcgcgaccccaaggactgtagcctaccaggctcctccgtcgatgggatttcccaggcaagagtactggagtggggtgccattgccttctccaggggatcttcctgacccagggatcgaaccctggcctcccgcactgcaggcagactctttactgtctgagccaccagggaagcccacaggagagcaagatgttaataacgggaaagctgggtatgcagggggtgaggctacacaggaaccctcctgcaccaattttctactaaaccgctctaaacataaagacacaagaaacgctgtctcgaggggaacgcggagggtggagtctggacacacgagccaccttttgccctctagcttacccgcaggctggaggggcggcgggatggggcggggaggttctggccacccccgggcactgggtgtgctgagcaggggtgtcctcctgcccccttcagaccagaagccctctccaccacctgctgcccatggcacctaccgctgggcatttgcagatgaacccgcgggccgtgttggaggccaccgcacagctacccccgttcttgcagggtctgtccttgcagccgttaatgaccgactcgcagcggcgccctggggacaagagtggcatgaggcactgaccccccgcctccagcaccgcccaccccccagaccagggcggcacccaccggtgtggccggcgcggcactcgcagtggaaggcgttgacgcgctgcacacagttctgggtgccacgggcgtcgcaggggttggacaggcactcgttgacatcaccctcgcagcgctcacccacaaagccgggcgggcaggtgcagctgtagccgcccacctggtccacgcaggtgccgttgttaaagcacttggggccccgggacacggggtcgatgggggggttgcagtcgtccacgttgatctcgcagtgcacgcctgcaggccaggcgccatcagatcccacgcggccgctctcaacccccacgcctcccacaggtgtgccccggccgggggtcagatgcccaggagctggacgctggcaaccagcccaccagactccctccccaggtgtggccaagcctaccctgtgtgccgcgggggcaggagcacttgtaggtgttggtgaggtcgatgcaggtgcctccgtgccggcagggctgggacaggcactcgttcacctcctcagagcagttcaccccgtggtagccgggcacacactgagggggacagcgaggcgtgggcctgaggctcagcaggcagccgggttgtggcccctacccctgtgcgggctgacggggccccgtgagctgcccccttgcctcgcaaagccctcctaccagaaggacccagatggagaccctggtaagggccctggtaagctgcggttcactgcccacggtgggagtcagtgtagaggcgggtggatctgggggaggggaaccccgccctactcctcggggtcttcctcttgcaggcacccccagaggacagctcctccaggcagtctttcctgaccacccagccctcccctgatgggactgaacgcagcacacgtctatgggtctagtcttccctgccgcactggctcccagcccagggcctggccctccgtggcactcaggccagacacacacacccccgccccagggacgggtgcccacctcacaggagtagccaccggggtagtcggtgcaggtggccccgttctggcaggggctgggcgagcactcgtccacctgctcctcgcagtagctgcccgtgtagccggcctggcagtggcagtggtgtgtgttgcccgcgttcatgcagaggcccccgttccggcacaggtgggtcacgttgatgcctgcaggggaggcagcgggtggaacgtgaggccccagctcccctccccaggggctgcctcgcgccgtgggcagcacacctcctgacctcagaggtcggacgcctggtgggcacggagaagcctgggctggttaccttgctgccgcgcggccacctcgcaggagacgctgggcacgtcacagtagaggccggtccagccgctgtggcactcacagcggtacagcgcgttggtctgccagcaccggccgccattcttgcagggagatgagtcgcaccagcgcacgagggtctggggacgagggggcagcctcgctcgcgccccacccgccagcccccacgggcccagcccacccagcggcagacacacatgggcgccagagaccctcacgcccaaggtggcccgtgacctccccccagtccacagaagtggacaccgaggcccacggggtctcccctgctcaggagcaactgcagctgcgggggcccctctcttgctctgggcccttggtggtgaatccagacaacaggctgcctttccttgaaggaagatttttcttaagaaggaaacagctctcttctaattggtgttttgcgtgtgaacatctttaaagaagataaacctctgatacttgtacacagtctccatgaaaacactggcgtttagctgccttcccccgccaacagctggtcctttttgctccctaagcctctgctacctgagctggaaactaccctgctcaccacctctgcctctttatctgccccctgctcggctctccagggtaggagggccagctggaatccgagcgaggggccccgccgcgtggccaaggtgcctggcgtgcgcgccggggccggccctcacctggcagttgaggcccgtgtagccctgtgggcagcggcacttgtaggcgccgtagctgtcctggcaggtgccgccgtgcaggcagggccgagagtcacactcgttgacgtcgtgctggcagtagctgccggtgaagccgggtggacacaggcaggtgaaggagttgatgccgtccacgcaggtgccaccgttgaagcaggagctggaggtgggcaggcagcaagggggtggtgagttggaggcaggaccctgcccaagcaggtacgtccatgccagcaccctcaccgccaatcagggtggccacaggggtctgggtgccaggacaggccggcaacagcctggctgacctcagggaggccagaggagtcccaggggaccccagactctcacaccacaccacaccacactccttcctctgccttctttagaactcgtgctaagaggagcttcatatcgcacacaggtgtgtcacgatcaagacaaaaatgagcagaaaccagactgcgtgggagataaatgctagaaactggggataagtgtgacggtccatgccgagcttcctagcagccaaggcaaatgaggacacacgccagttacgaggtccccggctgatggaaggaggaacagcagttcctgaggataaaccacagggctcctgcttctaagccacaagggagaatggacaacggccctttcaggaggagcagtgtctcgcactggcaacaagtgcccacccccaggtggacacccgctgggtacacaggtctgctggcgctgtgcatggccccgtagccggctgcatgcacccgtggcccctcgcacctctccgtgcagtcaggcgtgttattctcgcagtggatgccactgaagcccgtggggcaggtgcaggtgtacccgtccacgcagtcagtgcagttggcgctgttgcggcaggggttgctggcacactcgttgatgtcctcctcgcagaaggcgccctggaagccaggcaggcagtcgcagaaggccgtgttgacgccgtctgtgcaggagcccccgttgtggcatgggtctgcgaggggaccggagggcaggcctgagagctgggcacctctgccagggcgaccaaagctctgggctcctagcactgcccccagggttttctgccgggagcccagtccagcaggctgcattgtgagcttcgggtgtacgctaccccacgagctcccggtccccaggccataagggtgggcaggcttaacagtgagacccacacaggccgtggccacaggcttccgtgcctgctggtaatgccagataaggtacttggcctctcttggaccccaggtcgcgtgagccccattcctcaggggtcaggacaagaactaggttaagagccacgctggacggggcagctgcggccccggggagaggagcccgggagtccggctgggagatgctaggatggacgagttgggggcccatcagcctggcaccacagccccgggaaccgcccgcgaccacctcgctggtcgacagcagccacccagccccgccccagcacttcctccggcccccaaccaggtgcccttccgaaaggtccagctggattgagagggctgccggcgccaagcctgcacccgggtactgccctgcccagcctctcacgtaaccctggcacactccctgccctgcgcccgcctggggacacgggtctggacgtctcagaggcgggcggggccggccagccactcactgggccggcagtcgtcgatgtccgtctcacagttgcgccccgtgtagcccgcctggcagtggcagcggtagccgccattggtgttctggcaggaggcgcccgcgcggcacgggctcttcacgcactcgttgatgtcgatctcgcaggtctgccctggggaaggggacgggggagccactggctcagccagtacccacggggcactgcccgcccccccggagcaggccctctactgccgcaggacaaccctctgggggcgtccagggaaggggggctctccaaagggctgccccctgacttggggccaagcaggagacagaccttcaagcctgggaggaccccgcagcccactggttcatcccccaaggacaggggctcactagcaagagtcgcctgaagctcccgaccctccccacccccgtctccccggcccctgggctcaccctgccagcccgtggcccccaagcctctccgagcttccccaccccatccccctgggctcaccctgccagtctgtggccctcgagcctctccgagcctccccccacccagtaccagcgtcccctggactccccctgccagcccgtggcccccgagcctctccaagcctccctatgtccccccaccccctggactcaccctgccagcccgtggggcaggcgcaggagaagctctcatagtcctctgactcccgacactcaccgccgtttctgcagggcccgggggcacacggggccagcaccacctcacacgtggcccctgggagggaggggcagggtgatgagccctccgggagccccggccagaggtcaatgccccgggcaagtcctgacagaggccccggcagccactgtcaacgggtggttctaccgtcaaaacacgtctggttgccctgcgtgggggggtgagggggacatacagcggggcactgggaccctggctgtgtgagcgcctgaacgtgaaccaggggaacccttgggcccccacaggctgggggaacggcctgggccccaccccccgatagtgccaggagcaagggctgggctgggcctgacaatccccccacccacgtcgcaggggccctggaccggctcccagcctcgtgccctgctgatggcagagggccccgcactgagccggcggcctgggagctgagtccaggggttcggtgcctcgggcggctagtgcccatctcaggaggcccctgaaccaaggctgtgactgcagggaacgtgccagcctcagccctcaggatggctgcttatcaggggagcactggacacggcgtcaggaccccgggtgggagcgggagtctgcctggaccccggcactccgggtgacctttcctccctgagagcccaacacggggtttcctgtttacggcccacggggccatgtcccgagcccgcgaggaagcgttatcttcccggccgcctattatctccccggcccgcaggggtgaccgtcccgggcctttcattctatcggtttccacagtgaccccagccggcaggaaattcgccagggtttccgacaattgtgcagagggaagcaggaagcgggcggacgggaagcgggtcagcacaggccggcccctccccgccggccgccagccccgatggcagcgtgtccgaaagggactcgggtgcgccctgggcggccaccggggagggggcgtttcctcaccggcggaggagagaaagtccaggtccccagcttcagtcaaagaaaacactgctcgggccacaggccgccagtgtcgtgagaaccgcagtcacgggccccacccctgcctatgggggcctctcaggaccgtccccaacggcagcactccctgccccatccccggggggcctggtggcctgagcactcgtgacttccattttttaacacttgccaaatctctctttaggaggggacccacatcccgcctcccccagccgggccaatggcggcagctgagatgccagggacccgtctcccgccactctcagcaggaacacagggctccttgtttccccacacaaagagggcccgccatcaaaggactccctcaggcctcgccagcgatggggagggcagcctggcccccctacccccagggcagcctgaacgacaggcggggaggctgacagcccagacccagctccaccgccaagggggccaccctcccaggcaggtcccccaagtagggacttgcttgtgctcaaattttctcccaggcacctggttattttatgagcaaagacacctgcagggcaaggccctaacgcagccaggcctaaggctcggagtacagagcagggcctctgggatgcctgcagagggatgcagacaaggccagcccaggaaggccgcctcgcacctcagccacctgagccacctgccgaggccccgcccctgccctccaggccccgcccctgccctccagaccagcccacaccacaggccccgcccctgccctccaggccccaagcgcacagccccaggccccgcccatacctgtgtagggcaagaggcagttgcatttgtaccctgccacgtcatcgatacatgtgccctggttcagacacgggttggacgcgcactcgttgatgttggtctggcagttgggccctggagagagagaaaatgcagtcggtgtagccgtcaccccaggtgctatggccaagttctgcctggcatggagaaaaagccctgcactgagcctggggcctgggaacccacaccagccggtccaggagccaccggggttctcgacggctggcgtgtgtctgggctccacgcggcccccagggcctgcgctgggaccagcagcccccatcccactcaccactgaagccctcccggcaggcgcacacgtagccgctggtcatgtccttgcaggtgcctccgttgacacaggggttcgactcacactcatcgttgttgacgtcacagttggccccactccacccagggtcacagtcacacttgtacctgcagaggcgaccacacggtggctcaggtgtagccagagagggcggggcctaggctgggagcaacccagactctgccaccgtcttacaacctgattagatggagacactggtcccctctgacccttggagtcctttaaacgactttaaatagcctgcctcgactaagacagtggtaagggtttgggacagtgcccagttcagagcagtggtcaggagaccatccactgttcacttgctgtgtgaccctgaacaggcagcttaccctctctgtgcaaaacgagggcgtgtggtccctgccatgtccatcaccccatttagacagagccaatgccaggcacgtagtgggtgtcggaaactaaatgtcagcttctctacactctaatattctggcaccacatatatgggcagggttcccacaccagctgggtgtcccgcaacccagtcctggccctaagtgcctggagtcagcaaagactgtccccccaccccccagagagggatgggacccaccagactggccccaggtcagacactaaccccaagccccaagttgtcacctctacttctgaccaaacagccaggaaccagacctcttcctttgaaatttgcagaaagggctcacgaaactcagaaaaactgtttgacttactagatcaatggtttactatgagcaggaaaacttggaacggcccagtggaagagacgtacggggccagggatggggaaggctcagagctggtccccgccccatcccagcacctgttcgccaacccggaagctctctgaactcccgcatttggcctttttatggaggcttcctcacacaggagtgactgaataagtcactggccgttagtgattaacttgtactgcagcccctctcccgtcctcacggtcagggtgggacggaaggccccggcccccagcctcagcctcggatgaccttagcagcctccttacggaagctcagtggtggtttagttgctaagtcgtgtccagctcttgcaaccccatggactagcccgccaggctcctctgtccatgggatttcccaggcaagaatcctgcagtggattgccatttcgttctccaggggatcttcctgacccaggaatcgaacctgggtctcctgcattgcaggctgattctttaccactgagctgtggcccaaaggggctcagacacgacccaagacaccccttccactctcagagatctcagagatttcacctctggtctgccgcctcggcacagatgtgttccccgggcacccgcggagccgagggcagtgctgggctcagaccaggagccgagtgagcgcccgtgcatggcacccttcagggctcccacagcagacccgtccttggggagcacctggccgctccgcccaagacctgctggctccccactcctacactccccgcccccagggcggggctccaaggacgcacccattgaggctgtcgcggcaggccccgtggatgcaggggttgctgctgcactcgttgacctcagacaggcaggtggggtcgtggtagccctccgggcagcggcaggtgaagccgttgatgccatcctcacaggtgcccccgttgtggcaggggctgtccgcgcactcgtcaatgttgatgttgcacatgctccctgcggggggcccggcagctcagacaccaggaatgggagaggggccgggctccctgccctcggagcctcagtctccctctccgcgagcaaccccgccccccactccatcccaggccctcccaaggttcagactctcaccgagggcccacgctggacgcgctcggggcagagggcagcatgtgcaccggtagcctggccccactgcgggcctgccgggctgcttctcacccggcatgccaggctcaaggatgtccaccccagcgtcagccagacccaccccccacccccgttccttccagagcctctgccgccagctgccaaggctgctggcctgagagctgggcccccacagtcccgagaccctgacctgcgagcgcagcttcagcccctgaatcaaagccctgacgcgggcggcagggcagagccctccgcaggcccccgaatcctgggcggctcacctgtgtagcccggctcacacgcacactcgtagccgtcaatcttgtccagacaggtgccggagtcgcaggggttgctcgcgcagtcgtccaggttgatctcgcagttgggtcctgggggtgggagaccagaggaggtcatgcgctcctgctcgctcatcctcagcttcacctatccgcccccaaccctgcaccagcccggggccgggcacctgtggtccccttgaggcagaagcagaggtaggagttgtcacggtcctggcaggagcccccgtggcggcagggctggctgtggcactcgttgatgttggtctcgcagtggtggcccgtgtagcccggctggcacaggcagctgaaggtggccacgccgtccttgcaggacccgtagtggcaggggtcggggtcacactcgtcgatgtccacctcgcagtggggccccgtgtagcctgcaggggcggggggccactctctgggttaccaggctgtccaggacaccatcaagcagacccagggtcctcttgttcccaccagggaagcctggggatgtctggggcacgccccccacctgcctggggtcagagacgcaccctgctcttgttcccctccaggctgaggggccacccctcagcttcagcctctgaccagccccttccccggaccccaccgcctgcttctgccccccccacttggcctggggtcacagccccgcaccttctgtgcacacgcaggtgtaggtgttgggcccgtccaggcacttagcgccgttcttgcagggtgtgctcgcacactcgtccacatcatactggcacaagtgcccggtgaagcctgtggccagggaggggatggcggtcagatgccaggggcacaacagcaccacagccaagccctggctggccaaggtcggggggcagagggcgcccaggaggggcccccgagagtgctttggccagggctgggcaaatggcaaatgcccgtatcctttccttgccctctttcagagcacatccctggggtcctggccttcctgccctgcccccttcagaggaggctcagcccaagatggatggttgccatggctacagccgggctgggctgagaattcggttcctggctaggcgtctgggacagttgatttgcatctcaggaggtccagggctctgaccccccaacacctccccgggcctggcgtcccccagcccttccctgcgacagactctgggccctcacaggctccatagaccctcctagccatcaattccactgccgctggcagaagcaagtgggtgcggcaggccagccctcctcctgccggggcacgaaggcaggaaggagggtctctgggccccgggcttctcagcgaggtgggggccaggaaccctgcccggcccagctttgtcccctgggggctgaaaaccaacccacccccgcctccccacactccggaggtgaggctcttaggcgcccttcccaccgtgggggacctgaccggctctgacgcaggggcagggttgggggacctgaccggccctgacgcagcagcagggtgggtggcggggccgtctcacccgtggggcactggcacacgaactcgttgaccttgtccaggcagcggccgttctgcaggcaggggctgctggcgcactcgtccgtgttcacctcgcagtgcagaccctcgtagcctggtgaagcgggctggtcagcaacgcccggcccctaccacacctgctccccggggccgacccagccgcccagcgctcgcctgctctctactgcgcccagagaccaagctcgagcctccccagataactgtggggaggctgcggcttgggcggacatggaggccgggggcagaggcgatgcggcttccgcacccccagggtcgggcggccggccggccgcgtaccaggcatgcagatacactggaactccccgatctggtccagacaggtggcgtcgttctgacacgggttcgatacgcactcgttgacgtcgatctcgcagcgcgggccggtgtagccctgcagacactggcactcgaacgagcccagcgtgttgatgcacttgcccgcgtgctcacaggggttggcacctggtgggggcgggaggggggtggtggatgcggcacgggtaaggggctgctctgggaatcctagcctctggaacagtcgggggtgtgcctgcctcccccatcagacccgcctcctcccatcggactacttccaacaggttccccagccccccggctgcccgtacccagcgagcactcgtccacatcctggctgcaggccggccccgtgtaccccgaggggcaagtgcagatggccttgccattgacggggttggtgtcgcagttggagccctcattgcaggggttgctgatgcaggcgtcattcagatggcacagcagacctgggcacggcggtgggggtcagcggaggcactgtccccccacctcctccggctgggaacactgcccacacccggctccccagggaggtgccccgccaggacacagccagtgaccctgtggagggccctacaatgccggagctattccgggaggctcatggccagccgcttcacaccaggaggcccctcttggggttccccccttacaggccccacaaagctgcagtgtgagcttctgtgtgaggcccctcgcccaggcctgaccccccagggccctccgcctggggacaggctgggtgctcacccgtgcggccatggggacactcgcagtagaaggaggccacgcggtcgtggcaggtggcgccccggaagcaggaggcgctggcgcagtcgtcaatgttctcgctacagtctgcacccgtccagccgttgacacacacacagttgtagtcgccgtgggtgttgtggcaggtcccgccgttctggcaggcattgggcatgagctggcactcatccacatcctctgtgcagtactgacctgcggggcccgggacggttggtgcctctagcccccgccaccaagccgagaccctcacctcgaccaggaagtcttcctgccttcctccagccccgccagccagagccagcctttcccctgcacccctggcacctgggggctcttgcctggctggtccgtgggcacaggtgcactggggtccaccctcacctgtgggcagggcctgtatcctgctggccagcatccctgtgtcctggccagcaagctgggctcaaaccggggacctgactgtggccaggccagcctggggccaggctgcaaatggctcacacagacgggctggtgccacccatgtctgtgctgctccagggggttggggggagcctcagaccctggtgggggggggcagtcagctgcaggtcacagcatccttctcatctcagatctcagctcccttctgcctgccccccatggggacagactccaggggcagaggtgcccccctccgagccgcccgctgtgtgcacctgtccactccggggggcagcggcagttgtaggtgttcacgccgtccacgcaggcgcctccgttcttgcagctgttccctggacagtcgtcaatgttttcctcgcagttctggccagtgaagcctgcagcaggggccagtcgcccggtcaggcctccccacggggccaggccctcaccgtcctgtcacgcttgcactgggttctggcaccctcctggctggacccaggacaccctgctctgggcgccgccttggagccctcggggtccctgccctataccctgccctcctcactcctgtgaccgggccgcacaccccagagccgatggtcagcacattcctaagcaatcgttttctaaagggccggctggacagacggggacccacggtcacaggctccccggggttctgtcagagaagacatctgcgctatggcctctgtgactgggcactgcctgccggcccagccctgtgttcggggttgtctgcacacccccacgtgtggctgcggataccccatttgacggggcagcactgggcctgggagcccccacgcacggaactagagcagggagacagagggaccctggcaggcagtcgggggtgggggtgtgtgtgcaggtgcggcccccagacttcccagcagcagaggcgcaggcagggtggcagccccccaccctctccctgccctctcccagccaggccaacttctgcggcaccccctccacgtccagtcagttagctattaatccgttcgactcccgctggttcaataatcaacccagaaaggtgcgtctggcaatagccaaacctgcagccggttactaattaatgcccctcccggggcgcctttggaccctctcctgcccctccctcggagggcctccccactggagcctggcgcccacactccagtccctcctgcatgcggcaagcctaaagcgccgcctctccccagcctcagctcacctccggccggtggggccacacctgctccacgtgtgcagccccctctgccaggcccccacgcctcccactggccccccccagcccgcaccacagcccctcctgaccctggggtcccacagcccaccttccccaggaagacatctgaacccagaccccgaaacagccacgcagcccagctgggcagtgggtagtgccggggcgggcaggtggcgaggggagaatcagggaccggaaatgcacacgcctggcgtctgcacgcagaggcaacaggcccgggacttgcgggcgggaaaagcacttcctctttgcaagggccgggctgggcagagggccgtgtgggggccagagcgacctttgggtcagtcctgggtcagctggaccctgggccctcccctctccagcaacccaaaccccaccgaccccacctcctcatcgccccgccccaaaactccctccccttcccagtccctgcctaaccgccccgtgaaagtgacagactggaggctttcgaacctcttcatcattatcagtatttttagatcatcagcagcaaaacggactcagaagaaaactaaagtggaaagtctgggacatgaaacaggaacagtggagctgctagggggatggggagggctgggcccacctgtcactcctgccccggcagtgggcggcaggagaggccaggaggaagcgcccccacggggggaggcacgcgtgagccccggcccccccccggccccaccgccaggaagcgggaagccccgcgggcaacacgggtgagggtgctccccgcagcgggggagagttctgcagtgtgcacgtggtcccagggagctcgggataaggggcctcctggggggcctgaaggaggccggtgtccacggcccaggagactcggagcagggggccaggagagcagagtcaccccagagtggacggaatgctcaggccctccctggaggcggcagggtccctggcacaggggaggagcactagggtgtcacagcaggcctgtcccggggcggcacttggtgggtgggtgcccctatcccagagcatgccccacaccacccctaaggctgccctccaaccgcccgggctcgggtgacgcccccagacccagcctgcccagctccccgccccctgcacgcttctggcgggcagtacctggcaggcaggcgcactcgtgggtggtgtcccctgtggggcggcaggtgcccccgttctggcagggggaggggctgcagggcacgtagggcagctcgcagtgggggccggtgtgggtggggcggcagacgcagcggtaggagccgacctcattgaggcaggtgccgccgtggtggcagagcccggggctctggctgcactcgttgacatcctgcctgcatgtggggccgtggaagccgggcgggcaatggcagatatacgacgcctcgaagggcaggcactggccaccgttggcacaggggttggaggcgcaggggtcggcttgctggcacgtcttccctggggggcagggggccggggtggggtggttagccggcctccctggttcctatgagctgggggcagcgtccagacctggacaaggggtgagccgggcatgggcccagtggcatcagctcctcaccacccagggaccccaaccacttaggggctgagtgaccaccgtgggatgcacagtaggccagggcccctggggagctgacccagactgcgtccctcctgagccggcggtgacaccacggctcctgcaggggccgggggagtctccccttttctcacagagctgcggcaggggggtgccctcgagccaggaactgacgcctccagggctgaaaagcggcatggggacccccgagaggggactctaggcaatttctggatcgctgacccccacagccgagcccagtccaggaccgtccacggccacgtggacgggggccgtcattggcggtgtgggcggctggaggaaggccactccatccccgcaaccccggggtcctcacctgaccagcccggggggcagaggcacttgtactcggtgagcgtgagcaggtcacaggtgccgccgttgaggcaggggctggcgaggcaggcgtggtcgcggggcgtcaggcacagcggccccgagaagcccaggcggcagctgcagacatagtccaccaggccttctcgctccgtcgtgtggcacgtcccgccgttcttgcagggggcactgaggcaggggttgggggcctggcattgctggcccgcgaaggccccactgcatctgtggcagacacaacagggaggtgagcgcccactccccagctagcccgccaccagccccggcatccatgggggtcccctcccgggcagcggcccccctcaaagggcccagggaggttctgggaccacagtgggggtcattgcccaatatcaccagggtgccaagcgccaatgagctctccgctttaaagtggttcctattacatcaagggaatttcatgtccataaaaacagtgattacgttaattggagacattagagaccagagtgtttggcgggccccagcgacggtttcagaatccatggaggcgtctgtctgcaccagtgagccacggagaaggggccacgcgggccagacccagccattctccgtggaagggaatggtgttctgtgaaacattttgtttcagggacctgcctactctctctctctccagcttttctgtaacgaatgtgcgttatttgggtaataaaagagttcgcagattgctcttctttcagtacgaacacgagagcaaacagggcaagaactgcagacaccacgtggccgggctcccacatagtcgccgacgtggaattctctcttgggggtctgacgcgacaggaccgcgctgctcagtgctccaccctcacccacgcatggtgcccagacacagtctctccctttcgggggcgaaggcttcacatcggaagcccagcctgctgcacagctggagaaagcagcggccaggaagaccgccgctgcggcaggccctgtgccggctcccaggctaagacggcagcaggtaagccgggagtggggggcaccttgcccccacccctggccacaggcctggtcccaggcgctccccaccgggaagggctcggcacctgccacccccaccccggggccgcccttggccacctgttgcctcggcttctcgaggcagggcggtacactgccccccagggtcacctcgtggccttgcactggagggaaagcccaggagaggctctgggaccagccaggcctccctcttcccagcggcagagcctctggggtggaacgcacctgcggcccccagcctgcagcggcctgggaaggcagccctgacgctgggcccatagccccaggcaccggtgggcggggcccccacccccacccccaccgggcagccacggggaccctgggggaagagagggccctcctgggctccgaccatcctaccttcccgagacccgccgccccgagaagggctgctccgtggggttcaggccttcactccaggacccctacccccaacaaatgccagcccgccagggccccctccctcccctcctgcacaaagctgcacagggaggggggcgggggatccgtgagaagccggggctttcctctgaggctatggcttgggcagggcgggcaaggagaacgcaaaatggccactccggaccaccatctgtcgcctgaagccaaaagtcccaaaccaactggcttaaagaaaaccagctgcccttctgggaggggcgcaggggaggtaactcaggcctgagccggggctccagcccagctggctcagggagggggaggaggacgggtgtggctggctcctcttcgggggcacacaccccaggatgcaccccctgtgcgaccggcaccctggcaccccgggctccggcagggccataccctggagcctggggaaggtggcgtggcccccactgagcatggatccagttacaggccgcctggtcccagcctgagtggcactgggaacccagagccctggaggggagtggggagacccaggaggtagcccctcccccacctctcaatgccctccattgtcaggcaggagctggccaccgctcccggtggagaaaaggctctttttttttctttttccccagctactgaagagcaggcagaaagtgggagctggacagaggacgcttggtcatcaaagcggggtggggggtgggagcccgcctgccctgtccacacccagctccaaggcgtgggaagcccacccaggtgggtgagatgaggcaggcctgccccatggcctgggggaaacacacacaaggctgcccagagcgtcctccgtgtgggctccaccttcatcactggtccggttcagcagcgttcccaagtggaccagaaaggccccaccagggtgcacaaccctccagcctccagctacagggcagtgtgtccctgaaccccaccccaagcccgtcctgaatggggagcctaacacagaagactgtgggagaatccacctggattgagagcatcctggccaaggaggctgcatgaattacagcaagaggaaaagcgcgcccagtagatcaggctgcagcagcagggacaaagggcggctggggagcaggtgcgcctgtggccggggacgcgggcggcagctgctcccggccagcgcagcggcggctgccagccccggcgggcggggggcggggcaggagccagggaggctcctccgtggggagaaggcagcggctgagggggcccattgtcctccctgctcccgcccaggcctggtggacgctgctgtgaaggcacgttgcccgtgcgggccggctccagggctgggcctggccgccgtccaccacgaacaccccagcagggggaggggcagggtagcgagggagcggcagcctggggggggcgggggttgctgctgaggcaggtgctggggggggggtgctaggtacaagcagggcctggcttaactccatgggaggacgcctggggccaggtaggtcttgaggagggagggggtgggtaggcagggtggaggggccttacaggccatcacagaggcctgtccctgctctgggcggcctccggccatgccccccctcacctagacgtgtctccacctgccccccaccctggctgcagtgctggggtttcctggggaggcacccgtggcactcacacttccctgagaaggtggaggagggccggtgaggctgctcagacgcggccagtctgctgggaccagcgaccaagtccctcgtggccattccgtcctgaacacctgtcctggcagctcgacctaagtgcctggcggggacaggggcccatgcttggagggcaaagtcgcgcccaacacctgcctcaggattccgggccagggaccgtcggggaccctgaggctggacgagaaccgccccatgcaccgtgccactcagctcctggctcccgggggcccgtggcagcctccccttccttgcgcccctctggaaggcggcctcccagtgtctcctcctctgctcgcctcccctccggcccacacagagcctgacggggtgtcctggcccaccacggcgagcagcagcagagggtcaggtgtggctgggggctccaggatcagagctgaagagaggcggcacacggagtggggggcggcagcgcggaacagctgctgggacgcccgcccgtcaccggcctggagctcattggaggcttcttcagtgtttcctcctagccggctcctccccccacgcccccaccccccagcgccgctccatagaaatgcagccccagaagcgtccagaggcagatgctgccttgacctttcaccccttcacccgggactaatgctaaatggtgctgttttcctttctgagttaagcgggccatctgccacccccaggggagagatgacagctccctctacacgcagttcgcagttcgaaggcgggactcagcacagaggaaggactcactcggtctgcccttgagcagtctgtggttgagcaggggggttgagtggggcagagctgggtgagcacagggccctggccgggtgggggtgcggactgggggtcgttggggggtgtgccacccccttccttctgcaggccagacagagtcgccccaagggagcgggggacaccaccgatggatgggcgagacggtccatcagagcttttggggggctctgcggcacagatgggcactgcctgccaggcctccgtttcatgcgagtcaggggatcaagggcacagaaagcccggtgcagaggcggcctgggcatctggagcacagtggactctcactctagccaatactgctggatttgatttgcacacagttcaccgacgtgtccctggggacacggtggctccaccagggtccgtgtacctgcttaaggaaagccgtgggggacacaggctccccagcaccgagggccccactcgaccctgctgcctggggcctgggatgtcagcacaagagccggtaatccatggctgggggccacatctgcaggcccggggcctgtgccccaaaggtgggcagggactgtgccacccaatgcagacggacagctctgcaggtccctgcccccagccatgcatcccatgtccctggggggctgagtcagggcctggggtcctacccactgcagctgaaggcccctcccaccccccacgcccggccccagctctgcctgcagtggggtgcctgctagaagaccctcctcacaccagcactgcctcgctcacaggctttctgcccaggaccctccaacacaatgttactggggcccggaagagagggtccagggagcaccgatggctcgtcagggtccccccctcctccccagaggtggtccaggatgctaaacaaagaccattaaggcccactaccaggcaggcaggcccgcccacctcggggcagcttgaccgggaggttctcagacccccagcccagcccaggcaactggggccacttgcagaccagaccaggcagaggaggctcctgcccgcttatggaacaggaagactgaggccaggagagagggggctgcattggacagactctgagcccccagctcttccctcagaggggccagggtcaaggagtctacttgtgctcctggataaggcttgccaggggtcctgggcccctctgggcagaggctggttcaagggccctgaatcccagtgggaaatcacagtttccaggatgctgtgttcgtggcaggttggggggtcgcgcagtgactgggggtggtgctcagtggcctctgctggtctcccccactgtgcccacccaccatgcccatcctggggtccttccctactgggcaccaccaggacagctcagctgtgaggaacggagcccctgggagacacaaaagccaggggtgcccgggaactccaacgggcagcgggcggggctccaggtttctctcaaaccctcagcatccttggtccagaccactgtctgagccacgaactctgctgtgcccgagggtacctggacgacagccctctgccctctcctgtctcggtccctttctgcttcaggcagggtgtgcccagggcagcccggagcctggccagccctgcacgggtttggaggccacagtgtgagacctcactccaccacctgcagccccaactgccccaggaagcgactgcagggacccggctggtgcctggctgagctgcagtctgcttccagcccgcatggcctctgggctggggcggctcagagctgcacggggagggcgctgccctggctcccaagcttcagagaggaggtgagcggcagccagggctgctgagggatgggggaccccggaaaaggaccagccaggtctgaggcagacagaccccaatccccaacagcagctgaccctcagtggagaacaggcagcagccgcagaggaggaagggggtccaggcggggtggggcgtggagccggcgggcccagcagctcccggctcagggctctttgcctcttttctcccaagttgcacctctggatggtttagaataggctggaaagaggaagtgcaggagcgcggggaagccctttgtgttgtgtgtggacggaagcggtcctccgggaagccacctttcccactgcggggaaaacaatgcttgcggctcgccacccccccgccccgcggcaatcagagctgccccaccctcgacgtgggaagtggctgcccgtctgaagggatggaaaggcagaggtcaagcggcttcctggaggtggcccagctgcagtgggcagagaacaacccaggcccacccacgggcgggcacaccgctgcttggctggcccctctggacattgcaaaaggcacagccaacacgctgtcccgagagccctgggggctgctgggcgagtaagaaaagcctgctgcctcccccctacccccgcggccctgctctgctgggttaattccccaaccatcacccccaaagatggagccaggagctggacaaaggtgggaatggatgtccttacccagggctcaccccaacggctctctgagacccacgtggtcgagcctgcagccccacttctgggaggccagggagtggcccctcccagctgccagggagctcggttccccacaagacggagctggacccgtgcccccagacactggatacaatgaagggatcgatgagcatgcagccggcgccatggggggggcggtgcgcttaatccaaactcgattaattaagtcagcaaccacagactgagatgggagcaaagccagaaacgaccctgcaagtgcccgcctctgctcggctgtgcggtggtgcggggagaggggaggcctgcccagcggctctcccgtcctctcccgctgacaggagtggacgctcggggcagccccgcttcttcccattctccagttgtgaatgcagcgcgggagaacactgaggacccccctcgacacgggtcccagaaggaagacactgtggacccccctccctgctccaggacctgtactcaggctttatcttgtctctttctcaaaatggccctgcagggacactggcccattgtacaggtgagaaaaccagggctctggcaggttatgcccacggcaccacctgggtttgaatgcagctgttaacctttgctgtccccagtggtggccagatgccaggccctcagtgtgggggtcgggggcagcagagcacagtgccccctggaggcagctgggaggccagcaggagctccctgggtggaggagggggtgtgggccctcagcacccccattccttctccccctccccctcccccaccccggcggcctgggtttctcgcctgaccgcctgatctcccagaccgggagggccggagcagacaatgtgttcttacaaccccacaagatctgctgaaactcaaaaccctggattggaggtggaggggagggtgtctgggtgagaagcctgggaattggggagctcccagccggcgcggtggggctgccctgggccccggcttccccgcactccttccttgtggcaggaggggtcccaccaacgctggacacctgtcaccaccctcagccacaagagctcatgtggccttccttcctgtctgttcggccctagggacagacaggaagcatggagcctacagccgccggccgctgggagggccagcagagagtgggccctgatgaggctcccatgagaccctctccctggatgcctctcccagctcaggctcaccatctgcccagtccccaacccctgcccgaggcagaccaccaggccctgtgtccccaggcttgcccacaagcccgcggccgccctggcccccaccccaggctcagcacagtcaccgaggcacgggaccacggcagacaccaggagacacaaccctggcagctgcacccaggccggcgtggacctgctgagagacagacccgcactgtcacagcctggggacacccgggcagcccgggcccgctggtgtgggcctagggctgtctgggctcaggcgagactcttctccacggggaaagcagaaggttcttgggctggccacgaccttgcgcccttccgtgaaagtgaaagtgaagtcactcagtcatgtctgactctttgcaaccccacggactgtagcccaccacgctcttccgtccatgggattttccaggcaagagtactggagtgggttgccatttccttctccagggtatcttcccgactcagggatcgaacccaggtctcccgcactgtaggcagacgctttaccgtctgagccaccagcgcccttccatgacctcacccaaatctggggctgggctggtctcttgagagccttctggacgaggcctgggagcactgggaacaggcccgcgagtggagtgaagccacgctgatatgtcccattgggacccacgtgtgttactgtttccaggggagctcagaggggcgagtgagcagcccccggtcacatagcccaccgtggcctgcgctatagagtacagcgctctttcagcctggcgggagcagcgagctggaacagggccgggcagatgacgtggaccatgcctgcctgtggcctggaggccaggccttctagaaacccggatgggctcagctgggtccacccctggcccaagccacgtcccagatgccggccgagcgccgtgctgggctgggcctgggccccggacccccaggcggaagccgtcatggcctgaggcccctgccactgtggacaccgggacacacagccctgcctggcctccccctccccaatctggctctcaatcaggcctgaggccaccctcatcctgagccctggagggggaagtgaggggagccccgccctgtggggccacccctgggagccggaaccagcctggcgagagcaggagagaccctcaggctgacccggaaggcccagaggcagtcacctcccccaaccctctccgtggtcggaggggagatggaggccccgggggcggaagtgtggccagcaccccccacccccaggccccgcctcagcccagccttagctcagcatctctcgtactgaaaagctttcagggaaagacacacacactcaaaactctggcttctcccccagacctgtcatttccagtaaccgtgtagtttccgcttaccagcaaccgaaaccaagaggaaacggtgggaggcaggtccccgaaccccgggtccccgcgggggggccaccgacagagctctccaggggcagccgcccacctcctctcacacgcatcccccggtgggcccacgaggacccgccagggccccgctgcctgtccagcaggcctcctggggttgggcagtaggccagcggctcagctgacccaggatcaagaggcgaaggaagcaggaggccggcagggtccccggaggagggccggcctggttcccacgtgtcaccccgagtgcctgcccagcctccagtggcctgtcccctgtacggcgtggctcagacccccagccctcctcccggcccgcagcccagaccctaaggccgacgtgacgacatgggacttgcctgccccaggcctcggccgggctgggggaggctggactttcgtgctgcctgcagggcaaagagtttgctcagcaaatcagcagtgtcaacagagggacgagggaccgtttacccagcggagaagagcaaccgattcaagcacttcagagacaccagacaggcacacaagccctgtgactgacttgtcccacgaggactcccaggttgaggctggtggggcctggcgggctgtctgagtgcctctcatgtttgggaaccgccacgtgggcgttggaagtgcggcctccccagggcacccccccgcctccaccaaggcttgctgggaaccgggaccccggatgcaccttctaggaaatggagcaactcaggtgcaggaggctcaggtcagacctccagaggccgtccccagccccaacccaggagagcccaggacagcacagcagagggctgggggtcctgggggctgagccacagagggggcgggcgctgcgtggaaggggaggccaggcccttggagctgtccacacgccaccggatgggctcccatgcagaccagcagctcggtgtcaggaagggatcgggcaatgatgaacctaattcactcgcacgtgtggatgccggtatgatgatgacccctgcctccaagcctcggcagggagtggatggcgaggtcaaggccccctttcccagaacgcttccatcccaggggtagcgggggtgcaagtggggaggagacccccagccagaagggaccactcagcggtgaaaccctggggagggcgttctgttcccagagttccacgcgtctcagagacgcacagagagctgccccccacctgtgatggggggacccactcgagcctccccaccgcggccgagcaggtgtccagatgctaacgttgcaggagcacccctctggtgccctgcaggaaacgtggagcctctctgagccccgagagcccctgggaggggatcggcttgtggctaagagtgaggagccaggcccctgaccctcaccctctcacaccaggcagggtgcctcccaccaagggtacacccactaactccgagaggagccctgaggtttcaggagagatgtgctccaggccagcgcacggccgggaaacaggcagatggcgtgggtaggcgctcaggtctcagacttgccccccagctgcccctgacctgttcacagcccgtctgcctgagtctccacagtgggctccctccaaaaggagggcctggggcacctgggcaggaggtgaagacatctgcccttgagtctggttctcaaacaacgagccgggcatgcgtctgccctgcccgcctcgccccagcacctagagagcattcagtaaacgcccgctgccccttgcattcctgacgccgagcaggtggtggggtgccggcagtggagccctgtgcgctcatcccctggacccgagggcacgccaccccactttaacaagtaccgctggatgcgccaggccccactcaagagggtcccatggctggccacgcggacacaggagtgagcgccgcctcttccagggagccttccagacatcccccacccccgacacccactgcctctggacttctgcccaaggccatactgggatgaccatgctgggccacggccagccaccccctgacgttctcaggcaggtcgagtccagcgagcgcccggacgagtgacgcacggacacgcaccccgagcaaaagaagctgggcgggagaggcgagcggcgcgtgcattcaggtcaagccagagatggagagcagatggaagcacgcggggctgggggaggggaagcagggcgcctgtttaatgcctacgggggttttgttccgggtggtgaaaacttggaactagacagacgtgctggtcccacaagcttgtgaatgtactaagcgccactgaaatgcagacttcgttcagtaatttactttgctgtgtcgcacagttcccaggcggcgctaatggtaaggaatccgcctgccaatacgggagatgtaacagacgcgtttgatccctgggtcgggaagatcccctggaggagggcatggcaacccactccagcattcttgcctggagaattcccacggacagaggagccccgagggctacagtccacggggttgcacagagtcggacacgactgaagcgactaagttccccgaccagggatggaacctgtgccttctgcagcggaacctgagtcctaaccgctgggccaccaggcaagtctcccgaacgtctaaaatcataaaacttatgatacgtgcaaccaaccacgaaaatacaaatataaattctcccttccccctgccccgcccccgccccaaatctggtcatcagcaacctgtgacctcggcggagcgaggcgggcggggccttgaggaaggagaggccggggaagaagccaacagaggccactttggcaaagggctcttctctgcccagcggcccttcctctgcagcagcacctgtcaatcacggcccccgctctagcgggtgtgtccacggcccaccagtaggcccagggggtgggggtgagaccctcaaagccctgagctggccccagacaggcagaagccgctactgcacggccaggcctgactcctgggtcctcctccccctgactcctgggccctcctccccctgactcctgggccctcctccccctgactcctgggccctcctcccccggccacgctgcatccactgccgccacctgggcatctgggggcccatccccgggtcctgccaggatgccgctggaagggagatccgggcggccacccagccctgcactctcaggcacagagcaggaggcagtcgctctgtacctgctacagtccatgggactacagggtgtggccaccagagacagcccggccgggaacttcaggacccatcaaacgcaccctgacccacaagtcgcgatgcccccaggccagccgcttgttaaagcctctgggaagagtctgccaggctccggatgtgcccggacacgaaggcagaagctgaggcgagctagccccaggtcccccactcccgttcccagcatcttcagctctcagcctcagccgttcccacctgtaaagtggggactgagaacgagacgcagagccggccgccatcccgagggggtgtgaggccgctgaaaaaaacatctgccgcgttttacgaggctggatgaaaggggctgtctgtgcgtggagtgactgtcggcactttattgaggaaagcaatcaggacactcaatcgactctgcaaagccacatcctttcactactcataggcgagacgtgaaacaggaaaggtgccctcctcgagcccggcccggcccagcccggcccggcccggcccggccaatgtcaccatcagcaagggacagtgccggcttccacgggacccctgggctgccacccagccccaggggagtggagccgtgccgccccctggacctgcccccaccccccgccacctcggggcagggggtccctgcacccgctctctcactcgtggcctcggctgccctgacccagctcagctgtcctgatgaaaagcgttctctctcagctgtctgcccggctccaccctcttccagctaagggcacagctttctttttttttctctctctttttaaaaaaaaatccctattttttttttccagtggaaaaaacactggccgccatagaggcagagccaggcctgaggagggcaccttcctgtggggctcgcgtgttccctgacgtccgccccccgtggtcagaggcagcaggtaatggttttggtctgaggctgtgcattcgctgtgtttttctaaccctgcgtccttggcgcccaggcgctgacaaacagaggaagtcctgtacagacctggttcgttctcagcctggggtgggggcgggggcgagggtgagaattaacctgttcctcccccagcctcgcccgacacacgcaggtgactcagtggaaagacgggccaggtgacacagacgtagactgttcctcagcagccgggtggccgagtcacttccactcggcccctgaccctcttcttctaaagggaagtcgttgtccccgccttgcttcctcacaggacggccagcgagggccccgggggcaatacaggcaggatgcagccgtgattaggaacacacgtccccggacagagcgaagcggggctaggcgctacgcttggctgtgtgatgctgggcccggcgccgacctctctgggccccgctacacgcctgatgcccacggttccggggttgctgccagccacgtggggccgggccgccctgcccactgcactcccctccctctgacatgtcacgtgttcaggccgcctctcctaacccgcacactggaaagcggagagaccatgggggcaggggctgcgtcggacctgggcccacatgcccacagccagagcagcacccagcacacaacaggtgctcagaattgggaaggaagcaaggagggggtttgcgggtgccaccgcgggtgagaagccctcggagtcgccggcaggcccctcccaggcggtgccccggctcgggcccaccaggccgtatctttcgggttctctgaactcactcattagacaactaaaccctctcaaatgaggatcctgaaaccagcgctgtcagctcaaaaggagaaggcagcaagggagcggacactcgccccgcgcctgctgcgtgcctcttatgtaacctttacgcaccaccaaagagatcaatcacggatcaagcgcgaattagactggggggatctgggttcaggtgacccgaagacctgaggtcacgaggaccctgggcacgggagagccaggcctcaaatacaggatcgtccgaagctgaggtccaccacctgcccgacttccctccggcgtactctgggcgctgaggcggcagagggtcgcaaagacccacctgagcccgcccctgggtcaccggcctccccaggcaccccctgctggggccaccacacacagccaccctcctcagggcagaggactccgcccccagagactcaaggccatcgggtggcccggccccgctctctgggacttcctgaagggccttcgcaacaacacaaacctctttttccgaccccgagccccgtagacacctgacgggtggcttctggggaaggttccctctctctgggtggaaacagatgagtcacctggcatgaatgtgcctggcacatgacagcccgattcccacgccctggccacaggggaagcagcaggaaagtcacagaactttctgcgggtcccggctggaggctgcagagccagggttcacacccaggtcggcctgagacccagacaccctggagggaagacagcggctctccccttcagcccagagagccgggccgcccccgccaacaaaacctccgccgatcggtgggtggtgggtgagagcgagacggcgcggaccctgggggtggccacagtgcccccatcctgccctgggagcctggactggggcctccccacagctgggcctggccagccgtcgtggctgatcccttgcctccagcccgaggcgcccagagctggggcccgcaaggacggcacttccgttcaacttcccagtgggtctgcagggtgctcacaatggggtctctgtgggccgagcgaggcggggtgccaggccagacaggcaggcttcccgccaaagtggtggtaggggggagcaccaggccaaagggagggaaaaggccggcaccctagccctgatccagggcctggcttggggaggcaggaactcccaaagttgcccaggtttgggggtgggagagcctcccccaaccccgtccctttgaagcgcctcacccggaggccagcgggtgagagctgcagcagccagggcagcgtgtggccggagcgctggtccggggcgggggccccaggctgccccgtcccaatcccccggtgatggcgcaaggagagacggctcctactttccccagcccggcactgcccctgcccttcccagagccctctgcagaaacacggagactgcccccagccctacacgcacgcacatcccagtgagccgagccgagcggcagggaagggagtgggcattctgggaagccacgcatacttaatcacccggcattaatccgcctccccaacaatagcccctgcacttccactgaatcccagctgtcggtctctcaatggaaggaaacaagatttagagcatcaagcctcggcgaggcttctgcaggaggagaaaaaggccccaaaaaagcaaaaaaaaaaaaaagaaagtagtgcgcattcattagtgtctggacaaagacacaatgcattttgtccattaaactgctcacagacctgcttaattggcttcagtctggggccggggtagcggggaggagggggctgcttgcccactggctgggccggcagtgagcccgggctgggggttgtcaaggaaatgggccctcagcagttggaatgagggcgcgccagcccgtctggggacccacttctgcagcctggggagggggcgtttctccagccgccaggaacctgctcggtattcccatcagggacgaactcaagttgaagggcatcggccacagcagaaaaacttcccgagaggctggccagtactcgcaggcgggcaggcaggcgatagatcctaaccaggttccctgacaccaccgccacccccgccccccgcccctgttcacagctgaagacccagggctgggaaggcgaagggcctgggaggtcagagctggggacagagacagagctcctggcaggaactcccacccacacccccggggagacgggcacggccacgacgatgagttccaacctcctttccccaacctcacctgaggccagggaaggcagagggtggcaaagggtgggtgtgcttttgaactagtcagcttctcgctgagaggcgcctcctgttcaggaggcgctcacctgcctggagcaagcatcacctgcccccagcagaggcactcccccggctggcagggcggggagggccctgcctccctgcagatgctctggagcctcccttcaggcctcagggactttgggaagaaatgggggagcagggatgcccacctagcacgccaggaggttgaggtggtcctcaaagcagtgctcgaacccccagcggccaggctgggctccacacgcagcgtaattgctggtgattaagtaattgccagactttgtccaataaaaccagcacgtgaccacgcccagccttctgggccatctccagaagacaatggcctagtgttctgcccccgctggcccgctgcagaaggcaggggctccgctccgacaaagcaacaggtccctgcaggggcgcgggggcccatactcacatgcaggcctcggtgccgttggggaacacttcacacttcccaccgttcaagcaggtctcacccggctgggagcagcgcaggcctggggaggggcaagaggagaggtcagcccggccagcacccccaggggcactgtccacacttcacctgctgtcatggggttactgggtgcagggggcccccaggaagccctgcatgaaccctaaggggactcaacattctgcccagagttctggggtcagagatggggcggggaggaatagactggctgggtggcaggtggagaggtcacgctcaaagtgggtagaggggtggggaggagtgacctgaaatgcattgtagacagcagggaagaaacgctgggatgaccctgggccagtctcccaaacttctcacccctcaccccggcttcaccggggaccttggctgggctggggcccctatccaagcaccaggattgtcttgctgttcaaacaagttcttccagggggtggcgctgggggggggcggcggtgctggccacactcagctcccccgctcgtgggaaaatgcgacagctgcaagggccgctgccccgcccgccaacaaagcaccaggcggaggaatcagagcagcccattgtcgcgccagggccgcctcctagggcaccaggactgcaccccagggacctggccacgcctccaccgacacccaacaccggctccccagggtgggcatcttcagtggcagcctcccctccacacacacagccaggggctgggggcgggggtgaagatgctccatttggaaggaatttgacttcattcccgggaagggatcaattaatctacccccctccttcttaccaaggctatgtaaattaagccccctctgggggggtggggacggggtgtgacatggaaccccatcttcaggaagcagggaactagctctccctccaacttttaggggaagagaagcattaatcaccatccgattcctcggagctcctctccatgggaagcggagaggaatgaccgccccggcaacccctgcaaagtttccaaacgtgaactccacaaagtgaaagtccatcagtagcagctgaatcttctgcacacacaacccccaccccgccccaaactgtgagccaggatagaggtagcgacctggtgtggggaggggacaccgcgggcagggcggccaggagccgggggaaacctgggtctggggtcctcgcccgggtcctgcgcgaactcttctactccgaagggaggccgagctgggccgcctggcccaccctgctcccctctgcccaacacgctgggcagccaggtcccgcagtgcggttcagtaaagacgatcgcggcgccctggaccccaggctccgcgccccaacatccgccccccgcgcgggcaagaggcgaagaaaaaagataaatggccccaaagcaacaggaaaccaaaaccgactcgattcaaatcgaaaagtagtaggcagctcgtccgcccgccccggggagcgagccccacgcgcggctggtgaaaggcgagcccagagctaggtctcccaggcccccagatgcccacgctcggcttcaaagccgacttcaaacccggcgccaaactcggttccaggcgcgagcagcgccaagtccgtccggatcgggcaaacggagcgggggagggtcagtccttctccccgagcccgggactctggctcctaccccggcccgggtcgcccggtccccctccccaccctggcagccagctcccaggcacccgagaacgcgcgcctaggacgccgccaaaagtttctgaaggcgcggaaagttgcgggctcgcggcgggcagtcgcctacctcgtgcggcgagcgcgggcagcagcgccaggcagagcaggggcgccaggagcggcggcatgcctgcccaccggctgcccgctgcgcccgggggcggcctcctgcgcccggccggcgggggctcgggcacacccgcgcgcagagggactgtcccacgggcggtgacggcccgctactgccctctccttccggctggagagcgtccctgggctctcgcggcctccccggcccggttccgcgcccgcgatcgttcctacgctgcacccgccgcccgcgcccctatcccagggcccgtgcgctccctcccgtggccgaggcactagtgaggcgcccggccgccgcgcgctccgcccccgccccgccggccccgcccccggggcccgcccccgccgatccctccgcaccccgcgcccccttgctggccgcgcccctccgctctcctcgaccagccccgcgcctcctcgggctggggcgcggggtcccgagcccgggtcctacgggggtgggggtcgcggccgtgcggagcggggtcggggcccatgccctaagggactacttctc

SEQ ID NO: 83 - DNA, 175213 bp, Hippotragus equinus
  source 1..175213: mol_type = genomic DNA
cacccctggcagaggcccggccctgagagacgctccagcgccgagtgagttaaggcgcgtccggactcgacgcgggttggcaaggctgggggctgtctgaggctcatagtagatcactccgcgcgcagcccgggccggcgcttcttcctgcgggaaacccctgggtgccgaaggcggcggggcctggccgcggcgacagcggggcggggtttgcggtgggaggaggcggccgaggcggaaggacacacgaggctgcttcgctgcacacccgagaaagtttcagccaaacttcgggcggcggctgtggcggcggcccaggaacggcggacttggggtgcaggcagcggagacactgaagtctgagcttcggggcgccgcgcgaggccgtgagccgcggaagtaggaggaggggaggagaaagtgggggctcccctgtcgggaccccctccccatgtggatctgcccaggcggcggcggcggaggaggaggcgaccgagaagatgcccgccctgcgccccgctccgctgtgggcgctgctggcactgtggctgtgccgcgcggccccggcgcgtggtgagtatccgaccgaggggtgctgtccccggcgccccggctcacgcccctctggcccggctggccacctggggcgaccattcccacccttccgtcctccgcttggcgagaaggccgggctcggccgtcggcgtgcagggaggccacttagttcctaaagtttggacagcatcggaccgctccctgggtgcgccccctcctcctcgcccctcgccgcctgcagctcccctccgcctttgggtcccacacacgcctcctcggccggagggaggccgggcagcaagcctcagaagctccctttcttggagcatttgagttcggggatttgggaaatttcgcccatttggctccgtgtttcctggggtcgggggagagccgggggcgggctgcctgggacaaccatcgccggccgcggaccgcagatgggctgagcgcaggaatgccagattctggcgtggagggagcgggggcagggcgtcccaacccagcggcttgcaccttcacagccagactcagcaatgctgaaggaaggcccacggtgtgaatgggtgggtttggtttggatggggacaggcttttgcggcgcgccggagttctgacgctctgagttccacggttccccaagaatccggtgtgtaaagtttggctcgagtctttgaaaggtggaggcaggagcagtaggaaaactggtgtggctgcatgctgaaccacatgatttaaaaatctctactgctgttattctttccgaggcgcagagctcgggcgcagtttcagagtctgtgtccagcctcaggaatgtggtgtgacgatcaccaactcctccaacctggcagcagctaaggctgttcttttggcatggttgggggtggggcaggggcgggtgaagaagagtggatacgttaattcaaagtggtgccttctagagcttctttttggttggatatctgcaacagtctttctgaacacggttggatcgaggaaaggaaatccaatcgtatcgtacccatcccacccactatcgtagaatccaaatttctttccatagtgtttcctggaaagaacctgggctttggagctctgcgctttaatcctgggttcaaatccagctcggttgtatgaactcaccaataaaatgggaatgaaattacccaactaataggattaattacgagaatgtatattacactggtggcagtcaaaaggtattcagaaagtcctttgcaggcaggactgtgtgttgttgtttgtgaactctctgcttccagtgggatggtggcttgtgcgtgtttgttgaactggaagtggccccttcttttcctagcctaatctgaagaaagttttacctttaccaaaaaacttggtacttgagctatgactctttgcaaagagaaagtaatgaagatgatgggctttagaaagatttgctctttgtatattgttaacaggcagtcgacatgccaatcacggatgttgaaaagacatcaaagttatttatcacagtgctgggttgttcaaccccaaacctttcttggaaaattcaaagtccatacacctccaggtccctaagaatttcagaagtggaccaaggtgctgtgtgatgatgaaccaaaacatatgatagtatttttgtctttcctttttctttgagcaaaagctttagtaaagtgtaaatttagaatagaggagtataaacaatgggctagtctgaacattataatccttggtctaccattagcttgttttagtaaattagcttcatgttgtgtcatctcctcatctatgaaagagaaccagaaatcacttattttagagagttggagggaataataaatatgtttgcaaagtgatttgctaaattaagtgtttaatgataagacatgtcaggaataggataactctgacacacagggcttctctcattctaggacctatacttctgccctgatgaagtactgctcttactagctagctttagatggacaagtctagtgttagtgttagctcaaagacaggatttagatattttgatttctagacaggtgttcttcagaagctaaactacatgggaatggaagagattaaaaagcccttttcttggtgcagattttgaaacttttcagagtctagtagtgaaagcttcttgaatcttctcaatttattatcattgtgttttgccaaggtatcaattataacacacccttttaaacttttgagtgttcctgtattagtctagtggccagttgttaatttaaacatcactgagttcctgaagcagggagctgtcaactcatctgtctgattgtctaaacagctatccaagaccaccccttgctccttgttttcttttgctttgcaatgggaagtcactccctggttttgctgcctgctacatgatttctcagttgaattcttttgctttttttaaaaaaaatcacaaagagtaattgttttttctttcagatgaagataaaatttaccctagaacttgtttcttcttgttctttctgtttttttattatttctttttggggagggaggatgagagtgattttttttttagtttctctttttcctgatgtttttgattttttaaaactatctacccacattcttggtatctctgtgccattcccactctgctgcctcttctgtgagctgcttatagcctaaaacagtaacttttggttcacctgaactatagtcgctgacttcaggacctttagaaaatgtttgaattcagtgggatatgcttggatggttcagaccagccttacaatacatttaaaaaatatcacacccacagaaattctattttgcccacaaaatttgcattgatctagttcccactctctgatgccattcctagtggtctcactccttacgtggtccactatgatagaacaaagtccgcatcctggctgcatcaacatcatctgggctgcctcttggcctcaacacccaaggattctggcacagtaggtctgaaattccgtattttgagattctgcatttttcaaggtttacaggtgattctaatgcagtaacttggttggagcccagtcataattcattattctctatcaggtgtgtacctgggggtcttccctttttaatgttaataatttccagaacgaatgtatccttaatcagccattccagtttttaacccttctgacttccaaagatttttgaacttggtgacataaaagctgtagagtaaataatatcttataatgtgtaagaaataataagtactgtttcttcttgttcatctgagcacagtgggtccacattgtctctttagaagggcttcttatgtatatttacatgatattattataaactggcccctccctttcctctctgttatctctttttcttcaagtttcattcacatgtatcacttttggacacattgtctattggtccttaatggttttagggcaaaaaattctaagctatgatttgaatgagaatagaatcagattttacctgatactgatactgtgcatatacttttaagtgcttcctttcttgacctctcttttttttatttatttattttttattttactttacaattctttcttgacctctcttgaaccacaacttaaccttttatttcactcccactctttccttattctccttctttcatctttcctttctctgcagatgacttgaagccagagggttttcttctcctctacttttctttctttatctgtctgccatatgcattgtattttgggaggttcactggtctaggagccagaagaccaaaatttttcctcccggtcagctgttaattagtcttgtgatcctgtgggaggagcactactttggtcctccatttgcttaggcactttgtttataatcactgagcccattacggacaagttgagacaagaatctctctcctctggtcctcagtctagcgccttgtccactctccacacctcttccatcttttgtacaaatgagctcatgcacacacacacaaatcctcaagtgcttattgttagtgtgcctcttgaggaaaagaattgtgtctttttatttgtgtttgttctaatactcgcacccgaccgtggggttgcaaagagttggatgagactgagtccacacagcgcacacaacccttgtacctagaatggtgccttggcatctgataggcactcagtacatatttgtttcattgaacaattacttttagtagttttcttattctggactactacaatacttcaagacagtttttttaaaaagtagtatttgcaaaagttattgcttaccttacatttgggggaaaaccgaattttccccttccccagatgttttatttaaattcgccgttttgaatttctgtgtgtgtgtgtgtgtgtgtgtgtgtgtgtgtgtgtgtgtgtgttggtttcttctctctttttcctgatcacttctgcaattcataaaggtcacttttactttggaatttaacctcaaagatgctggcatccaccctctgcctctcagttgagttgcctcttttgcttcctgtatttctgtattactatggcagcaatttctataattttgtccagagttgccacacccttattgtaatttggacattttgaggattcttggaatatattatttttaaagttagaattaaaaacacccttttttatattggagtatagctgattagcaatgatatatagggcttccttggtgggtcagtggtaaagaattaattcacctgccaatgcaggagacatgggtttgatccctgatctgggaagatcctacatgctgcagagcaactaagcctgtgcaccccaactattgagcctctgctctagaacctgggaggcacaactacggagcccatgtgctacaactactgacgctgatgcgccccagagcctgtgctccacagcgagagaagccgtcacagcaagaagcccgtgcatcacagctggagaggagcccctgttctctgcaactagagaaaagtctctgtagccgtgaagacccagcacagccaaaaattaatggataaaattatatgaaaatgatctattagttacaggtgtacagtaaagtgattctgttatacccatacaaatatcttgtgtttttcagattcctttcccatgtaggttattatagaatattgacccaagtttccctgtgctttatagtaggtccttactggttatctactttagtagtatgtatatgtcattcccaaatttacgataatttgtttagatgatttttttttgagatttatttccttgtgagctgcatattgtaaacatgaactagaccgagcagatatttacatttagtatatttggttttttccctccaagaaggttccattgaaaatcaccatcaccaataaaaagcaaaaggtgacacatggtaaatacattttttagagaaccacagagggtgagctatctccagaacgaaatttgctacttgagggcagagaccatgtcacacgcaccccttccctggcctgtgcccaacatgtggtcagccgggcagcaggtccttcctggtcgcggcacctgtgactcctgctctgcccgccccagctttgggacattctggaagacaggtgatggtgagtcagaggtgtgtccttacagtcctttctgctttgaaaagatcagttaaaggtggaccccacctatacgcttttatgctatctctttttattaattaatgggtagttggaagtttcctctgttgacttatttgttgggaggaactttaaaaattcacctagtccttctatctgtcccatggtgattctgatcctcttagaacatcctggttaacgtgtagcctgccttttttctccttgatcatctcttctgatagacagctccctctttctggaggcagatgagtctggatttggacagctgtaattctttgaaagatcttcttatattcagttgtaatcttcctccttatgacttgcacccactggcatcttcttaggaatttgtctcaaagagtcctgagccttttgtgttagggatccagaggtaccctttactgaactgacacccacccttccgtaaaaggagttaaacccagtgaggaccttgaagatgatcccgttggggagattgcttgggttaatcattgtagccctatatgttttgtaccacccttcccagatggcagtggtgggagggaagcatttgttgagcagtgtttccccaacctgttttatgataagaacacttgaggtcttctggagattccgattcagtaagtctggaatagtgtctgcgaatttgtatatttaagaaatggtcaggtaacttttatactagggaaattttggaatcactgcagagaatctaggaaagctaagggcttttttgttttgtttttgtttgtttattctttgataatgctagagatgggttgctttgactgtgggtcctgtggtcacttttttctcccttgaaagtgcctgcttcttattgaatgcctagctcactagggagaagaaagccactcttgtatccttaaaaggctaataaaattatttagttgtaaaaaagtggggtttttgggcagtctatccaaagtcttaggactgccatgtgtgtgtcacgtatgactttggtggatgcctccttgtccctccatcaggatattacctgagatgccagaatacataaaagttccagttttcttggtgtctgttaaggaattctgacctcagcccttgtgaatgatgctgggtctttgaggatgtctgtcttgttgacccatgaacacatatctggtgtcagggatttccctcagatatgttagtgaaaaaaatataaaggtcattcctttcaggcagtcctgcttttggggtgtctgggctgctgcagcaaatagaataaggaaggtaagataaagggggtctggaggacttcttgagcagaactgagcagtctgcaagaaggggctcagaagtgcgcctctaacagagacacttggtgttgctgttcatgataggaagaaggaagtggcttcagatctgaaaggatacgctcatggcctctagatgggacaaatagcagtgttcgttggcagtggtaggaagttggctgtaggtctgttctttcttttctcctcccctggagaaccagctgtgtgacaaaaaaatacattgtgacattaaaaagaatagtaaagccaagaagagggaatgatacaaaccatagctaggagtgaacaaaacaaagcaattattgtgttaatttgcttatgtaagtaaatatatacatttctatataatactctagtaggagcctgacttagctctaagctctaagctgtaagatttattatctgtgtagctgtgctgtcttagtggtgtgttaggaagggctgtggtgtgttgtcaaccttaatttgtgtgtttcccctagcatggcatggtaggcagtaagggtattctacttttctagctgtgtaggagtcattgaccaaatggaagatagagacctgcccccgaggagctgacatcatcatgacgacaagacagatgagcacacacagttaggaacatgaagtacagttacttagtaacttatctatacttgtggagagcagtttcctgcagttggggtgactaagagctgtagggtcttgggggggtaaatctagaagcaccagggaacagcgacccccagctcacccctgctgggcttgtctgctgttctgctctttctctgttgcaatttagaagtatcaaaacttgacttggggggaagacaaagagccctttgtttggtgggggtgtaaatataaatttggcacatgttgtggtgtctattatgtctgttcgtgggtttgtggcaagagagagggctgtgttctcagactcggatgcctagcccgatcttggacaagttaaggtggaaggagctcctttggaagatctggttctcagtggcggttgctgaaggagcctctggtcacagccaggcagtgactgcagtgccgtgtggacacaccccgagttgctgcctcaggtggcattgattaatcatgctaacatctccctcaccctcttgtgcttgtcttggcaaaaccttgtcctaccggctcctcagagtttgggctttactggatcattgaatgaactcttaaggggttcattttgctgtctcttggctctcttaaactgtaggccagttactaccgtccagctctggagcccgtgatctcccaatcaggcagtgaggggcctgtgtccctcttcccagtgcaccgaagggccttccccagagacctctagggagggcagtttctggtcttcaaggcagttccatctgcagggtattggcagtgactctagttctttgtatcagccaaacatcatgccaagatggattcatcatctcacaaaggcaggttgtatccatgggcgttgcaaaacctgtttctgggttaagagtagtgctctcacctcgtttatgtatttataggaagaaagcctggctatatttcatgaggtaaggaaaacatgatgataatattttggttggagtcagatattgtctccctaataatatggtatcttttaacaaatagtatccctttaaaatacagttttgcttgctgactaaagcaagaagctgtggttacattctaaagtatactaccttgttcagagacaggtgcactttaacattggtatttgcttctttttcatctcttttcactctcttctctgttttgtgaggagattctgggaggcttttaagcctcaaagattaaataatctattttaacaagtacctaacagggagaggttgctatgctggcttacttcttccacattccaataagagaaaaattgatactgtttatcactaatatgttttgttgagtttctgaatatgaatagtcagaacactagatagtgttaaattgtttacttctctaaatggtaaagtggtatgctgcaaagaaacttttgtttaattctctgctttcatgtgcttttgtttataaagtgtagagactcactgaagtttaaggatgtgtgtattttgattattactttttactgttttctttgctgagaatatgcctttatttgctagatcttttaaaattggaacatgaaggacatttactttattagaacatttaaagcactttctaatctttatgaggattattagagaaaaaaacatgtctgtaaatcatgcacgtttgggatgttactatataaagtagtaacaatatgtcatggttcctgtgacataaacttttaagagattgaaggaaaatctggttgtaactgaaaacaaacattgtaacatttaaaggtaggtttacatagcaacagaattattccttatgtttacatgtaattaactcatatttatgctttgttgattttctctggcacctttacaagaatttttttgggcaggaggtattgggcttccctggtggcttattggtaaagaacctgcctgccagtgcaggagactggttagatccttgggtcgggaagatcccccagagaaggaaatggcaacccactccaggattcctgcctgggaaatcccatggaaagaggagcctagcgggctgcatacagtccatggggtcgcaaaagggtcggacatgacttaggaattaaacagcttttaaagtaattatatttaagggtggttaaggagttcatcaccagctcgataaacatgagtttgagcaagctctgggagttggtgatggacagggaagcctgtcatgcttcccagggtcacaaagagtcagacacgactgagcgactaaactgaaggacctttgaaaagtataaaaaaaaatccagttgcaccactgttaatattctggtgtacatcatttggtctttttatcaactcttaaaaattatagatttataatgtatatgtgattttctgttctgcttttctttgatttctcctttgctttggttacatatttgtctccatcatttttttctttcctgcataaatgacactttataaatgccagattttaaatctggcatttaaatgccattctgtataaatgatctttatacagaaattcccctctttaggatatttctattaagctagatttccagaagagaaattactatgccaaagagtgatttttaaaaattgggaaataagcagaaaaacataagagaaaattaaaatctccaataatcccatcacctccaatcaaaatctcagttaatattttgttacatttcatacagttgtttttctgtgcctcttactgtaattaagattttagcatattatagttttactatatacttctgtaccactgaaaatattgtaaacactttcctatatatgtaaataattttcttcttcatatttctttgtttttactgaagtatagttgatttacaatcttgtattagttggggcttccttggtggcttgttggtaaggaacctgcctacagtgcaggagacctgggttcgattcctgggttgggaagatccgcagagaagggattggctacccaccatattcttacctgaagaattccatggacagagttgcctggtgggctatagtctatgaggtcacaaaaaatctgacacaactgagcaactaacacttttggtgtatagcaaagtaattaaaaaagaatatatatactctcagattcttttccactatagtttattataagatgttgaatatatatatatttcctgtgcataaatattttttaagaacatggttttaaaggctgcctactgttttatctgaagattctattatattttatttaaactgagatctagtcttggtttccagctttcattgttataaataatgtgatgaacattctcatatgtaaataatggtaggaatatgtattttcttaacataaattccaggaagtcaaattattttatcaaagaagatggacctttgtgtggcttttgatatacattgccaaatttcttttcatatagtttgaccaagttatactgtattagttgaatatgagactgtccgtgtttccaactgtcatcaacactggttttatttttacaactctttaacaatttgataagtggtaaatgctgctgctgctgctaagtcgcttcagttgtgtccgactctgtgcgaccccatagacggcagcccatcaggctctctcgtccctgggattctccaggcaagaacactggagtgggttgccatttctaaatgctacctcatcctaattggtatctgtgcttatagtggtcttgaaagtttttcatgtgatcagtggccatttctattgccttttctttttatttattttggtaaattgtgtcttttattcatcaaggtatttcgtttttggttactgatttgaaatatttctttaaatattaaaggtattctctttatcttaaatgtgtcaaaacacacacggatacattaaactacataatatcaaattgctaccagtattaatatatcaaaaattatttaatagcttttaaaaaatcctttgatttctaatgcacttggtcaactttctgtatatttgttaactggtattttctgtaattactttaaaattctaatctgactgtatcataaatcaacaagctgtcagttgtgtgtgcccagaaaatgcacgtttactttagtgtcttataaaaagatactggaggaagcaaaaaaaaaaacagtctattttgaagcaagctctgtttttgggtgggtggaaggtaggctgcttctgtgttgtctttttggatatcgaggatcttggaccatccccgaaaggcagacctgatatccactactaaatctggcattctgacctaatttatagttgtgcagtggtctagccgctccatttgctgagccaacaggatgactaagattctttctcctctctcttcgcaaaattgattagttgtgggacagaactgactgaatcaacctgttgttttggcaccccacgaacaccacctgtttcttagatttctccctccagcctcccactgacctagctcagtgctgtgtgcacagtgggtaggagatccgcgtcgttgctgaagaatgttgtaataaagaagagtagattgctttttttccccatgcttgtgtgttcttaaggcatcctgctgcttttgacataagagttccagctgaactgctatatgtggcagctctgtgggtcgtaagtgtttgattcagagtaatttcaggcaatatgaatgctttcttaagtatcattggaatttactgggctggttgtttgccagctattaccatatttagcatgaggagacctggagaacaaggacatttctgaccaaccaaagaaggaaacctctctgaaggactgcaactttttttttttttaaggcataggttaagagtttgtgtcctctggtctttgatattctgccccatccacaaaattaacttatggatgggaagagaggtttgatggtgaagctctttctcaccctgaagtctattaatactgtttctgggaggaaattagagaattcttactcatagactgcactgagaggcttaatcagcaggtgaagttgttgcttaaaaacaggttaatgggtatttattctcatctttcttcttgaaggcttattacttttctgctttgtcatgatctgaatttattttggcccaatcgttttctccctcctacttttgaaattatcagccttctttctgtggcttaaaatttctctgcctcagtttttccattttaaagatgaagatagtatttgaaaggaccactcggtacaattaacataaaacataaaccgaccctaacatttacatagcgatgcggagtttacagaacactcttacacaattgcctcctttaatctcacaaaatcttggttgaaactgagcctctgaggggttagttggcttgtataccattgtttggccctagataataagtgacggagctgggacttaaacttgtggtttgacttttaaaacctcagcttttttttttctttttaaatgtttgattcttactatgtgtcattctcttagggctttatatatcttttcttgtttaattcacatggctgtcctttggggcagacagtagttagctatactacaggtaagaaaataggagcttggagtcatagctttggatgttggggcgaataataaggtggttaaaggatggagtcaggatgcagacccctagctctcgggcctctgtagtcaaccatggcgctttatccccattcatacaatcatgcctcacaacaacctttgagatggggaggaggggaaactgagacctgtaactgctcaggataatggaattagtaagtgtcagagttgggactgattgaatgatgatttagtctacttgtctccgtaacccttgctcattgtatacactcaaaatacatgtttttaatcatttgtatattgataagattgtcagctcattgaacataggagccagctgttagaaatcattggtatattctgaataaaaggattgattttagttggctaatggccctggccgtttctcagttgatttctgtcatcaggacagacagattgaatttgggttgagagaaagggagttccaattaagggggtctttaagccagaatgggccacagctatgagctcttcagaagcctgctctcaagatcagtggcccggctcttgagggctctgctgggggacatttttgtgtgttttgagagacttctctttgagagggagttgtgagcttagagggagaaagggtggggataccccgggctcttaactcattggccctgtgtccctgtttcttaagccactctgtgccaagatttcattatttttaaagtgaaggtaataggagcatgtagttgctaggcttgttatgagggttcagtaagttagtgttacattcatggtgtggtgcctgcatatagtgacagagcggtaaatagtagttatgttggtgatgttattttgtgttgcagtatacactggctttttgttgctttcacttctttttaatcaaaagtggatgagtgattcagatccttggtgagaaataggagcttcatgtttgcagtatgtagattgttcactggtttccggtgagcctataaatatttaggggtattgtatttgagtctgttcctttaatggggtatacttccaatttggagaatttgtctaccatccaaattgtatcgataggtgctgaatcatttccccttatttattaaccagacatttgtggttggactagtttagtacaggaactatgattttttttgcccgaggtacagctttgaggagaatgtcagggggacactcttgttcccccctttcctatgacatgataaacatcggcccgtgccatctggtgtcaccatgcattcggtgctttaattacacttatagcactaaaggaactatctctgtgaaataacagaagtacctcatggtctgttatcacagctttgtgggctcccggagattttggaatctcagactgggaaccacccatctagtccatccttgatttacagatgaggaaagcaaagcctccaaactcattagtcaaatgatgtatctgtaggttgaccctctgtttttgaaatctgagaagggaacagtgaagcagtgggaagggtggggtgggggaaaagtgtggctatgttgaaaatgtcggtgatagcagagaatatatttgcctgtgagaccctgcctgtctctttggacttctttgtaatggttaagacaacccaacagggctggagtcgttagtgattcagaattagattagccaggactggtggagttactttctcagaaaagggtttcatattttaacatttgtttcccatgacagtttgcttattctcaagttttggcagccatgagcaaatggttgtcaggttttttgttttgttttgttttaaggcaaaactccaaattttattttgccaatttagtaaactgtattctacctaccactcctttctgctccctgtaattatttctcaaactttgtttttcagttgtggaagtactatgaaaggttttcttttgtagtctgaaatatttataattttgtgtaagcacactgtttacaggtaatctaactggtgcatatgttaactcaaatacccttaaaacacttaaaatattttccaataacttaaatctccccccaagggtagctgcagccacttacattaaaagagaggaggtatatactaagggtaacaattatttgaatgtaattaatgtagataaatgggaatgttactttggaggaactggagtatttgcatcaaaactgactggggcatcagttgagttcagtcgctcagtggtgtctgactctgccaccccatgaacctccctgtccatcaccaactcccggagttcacccagactcatgtgcatcgagtcggtgatgccatccagccatctcatcctctgtcgtccccttctcctccttcctgcccccaattcttctcagcatcagggtcttttccaatgagtcaactgttcgcatgaggtggccaaagtattggagtttcagcttcaacatcagtccttcacataaacacccaggactgatctcctttaggatggactggttgggacttcttgcagtccaagggactctcaagagtcttctccaacaccacagttcaaaagcatcaattcttcggcgctcagctttcttcacagtccagctctcacatccatacatgaccactggaaaaaccataaactggggcatgcttcttcattaatagagtgaaaaaaacaaaaactgccctcctggagcttataagaagtaatggtagtttccatatactgagagtttattatgtgacagatgcttggggggaaaagtgctttacctgtttggttttagacggcacagtaggtgttataattcctacttagtgaaagattaaggcatggtcatccaggtcgcctagttagtgatatagaccagtaggtggtgtggaccaggattgggaaccccctttgcctgactccaaagctcacacatttactcactgtaagagatgccattgtctcttaagtggaatgctgtagccctacagataatgtaactttggatttagtaatattttctgcattaaattgacttaagttttgctcttcttaacatcctacctctgaatggacatttgcataatgtggaaacaaatgtcaaaattccattctgaggagttgcagttctttctaaatctttttgaaaatgggaaggatagatttatatttgttgtaaaccaaggaaagtggtttagaattgccctcctgattacttcttgatcttaaaagaaattctttagtagattaagactaggaatgaatgtgtagctttaaaaaaaaaatttttttttggaaaacttagaatagcaattcagagccatatgtgtgccagccttttaaattgcagatagtttttccttgactgggcacttgtattgttcttgtatctttctgaaagggatataaaagaccatgtattaataaactgattggaatgcctcagcaaatgaaagtggacgtaaccaattactaaaactgcccaggactaacctatcttggcctgggaactttgaaattaactgtgtgtactgtttctacatatgttattacagaaaaagcacggagataaccttggcttttcttcttttctgtgaatcttttccatgttatctcctttgtcactgaaaattggtggtcatctgtaataacagatgagagaagtatgtttgacatcaacagataatcccagataatgtcttctgttttaaaatgcaatcctaaacatgcatgctcagacatgtgggtcttttcagacatactggactttcttcttaagattcaattatgtttagctgcctgttgaatggtaaaggagagaatgccaagggatatgaaggataatgagagaatgatgacagtaaagattgattatttatgactttagatacccttccaactccatttggatgttcactttagcatagctgctgagttttggaaccaggtaggccttgctctgagtctcagctaagagtattatgcgagtcacttcgcttctctaaagtctcagttcccagttttatgtaacaggaatgataataataattaacttgtaggattgtatgtatgtattggaaacagcatacttaattgtattgttctgggtacaaaaatcggtgctcaagtgcaggtggccccagagtttaaacttgattagcatcttgtcagtttctcatttggaagatgtagtctgggaatacttgtcttgttttaatttcttttaatgatttcctttgcactgtttcattgccaaggcaggattatggaccacctgaagaacagactaaagcactatcatctagtaatggaaagtttacaggattaattgtgtaaattaaaagtctttctaatatttgtgtctgcccagtttacagcatcttgctcctttcacctcagaaaaaattggttcatagaaaaaattgtttaatacttcaagtcagagtcagggaactctttcaataaggaggatctacttggttggcttatttgtttccatctttcaccccggagtcttcatggaaatcaggtttgaaatgttagaagcagttggttttcagcattgggaaagcttatctaatcaggcatgtgaagtggcctatgtcagatttctgtgccagagaaggttaggggaggtttaggagattatcgcttctgcttgtaattcttgagcattgttgagacactaggagagcagtggggaaatattttaaaaaattgttgaagttggctacaccagcctaacacacataataacatcccatccccatttaggctggtctcaatatataggtgtatgggacctaatttaatcgtgtaattttttatcatttggggactagatggtaaagcttttatgtttcacagatttttgaatttacatacaataatattttacattaaatagtgcttcctggcttatcatcacttttgtaaacatgatcttatttgagtcaccagtgaaatcaactaaggaggaggggctgttgatttttacagatgagaacagttaagtctcatagcttaagggaactctcagtcacacagtgagcatatggcagagccatgattcgaacctacatctaatttctagggcagttcttgtttcatcataacacattgcttgctctgtaatgttgctaactttgagctctgacccctgtgatttgaagggattctcttgccttctgtttgattagttgtgtcagttagagcttgacagcagtgaagcagaggttgaggattctttccccaggtggatcagttagcttttcttaaagctgttctgtgcctgcagtaaccatttgtctctgttgcctggaaaggatgttgatccaaagtgaaacaggctggagagtatggctcactcccctcaacccatcacaacttcaatatattctgccagtgagtacatattgttgtgttccttaacatgcattttatgtgttctgaagtctgtttcttagtattttttcctcagctgtttttaatgtctcaaaccttagtttagttctccttgaatggagaactttgttgtttcttgcatgctaagccgctttaatcgtgtccgactctttgtgacctgccaggctcctctgtccatgggatgctccaggcatgaatactggagtgggttgttgtgcccttttccttgttgttccttacagcatgggctactcctttgtgtaattttattttatcgctctcggcatttttctccttaatcatcataaccttaaacagaatgtaaattgtgtatacagataggtgtgtcagtcttgcactgtcacttatgtaagtgcattttagcatttcttttttccttttgatcaaaatgaggaaatagaaaatgttttgttatggtagttttatgcatacacccacaaggaaatgcatagccagcttctgtgggaactgtaactgatacattttagggaagaaaaggcatgatagctaaaattttaactctgccaaatggtcatggggaaagaaagcaaaatgatgaaacacatattgcacttcagtttagcttactaattctgaggctaaaaacatatgtctgtgacttgtttacatatatttggatatgaaagtatgctgggttttccacaaaaatgcatttcacaagttgtacttttcagtcaagggaaccacctcaacaactgttctttcaggtgtacagtgcaggaaagtttaccaccaagagtggccagatagttgaagttttgacatgtcaatgtcaacagactgccaaatggaccattttgtctcctccagcagtccggttggatatttggtcgtgccctgtggtcagctgagagcttcctcaataaaagccactgtgatccaaccacaaggggggtgcacctctttcaccaggatggactaggatggactaggaagagtttggcagttgtgtatcatgagagctgggattccccatgctccatcctcctgaggagagtgttgatagtagcactgttttaattcctgaggcacatagattattgcaaatgcatatcatttgttggtaggatattgggaattgattaattttttttaaaatttatgtcagattgaaatgagtaagcttgttatattcactgtagtaaagaaatatttatggttttggtaaagtttgataactgggatttttttccttaaacatgccaacttaagtgtgtgtgtgtatgttgggaggaagagagataaaccttgaaactgttttttaaaaaaaacttttaaaatagtgcctagtctcagttggcaccagagaataattatccagaatgctattcagttacagtgaaaaggtttagggaagttgtaatgagtttaataaccatctgcacagtgacatagagggacacacccagttacacaagacctgagtctgagaactgttgatgtgcagtcgtctcatcagcatttgctcatcattatcaacagcaataatggctcaagtatgtctttggggccacatgaaaagacagtgtactcagagctgagggcaaatcagacctgacgaaaacatagtcttccctgaccctttgtcctcaaaccaccattttgtgaggctttgaaataattcactttatttcttgtatggcattaattttcctttttagatactgtgtcgttccagttcaaatttttgctagaaccaggaagggtagtgtactgtgggtcatttttttaacccatttccttgtgatagagttcatgtcagtgggttcatgctgctgtatgtgtatgatagtgttcagtatcttttctagtttacacctttgttacacctgttgtcaaaccacgtatgagcactttctgaaataaatcattttgggcactgtgagtcagagggaaggaatcagttcataggaataaactggcatgttgagaagataatgtctaatagattgcaaagcattttcatgtgcattatatcttttataaggtcatgtgttcatttgtggagactgaggcagagaccttgtgagaccaagtccaaggtcatactgtaggtacaagggttagttgaagaactaaaatccagtcttctgtctattctttggtgtgtaacagggtcattattttattgacagaaatatgggatctttcttttttaaaacgatacccttttacctttggaaggtatgttagcagttctttccagagcagaaagaaagtagttaatatttttctgctttttgataaaaatcactgttttctctaaatgtttttgttactaagaatcttatggcactgcacagcttttgactgaaggcgctttttggaaaattaaagttttatagaaattaatgagcttttccatgtctttctgaaggagtggactcaatctagtgacacaaatgtattctttgacttaatctacagatgacagatttgattttggtgttctaatgtttgattgacttcattttggagcatgtatatctgtgcacaaaatggatgcttagtgggttctcattaatttggtaagtggtccaacacaaggtgagtgtgggtggagcagcgccgtgtgccttcagtgccgcggtcactgtgtgcatactggctgtgagacctagcttatcatttcagagctgatggaggagacgtgggttcgatccctaggttgagaagatgccttgcagtaggaaatggcagcccactccagtatccttgcctggagaatcccacagacagaggagcctgccaggctcaaagagtgaaacgtgactgaaccactgggcacacacgcacacagtttcaggaagcactctgagctctgcttcagaagtcctgatacgggacagtgtgaacctagggaatgtgcttaggtaagggaccattaagaaataggttttgctttgcttctaagaatgaggcctttgcttctttgttgagtttagactcctattggtgagctgaggagaagcaattcttgagaacttcatggaggttataactggctctaaagagtcttggttaaactacctgagtaactagttcctaggacaagcaaactttgcaggagtccttttggttgtacatacagctccctgggattgctgtaagttccaagtcatccttgtttgaaatagtagttgtccagcttgaatgggcatcaagttttagagggcacagattgctgggaccacctccagagtttctgattgtgtggcctgacgtggggaattgataatttacatttttgacaagtttccaggtgatgctgctgctgttttgggaacaacactttaagaaccattggcttagagcatcctcaggtgtctgagtttggggagctatgcaaggttagttgggatctttacataattcctccagtgtgtggaggtgagcttccaggtatattaattcattcagtaagtgtgaatgtttcagttgttagaggatactgtggagaaagcgcacagaaatgcctccattggtgaaacttttatgagcgtaggcagggattaacctgatagtagttcttctggttatcaatgcttacaggtgagcctgtttctcctcctagtttccttctacatattttactgtcttttggaattttcaaatttagcaataaggacatgatattaattatcaccatcacttttgagtatttgttcttgtcagatactgtgcagctaagtgcttttcattcattattccatttaatctttagaacaatcctggtgttttcatctagatctaaaagatgaagaactttaaaaaggttggtaacttacacaagattatgcagctagttaatggcggtgctaggtctgtttgactgcaaggccatccatactctttactaccaggcttttaaaattacagattgtgaccactagtgggtcatgaaatcagtttgttaggtctcaaactgcactttttggggaaaaaattgagtagaaaatcgcaaggtaggataagcattgtttcttgaaattcttgttttggctgggtatatacatatgtgagtattgagttctgactcaagaatatatttgttatagtagatcacagtaaaaatgtttgtatgcttctgccttcttggctatggaactctatgtcatttaataattttttaaaaacagtagaaaatttaggccttggaaaagtaattttttcaagagcaggaacattagtggcagcgcaaagacaagatgtcttcagtcgctgtgtgcgtgcacactcagtcttgtccgactcttttgtgatcccgtggactatagcccatcatgcttctctgtttatggaattttccaggcaagagtactggagcgggtttctactccttcttcaggggatcttcctgacccagggatcaaacccatgtctcctacatcagtaggtgggttctttaccactgagccacctgggtagcacatttcagctccttgtctactgctgtagtcctcacaccgtgctgcctccttaacagtgctctgtattacctgcgaattggggcttatctttccacgtgatagcaaatgtgccatggaacctttcaagatgttgacaaaatctgaaaagggaagttgaatctcagcctgttctgggtaggtgacagttctgccatggagcccccaaagtctacacataaagctttcacatttctcctgttacttctggtatactcaatgaaatgaggataataatattaactaacagtgccaggctgtaagcatgtttcatatattaactctcagtagtaattattttgacagggtggccatggctgggtcatgaacttggctgttttgagtgagaaggggcatcctaccagcatgagttaacacttctctatgccggctccagttcctcattttgttcctgctgacttcagagctattcttctcatagctgagcttaccggagagtgatctcagctttatcttcttgtttcacatcacctacctttaataggtggataatttaggttcctgttactttcccagagtattagtgcatcactgatttgcatcaggggcagggctgtggattgtcagcatgaacaggtgatggtagacattggtcccccatgcagaatgctgtcccaacactgcacgaaggagcttactacagtctctccaggagtactgggggacacgtggaaaccacttgagaatgcttacaaactcttccagcagacaatccatgaaggctgaaggaatgcaaagtcaaggcgaaccctcgtaggaaggggaggctaatacattccagttagaagaatgacatgtagaagcaagtaaggatgaggtggaaaccttcaatcatgaattatgaaattagagctagaaggagcctgaaaggcctggaagagtgaagtgagtggcagcttagatggtagagagccaggcatggaacctaggtcttcattccgtggcccctttcatcctaagatctgtttactggatttgtcttctgaagcacctgattacagaaaagagtgactctccttaccctagtgtgaatgaaataaagacaccaggaacatgtaccaggcttatttagtttctttgcattttccccaaatgctgtgatccccccagggctatgtgtgtcctagtttgtgaaatgctggggcagaggaacttcaaaacttaaaaaaaaaagtatgccccaagaaaaacttattttttggagtatggaccctctcctccatgtaagtaaatatttataaattatattcctgtacaactattaaaccatatgtgcatatgttaatcttagagttcagttatatggttttatattgtgatgtacacattgtacacattctaaaagttcttttggtacctcagtggatggtcttgtacctcttctacctctgggatatacagatctgattttgtagaccactggtccagactgaaaactgaacagttcaatgtcaagactattggttctttcattagctagattatttttcactcctggtaatttgaatgtctctctccaaaacagtttttgaagttttgagttaaaaagctatcttttcagagtagaagagataaagatggaggatatatgtaaattaggttgaatttctccttaagaaagatcactgtttttgatctaaggagaatgcagaattttcctttttatggtctgtattggtgcaaaacccttctttgatgacattaattaagccttccctcctcactgctattgctgttaacctgcttcatagtccatattagagatttcttcaggggtgctagtggtaaagaatccactggccagtgcttgagacgcaggagacgtgggcttgatccctgggtcaagaagatcccctagagtaggcaatggcattccactccagtattcttgcctggaaaattcaatgggcagaggagcctggcaggctgcagtccatggggctgcagagtccaacacaactgagcacgcacacacacacagttcatagtaaggctccataaatgtttgctgattttttaaaacaatactttcagcctaagccagttagaaatgacagagcagtaggatggagaatataccacacttacctgtggaatgctgttgaatactactggttgcatgaaagggttgttgatttgttttaggccctctgcaatattagagcaagaagttgagcaagatttgtaattagaagtaaagaaaataaattagttcatttcatttcagagtttggaagctcaggactgtgaagattatcaaagacaaagatactttgagtaaatgcagtgagaattaatgttgataataagaaattccatttttgtagtaaaataataacactggtcattgtctgtggagagatgctggagagcaaattagagagagggataaaagtcactggctacacagcagagccagacaagctcaggggcatgtattatgtacatgcagatatttcctaatattatttcagttgtaaggatgcaaatcatttcaaaattagagcagctcagttcactgttactggaaaaacgagttaaaccaagcacatgtcctactgagggtgagtcaacagtgtcattttaacataaggagggatagtatattaagtgagttattccaagtcctgtggttttcctccagctgagcaaagagctggtgtttcagaaacagggcttagatgaaaaaaaaaatttttgcccatttcctctcttaattatagctgtttagttctcttttgcctgaaccttttcaaaaaccccttttcttagatttttgtcatcagatttcctgaattttgatgggatacttatttacagagactattttatttattatagaccaattctggtttaaaactttaatttctccaccaatttatggaccaggattggtgtatggtgtattggtatatggtgtcagagatcctttaaaaaatagagtaagagaaacagaaaagtaatctattttaccaagtcattatattctacagttctttagtggtatggatatgaaggtgctattttatggaacaaaatatcaaattgtagtgctgaaagttatccctttggttttggaagagaagagtcttatattttcagtcttaaggaaaaacagttctcttagctttctgaggttttctcaagtgagatccaatatcactatgggtatgtgtctgaatagtttatttcttggtttgggaaggtgaatttttgtctttttttcctctcagtggatatctttagttagagcagcagaccagatgcgggaaatattctctctcttacagattcttggtttgccacattagttattacccatcttctctgagtagcaggccacatttttcctgtttagtgattcagtttttattaacttcactgcgcatgtgttcttgaaggaatttatttctgatcagttgaattatgggtagcttcatcaaatgatgataggttgcctgcttttaattgggtcatcgtttgtaggagtaaaactcatcaagataaggtgtgatcattcttacgatctggttccttaatttccctttgcttctgtgatgctactctattattaagaagcagcatctggttacaattttacaaaggaagaactctatacaatttcacctgttctcttatagagcagtttgtttttgtctttttcctaagaaatagtacatggtagcatatcgaagcctagagttggcaagttttcaaaagtggggttctttggttgtggaggtaggaatgatactagtgagtagatgtcagtccttgttagggcatgtgcatgaagagtggctctgaaaggcagcattggtggcccttcttatcctggggactcagtcttgcctttgtttttgacaagcctgtggtcattagctgatctttggcatgagtgttctttgtatgtgtagctggtatgtgggtgcttatctacatgaaaatgttacagtcacacatgtgcatgatagaggcttgcaggtttttgtgggtatccagttcttctgactgcattgcaacaggtgtattgagtgaaaggatgctgaactaggaggtaaaagaattgtgttttagtcttggtttggccatcttgtcttgaatgactttgaataagtcccttgtttctttgagttgcagtttcctcttctgtaaaatggtgttaataatgatttacatactttcaagattgttttggggatcaaaagagatcatttttatgaaaatgttttataaagtaggaaggttcttttattaatatattatctttggccagttgatctgggtatattcagccttctcagggctgagaaattgaaggtgggagctgactttttgtttggccacagtgttcacattggccttagagtgcttgtaggtttgggtgggaggacataggtagaaataagatgaaaattcctgtgctgggatgttaatcctgcctgaagctgtgaaggtgttagttcctcagttgtgttttactctttccgaccctatggactatagcttgccaggctcctccattgtccatggaattctccaggcaagaatactggagtgggttgccatttccttctcgggaatcttcctgacccagggatcaaacctgctgctgctgctgctgctgctgctgctaagtcgcttcagtcgtgtccgactctgtgcgaccccatagacggcagcccaccaggctcccccgtccctgggattctccaggcaagaacactggagtgggttgccatttccttctccagtgcatgaaagtgaaaagtgaaagtgaagtcgctcagtcgtgttcgactcttcgcgaccccatggactgcagcccaccaggctcctccattcatgggattctccaggcaaaagtactggagtggggtgccattgccttctctggggatcaaatctggatctcctgaattgcaggcagattctttacagtctgagccactagggaagcctgtgttgccaatcaataccaactccatctgtaagtgcttgttgttgttgatgttgagtcctgtccgactctttgtgatcttgtggactgtagcacaacagttgcttgttagtctcattttactgggtggtggtggggggcactgaccagctaacttatttaggatacaactggccagtttctgaaattcacttctttagaattatcctttgaggggtaaggtattgcatctttggaaggttgatgatttggggttattttctgtggagggaggtttaagctcacctgcttttgataaacttgttctagttaacaattctaaagccagattacattgagggagaggatactggactcatttgatgtttttagtataaaacttagaatatttgagactttgtgtggtaactatatctaggcttacttccaaagtgattacaaagccttggtcttaatgttttcgatgaggtaatgtgtgctttggtggggaggaggagagatgttatttaatcaccagcaaacactaatacactaataactacattcactaaatcttttgtgcctgtgcctgaactgagggttacttgctttaatgctggttttccgaaagaacttaatcctattaatgtggtgaggtgatggtgagaagggcatcttcattaggcctggagtggtataactggtaaaactcccttggtaaatctctcttgttcaacctgagtgtcactcccatgttcccaaagtggaatgaatttttattgaaaagagcattttaagagtgataaacaaagagattaaaatatctcctctgtcaggtcattgtgaccttagaaagccagaacaagctatcattttgcagattttagttttgtcttcttttgtgggaaattaaggacttgtttatgttccctttgagggagatagaaagcgactgccctgctccttcaacagtttggctggcaaagattttccaagcattttccctgtgcctggcatcatagctgggttgaagctaggtagagcagacaaggtgcaggtgttgcccattctggagtctctctcctttgctgaaactccttggactgagtgcagcgaagcagatgaaatgagtggtaggccagggcatctacttaaaaaaaattcttctaggaatttatgactcatttatgagagtaggggaagcactgaactccagaaagtcaacaccccttactggatttacccctcaaattttaatttaatacattggagtttagatcattgcttttgctttttctgagaactctggactgaaactgggacaaggggagtctttcagcctctttagaaccaagaaaacctttgttaaaggcagtgtaacttttgccaaatcagatgttgctgcagatagagaaacctagatttccttcccttgtttgaagacacaaacaaattttgatatggtcacttacgaatatacagatataccttggagatattgtgagttcagtaccagaccatcccaataaagcaagttacatgaattttttggattccagagcatgtaaaagttacatttatactattctgtagtctgttatatgtgtaatagcattatattaaaaatataaaacttaattaaataatactttgttgctaaaaatgctgaccaccatctgagaacttcatcaaattgtaatctttttgctggtgaagagtcttgtctcaatattggtggctgctgactgatcagggtggtggttgctgaagattgggatggctgtagcaatttcttaagataatgaattttgctgcattgattgacttttctttttgtgaacaatttctctgtatatcgctcaatgctgtttgatagcatttgacccacagtagaacttttttcaaaattgaaatcagtcttctcaaactgctgttgctttatcaattaagttcaataaaatattctaaatcctatgttgtcatttcaacagtcttcacagtatcttcactaggagtagattctatctcaggaaactgctttctttgctcatctgtaagaagcatatcataatcatggtatgattgagttaaagttttatcatgaaattgatcaatataaccacatcttcaggctctacttctaatgaaagttctcttgttatatctaccacatatgtagttattttgtccactgaggtcttgttgtaagattgaaatatagttaatacacaatattttattagtttcaggtataatacatagatttgacatcagcatacattatagaatggtcaccatgataagactagtaaccatatgtcccatacaaagtttttgcagcattatttaccatattccttatattacattcctgtgccttatttattttataactggatgtttatacctctgaatccccttcacttattttgtttttacctcatcacactctctcctctggcaaccatccgttctctgtatctgtgagtctgttttcattttgttttgtgttttagattccatgtataaagtgagatcttacagtatttttctctctctaacatttcacttagcatactactctccagattgatctatgttgtttgcaaatggaaagtttttttatggcttagtattattctgttattattattattatgagtattattctgttattattctgggcttccctgatagctcagttggtaaagaatccacctgcaatgcaggagaccctggttcgattcctgggttgggaagatctgctggagaagggataggctacccactccaatattcttgagcttcccttgtggctcaggtggtaaagaatccacctgcaacgtgggagacctgggttcgatccctgggttgggatgatcccccggagaagggaaaggctacccactccagtattctggcctggaaaattccatggactgtatagtctgtggagtcccaaagaattggacatgactgagcaactttcattttctgttatatgtttatatataccacctcttctttatctgttcatctgttgatggacacttacattgcttctatatcctggctattgtaaatgttgttatgaacattagtgtgcatgtaacttttcaaattagcgtttttgttttctttgggtgaatacccagaagtgaaattacaggatcatatggcaattctatttttagttttttgaggagccaccatattattttccatagtggctgtaccaatttatattccaccaacagtttatgagggttcccttttctacacattctcaccaacacttggtatttgttgtctttttgatgatagtcattctcacaggtgtaaggagctatctcattgtagttttgatttgtatttccctaatgattagtcttgttgggcatcttttcatgtgtctgttggcaatttatatgtctttctccagaaaaatacctattcagagtctcagctcaattttgataagagttttctttttgtttgtttttgatgttgatttatatgagttctttgtacgttttggatattcagtccttatcagatatatcatttgcaaatattttctcccattcagtaaattgtctttttgttttgctgatagtttcctttgctgcgcaaagctttttagtttgatatagtcttattcgtttatttttgttttgtttcccttgcctgaagaaacaaattcaaaaaaatattgctgagatcagtgtcagagaccatattacctatgttttctgtgttttcttctgggaattttatggtttcaggtcttacatttaagtctttcattcagtttgaatttgtttttgtatattgtgtgagaaagtagtccagtttgattattttgcaggcagttgtttcattttcccaacaccaattattgaagagactgtctttcccctattgtatattcttatctccttttaattgactgtatgaacatgggtttacttctgggctttctattttgttccattgatcagtgtgtctgtttttgtgccatatcatactgttttaattacagtttgtaatatagttccagtttgggaacatgatatttccatctttgctctttctcaagcttatttggctattgagggtcttttgtggttccatacaaaatttttaggattattcattctggttctgtgaaaaataccattgatattttgataggggattttcttgagtctgtagatttctttctacagttaggacgtttaaacagtattgcttctaatccatgaggatggtgtatctcttcatttgtttgtatcatctttagttcctttcattaatgtcgtatagttttcccagtacaagtcttatatcttttagcattattcctaggtattttattctttttgatacaattgtaaatgagatggttttcttaatttctctttctgattattattagtgtatagaattagaacagttttctgtattttgtatcctgcaactttattgaatttattctaatagtttttttttttttttggtagcatctttggattttctacatatagtataatgtaacaatgatatatagtatagacatatagtataatgtaacagtatctgcaaacagtgatagttttacttcttttaattccttttatttattttttttcttgtctgattgctgtagctagaacattcaatactatttatattgaataaaaatggcaagagtgggcatctttttcttgttcctactcttggagtaaatgctttcaccttttcaccattaagctgaggccttgtcatatatggcctttagtatgttgaggtaggttccttctgtcttcattttttgagagtttcttttatcataaatagatattgaattttgtctaaaagttttttctgcacctatcaagatgataatatgatttctattcttcagttttgtttaattactgatttagtttaaattctggtaatcagtttggctatattttgtacttcctgattcaatttttgggaaattgtacagttttaggaatttatccatttttttctaggttgtccattttattgacataattacttgtggtaatatggttctttgtgtttctttgctgtctgttgtaacttctttttcatttttgattttggcgattccagtatttttcttgatgagtctggctgaagatctatcaattttatttatttttttcaaagaaccagctcctagtgtcattgatcttttctgttatttcgtagtctctatttcacttacttccactctgatctttattgtttctttccctccgttaacggtggattctgtacgtcttttcctagttcctcccagtgtaaggttaggctgtttggacttttcctggttccgaggtagagctgtatcactgtaaacctccctttctgaactgcttttgctgcatctcgtggattttgctcattgtgtttccattttcatttgtctctcggtatttctttatttttctctttgatttttttcagtaaccaatttattgtttagtagcatgttgttctggagaaggcaatggcaacccactccagtattcttgcctggaggatcccagggatgggggagcctggtgggctgctgtctgtggggtcacacagagtcagacacgactgaagcgacttggcagcagcagcagcagcagcagcatgttgtttagacaccatgtgtttgcatgctttcttagtctctctttttttttggtaatggatttctagtctcatactatgatggttagaaaagatgcttgatatgatttcagttttcttaaatttactgagacttgttttatggcctagcatgtgatctttcttagagaatgttctgtgggcacttggaatgaattatattctgctgttttcgaatgaagtgttctatatatatctattaaatccacttggtataatgtgtcatttaaggccagcatttcattcctgatttctgtctagtgatctgtgcattgatataagtggaatgttaaaagtccccagttattgtattactgtctttttctcactttgtttgttaatattttctaaatacataaggacctaatgtagctcagctggtaaagaatctgcctgcaatgctggagacctgggtttgatccctgggttgggaagattccctggagaagggaaaggctacccactctagtattctggcctggagaattccatggagtgtataggccatggggtcacaaagagttggacacggctgagtgactttcactttcaaggacctaatacataaggacctaatacctacataagtatttaggtcctcctttgctaagtgcacacatgtttacagttgtcatgccttcttcttagattgctccctttatcattatgcagtgttctaatctgtctcttgttacagtctttaaagtctgttttatctcatgtaagtattgctaccccagctttcttttcatttacacttgtgtggaatatctttttccacactctcactttcagtctctgtgtgtctttagatctgaagtgactctcttgtagtcagcatatatatgggtcttgcttttgcatccattcagctactctgtgtctttttattagagtgtttagtctatttacatttaaagtaattattgataatatgtttttattgccatttgttaattgttttctggttgtttttctatttctttttgttcttttcctttaaaatttgaccagtatcttttgtattgtatttggactcctttctcttttgttgtacatctattacagatttgtgatttgtggttactctgaggctcatatacaacaacatagatatctatatatttcacttcttttgtcttttaacctttatactagctttataagtggttgatctactacctttactgtatttttatctttaccaatgagattttttcttacataatttttacatttttagttgtggccttttctgcttagagatgtccatttaaccttatactgtgaagcctgtttgtgtgggttagttgctcagttgtgtctgactctttgcgactccatggactgtagcccatcaggctcctttgtccatgaaattctccaggcaaggatactggagtgggttgtcatttccttctctaaaaagcctgtttagtggtgctgaactctttcagcttttgcttatatgtaaaactctttatctcgccttcaaatctgaatgataattttttttgggtagagtgttctttgttgtaggttttcccctttcatcactttgaatatactgtggcactcccttctggcctgcaaagtttctgatgaaaagtcagctgatagtattatgggagtttccttgtacttaattagttgcgtttttcttcctgcttttaagattctgtctttttttttttcccccaccattttaattatggtgtgtcttggtgtgaactctttgggttcattttgtttggggactctctctgcttcctatacttggatgtctgtttccaccctccgtttagggaagttttccgctataaatcttcagataagttctgtgctcttctctctctttcttctgggatgcctataatgcaaatatcgatatccttgacgttgtctcagaggtctcttaaactgcatttttagaagttttttcttttttctgtttagcttcagtggtttccactactctgtcttccagattgctcatctgttcctttgaatcatctaatccagtgttgattccttctgttgtattttttatctcagttgtattcaactctgcttggtttttctttatatcatgtaactttttgggtgaaattctccttgtgttcatccattcttctcctaagcttgttgaacatctttatggtcattacctgagctctttattgggtagattgcttatctgcacttttggaattcttcttctaagatttttgtcttgttccatcgtttggaacataacccctgtctcctcattttgcccaattctccatgtttatttctctgtgttaggtaggtcagttatttttcccgatcgtagagaagtagccttaagagatatgccattgggcccaacagcatgctccactctgatcactgcagctatatatcctggggtagcacctgtgtaggccgtgtccaccctactgttgtatcagggataactcttatgtgcaggctgattagtggggctggtccctggcctggctgactgcaaggtcacgtctcatgcagtacatgtaagccagcttgagggcaggttagggttcccatgcaattgactatgtgacctgggggctctgaggctggcactggcttgctggagggcagggcttccactgaagtcttgaacctcccaaagtcatccaagagggtttgaatcagtgtattccaaactcctaaatgttgatattttgacctcttcccatgaatcacagatgttctcaataatatttaaaaatggtgaatccttcctaggtggttttcaatttgcttgcctagatccatcagagaaatctccatctaaggcagctgtagccttacaaaatgtatttcttaaataataagacttgaaaatcaaaattacatactgatccatgggctgcagaaaggatgttgtgttagtgccatgaaaacaacattaatctcattgtacatgtccatcagagccctacggtaacttcagatgaattgtcaatgagcagtggtattttgaaaggacttttcatctgagtagtaggtctcaatggtgggcttagaatattctgtaagccatgttgtaaagaggtatactcttatctaggctttgatccatttatagggcataggcagagtagatttagcatatttcttaatggccctaggattttttgagtggtaaataagcattggattcaacttaaagttagcagctactttagcccctaacagaataatctgttttttgaagctgtgaagtcagatattgacttctctctaactgtggaagtagtagagggcatcttctatatagggatgtttcatctactttgaaaagcacttttattaattatcttagctagattttctggaaaacttcctgcagcttctacttagcactctgtttttatgttaagagatgacttctttccttaaacctcatgaaccaacctctgctagcttcagactttgtttctgcagctttatcacttctctcaggcttcatagaaatgaagagagttagggccttgttctggattaagctttgacttaagggagtattgtgactgctttgttcttcttttccagaccactgaaactttctctatatcagcaataaggcaattttactttcttattcctcatgtattcactggagaagcacttttaatgtccttcaagaacttttcctttgcattcacagtttggctaagcatttggtgcaggaggcccagctttcagcctatctcagctttcaacttgccttcctcactaagcttaatcatttttagcctttttatataaagccagatgtatgactcttcctttcacttgaactcttaaaggtcattatagagttattaagtgactcttattaacaatgtcagttttgttatgtctcagggaatatagaaacccaaagagagggagaaagataagagaatggctggttagtgaagtagtcagaccacacatatttattaagttcactgtcttatatggggacaatacatggcactccaagacaattaaaacagtaacatcagatcactgatcactgatcacaaatcagcataacaaatacaatgataatgaagaaatttgaaatgttgtgagaacgtgtgtctcagggtacagagatgtgaagtgagaagtagtagcctttggaaaaatggcactgacagattggttccatgcagggttgccatatactttcagtttgtaaaaatgcaataaagtgcaataaaggaaaatacagtacaacaagataagcctgagtacagaattttgtgtttgctgtctttctggctcttgcagaaacaattagatgagcaagaatggacacaagcacttgcaggccaaatggtgactattagtgtgctgggctgtttttattaaaatgcttggtgtgactccacagaaatctaagtcatcttagagataaattcttgcttatactcacagtaaagaaagagtatgagtagatgaaagtgttttggagttgaaggactaggatttttcagacaaattgattgaactttgaaattagcagctcttcatcaaatatttttaaacatgcattattattattcttttctgttgattgtggagccaaagttttgtttgtgtgagttgacatagatttgtgtttgaagaaacaaaagaagggagagactgaaaataaaagtaaataaaagtagaaatttgggtctatgtttcatgttttcatttccccttgacatttaataaagattttttattttccttctgttacctgtccctgttccaagattgttgccccaggcatgttctctggaaatggggattatatgcacttatcatctccagacttagatattttccttgcagtactggtttgtgggcttatctggaatattttgggtatgaacctatggttcaggaccttctgaactcttgggtttagacaattctcagtgaggtgtgaaggaattttgagttgaatattgtccacaggtgaagagggtttagttttggctgtagatatagggcctctgtgagccagataataatagagaaataaccgaaatgttaggaatgtatcctctgcaaaccctgacttcagaacatttcgtgggactttgtataagattcagacctcctattatgcattagcataatacactgattatagtgttccagagattgctgccaaatgatttttaaaaatccttcatgtgaggagggatgcccatggggaaatctgaagctgttctctgggttttccctgtttggtttggggaagtttccataattctatataataacatatacagtttaggttttttaattttcatttttgacataattttgtccctcatttctttctttttaggatatacctctaaattaacaaacagtaggaattgtctactctgtttaaaaagcattctgaacaatttaagttaaagggatgctttgtttcttttgggtgggtagcaagaagattatatgtatttataaaattcttttccagcaagggtagttaaagcatgtatttagaattaagcactttttgaaaaatgaactgtgcttaacaaaacagtcttttaaaaactttaaaatgggagtgtttactgaaagtacaggaaattggtgacaggcagaatttgtctgtgataacagaacagatagagaccatcgaacaggaaagatgatagaggagatgacaatggagtaatacctcagctggcctcttttaccactaaggaatgcaaaaatatttagtcctttgtgtagagaataattttattccaaatatgatataacttcttaccctctgttgggttttattacaccaagatcctgatccttttggacatgaaaacctggcaactgttttggtcagtgacattttacaaaaagataccaggtggtgctagtgggaaagaatccacctgccagtgccagacccaagagatgtggtttcaatacctgggttgggaagatcttctggagtaggaaatggcaacccactccagtattcttgcctggaaaattccatggacagaggagcctggtgggctatagtccatgaggtcgcaaagagttggacatgactgagcaactgaacatagcacacagatacttacagtgaagaaatacgttggagctactttggaccatgttggtgcttattgttttgtgggtgtttatcagtgaatccgggcatcccagatggcgctagtggtaaaggacctacctgccagtgcaggaagtgtcggagacagaggtgcgatccctgggttgggaagatcccctggaggagggcatggcaactcactctagtgttctggcctggagaatcccccatggacagaggagcctggcggactatggtccatagggttgcaaagagtcacacatgactgaagtgacttagcacatgtgcaaataagtgaatccagtcatggggaaaatggtactggaaaatggtacatgtatcttagcttagcattcacttggaattttttataactatgtttttcttcatttgccatttagatgtaaattatttggcttccattcaaacaatttaaatcagttcttaccgtaatacacatggcttaagattcatgggtgagggtgtatcttcattcatgcagattttaagacaggaacttccaaaaatgttttagatttgtgaagatctctctcaatttttcatccctgttaaaggtcagaaaatttgcaccattttttccttcttctttttacttttctactccttatacaacatgaagtcagaattagtcaacacagtatccctacacttactaaaattggagctttagaatgtttaagacacataaaccggtgattgagtttttaaataggttttgtctgagttatagttagttagttcattgaatatcttatgagtgttgcgtatacctcctacggtcgagacactattctaggttctggttatacaaagacgagccaatcatggtcactgcctttagggaatttgcacagagttggagagagattggtgagcctatacttataatgcaactgcctaagatgtttaggggagtacagaggagggacatatagattagactggatggacatgtaaatcagactgcagggtctctgagggcttcttaaggaaggtaacggtttatctgtgctttgaaatataagtaggaatattcagcattcttgccaggaattctccaggcaagatagaaaaggaagaaaggaatgagaagtgttttccaggtggaagaatgtgcatgtgtgtaaagattattaacaaattggctacatctgaattaaaagtatatatcttgcatttcatatggaagagtaaagtcccttttcgcccgcaaactaagaaattaaaatttaactcataaattaatttttctgcagtcttaaaaaatacagcaaaacagaacaaaaaggaaaaaacatagcgtgtagcatatgtcattatagcacagcaagtgttaatgaatttgtttttgcaataaatccaatattataaaatagaacaaaactggaattttttaaagtcaaagattattcaagattcatcaactcactgggatgaatatctttataaaacaaaaatgctagaaataatttttaaaatacctttatttataaactcaatttttcgttggttatattttcttaaatcaagacatgtgagtgtgtgtatgtgctcagtggtgtcagactctgtgactccatggaccaccgggctcctctatccatggaattttccaggcaagaatactagagcaggctgccatttcctactccaagggatcttcccgacccgggaactgaaccagtagtctcttgtgtctgctgcattggcaggcagattctttaccactgcgccacctgagaagtcagatcaaagcatcagttcagttcagtcgctcagtcgtgtccagctctttgcaaccccatggactgtagcacgccaggcttccttgtccatcatcagttcccagagcttgctcaaactcatgtccatcgagtgggtaatgccatccaaccatttcattttctgtcatccccttcttttcctgccttcaatctttcccaacatccgtgtctttcccagtgagtcagttctttgcatcaggtgtctgttgcatcgcgaagtcaatactttgcaaagtattggagattcagcttcagcatctgtccttccagtgaatactcagggttgatttcctttaggatcaaggcataccagttttttaaaagtggaaatattttgctatgaatcttatatcttaagtcaatttctgtgcgtctggtatcagtaactcttaagtagaaaacaaatgtcctattagctatacctgtaaggggcatagaaatcctccaaatgctatcagggaaagaaaattagtatctcccttgttgcatttatgtgcctttttatcaaggcagatttcaaagaggaagacagatgtttctccactttgtttttatttaaatgtactacttgggatttgaagcttctgcacttcttctgtttgtttggatttttttttatggcttgatcccaaaaaaatggaatgaaaaatttagtgaaagctttgttgtttgaaattgcagggtgctgtgagacttactgcaaatccctgatgtctccctgtctgccttcaattctcctatttttggtaataatgcaagcagtcattttagaaaactttgctttgttcattttactgagcctcttccagacaccatgtgcctgaagcaatagcagccagccacagccaaggtcttagggcgtaagctcagacttcatctttctcaaatgctgcctcttgaaatttgcataaatgttgaaaagaaaattaaaagggccctctatacctcctcttcacatattttaggaaccccagccattcaaggcactgaaatgtcttttgagtcatctgtggatataaaagcacaaatagataccatcctgcagatagagggagcaggatatggagaaaaaaaaaatcatgtgagacagacaacagacagaggcttatttgaagaggctacaaagcagcaagtaatgccaatttaaagcgattacatgttaatacaacaagtgaaacacatttgaaggctgctcagattacactggctggggtgcagacttaattactcatgttagagattctgaaaacaaagggaggcttttagaccagtgatacgtacctgacatgatactgaaaagccttggaaaaacttaggtaaatgcctagagaaatttttaaggacgattccagtaagttggatacctgaggtctgtccctaaatgggtaaattcctgaggcactggaactggttaaaatcaatgacagttcattttgttgtttgctgtatttatatacaagtgaggctgataaacatgaataaatactagaaccttgtctggactgagttatacttagagttaaacaacaaaggtttgtgttatatttcttaaaggttctttccggagtgattctgaaattgatattgagagaaggcctgccaaagtatacaataaaaacaatttttatttcatttctgtttatcttagagtaatttgggcaggtcatattctgtctgtccctactcctaacttccctagactgtgtgggctgtgaggataggaattttttctccgtttgactttcttgcaatgattagtaatggactgtgcttaagagtagttgtttaacaaatattgaaagcaccatattaaaactaaatgacatttttgcttatatatagtgttaatttacctttcatgaatcacttctcaggcttgcagtgctataccttttttttaaagcaatgggtgactggtttttgtttttgtttttttagatagtttagtatctcttttattagaccttaattggtgacagctgggaagaatttattccatttatttatagtatgacctaaatttcttaggactcttgatttctcagtttgtttaaagtagagtctgattgacacaagaagttcctttaaagccaccatttatcatgaaatcaatttataaagaattcagctacctactatgtgaaagtaagtgaagtgaaagtcgctccttgccaccccatggactatacagtccatggaattctccaggatagaatgctggagcgggtagcctttcccttctccaggggatcttcccaccctggggattgaacccaggtctcccacattgcaggtagattctttaccagctgagccacaagggaagcccaagaatactggagtgggtagcctatcccttctccaggggatcttcccgacccaggaatcaaacttgggtctccctgcattacaggactcctactatgtgagcaatccttttttgagttcttactatgtataagacattgttctaggctctttaaatgcattaattcagttaattcttatcagggctctggtaagaaatgaaaacacaaagaggataagagatagtaaatgggggagctagaattccagctgagatcctgattgcagcatttttgcttcaatcactgaattagattgcctcagtcatacagaagagaagtagtttctatcctctaggaacttagaagtgtgaaagccgagagagttagaagacagtacagaattaaatgctaaacttcttagcatttattagtgagttattagtgttaaagagtaggggttggcctgagaggacagaactgtccaggggaagctttctgggccaggcaggaggcgagctgggctaggaggaaggagcagaatttagatactaaaggggaagtagcaaccagaggaagctgagatactagtggaggcaaggaactgagttcatggtgatctatttgagctaaagtctgcattcaaagcggttcctggtaacgttggacccactgtgggctgtgatcttgaaggcacaggtgagggcttagactggaagaattaagaagtgacttgtccctggaagaaaaaatgccaccaggcttggcactgtatccacccaaggaactgcactgacctttcagcgggttcttctgaagccaagctgagaataacttctgagaattaaataagaactgaaagccactatatgtagatgggcaagtggtggaaggacacgttgcaagtgatacttctgggaggttagaggtgattaaaataaaatccttaccacttggggggagctgagaaaacgggtagcttcagcctagtctaaaaaggaataccttgcataagcttatatcagaaaggaaaaaaaaacaaaaccttcattacactggagcactgaatggtcctgagtttttcaaacccagatttggctgtattattttccttgcttagggcagcccagtagtctgtgcttacccctaaagtagaagctgtagtctaacccttgcctgccttccttgctatctcctgttagtctcccctttgtttaataatttctagccttgcaaacatggaataccagtctcattccatcttcgggcttttatacttggtttcctctttttgggatcacttttcacctgtatcatcatgatacttgttcttaccacctgagagaggccttgcctagtcaccgtatctaaagtaggtccctatacctctggccttcctggttatgttgtattccagaactgggttctgcttctagtagaatctatcacttactactgtgagtgaactttattcattcatttattatgtctttgcctagtggaaataaggttcatgtggacagggactaataaaacatgatttttctgacaccacggcctgcatctcacatattagatacactgtaagtatgtttgtttcttcattcttccttccttcctttctttccttttctttttgcttttgtggctttcgggatcttagttccctgaccagggattgaacccatgccctgggtggtgaaagtgcaaagtcctaaccactggacctccaggaaattccctctgtgtgtttctgaatattggaaaactagccctcaaatggagaaggcaatggcaccccacttctgtactcttgcctggaaaatcccatggacggaggagcctggtaggctgcagtccatggggtcgcggagagtcggacacaactgagcaacttcactttcacctttcactttcatgcagtggagagggaaatagcaacccactccagtgttcttgcctggagaatcccagggacgagggagcctcgtgggctgccgtctatggggccgcacagagctggacacaactgaagtgacttagcagcagcagcagcagtccccaaatacacagaaaacgtggggacttccctggtggtccactggttgagaatccaccttccaaagtgggggatgttgattcagcccctggtcagggtactaagatcccacatgcagcagggcaactaagccctcgaactacaactagagaaaagtccaagagccacaaaattaaaaaaaaaaaaaaaaggaaaatgtgtgaaatttagcatctagatgttgtgtcacattgccgagtgatgcagtgatgaaattggaatctactgctgctttttgtttttgccttttttggggcaggggcatgcaaatacagatacacagtatatgagattgatatttatcaagcagctccaaccagtaacactgaagaagctgaagttgaatggttctatgaagacctacaagaccttttagaactaacactcaaaaaagatgtccttttcattatagggccctgggatgcaaaagtaggaagtcaagaaacacctggagtaaaaggcaaatttggccttggaatgtggaatgaagcagggcaaaggctaatagaatttttccaagagaacgcactggtcatagcaaacaccctcttccaacaacacaagagaagactctacacatggacatcaccagatggtcaacaccgaaatcagattgattatattctctgcagccaaagatggagaagctctgtacagtcaacaaaaacaagaccaggagctgactgtggctcagatcatgagctccttattgccaaattcagacttaaattgcagaaagtagggaaaaccgctagaccattcaggtatgacctcaatcaaatcccttatgattatacagtggaagtgagaaatagatttaagggactagatctgatagacagagtactgatgaactatggaatgaggtttgtgacattgtacaggagacagggatcaagaccatccccatggaaaagaaatacaaatagctgtgaaaagaagaaaagcgaaaagcaaaggagaaaaagaaagtattcctgtctgaatgcagagttccaaagaatagcaagaagagataaagccttcctcagcaatcaatgcaaagaaatagaggaaaacaacagaatgggaaagactagagatctcttcaagaaaattagagataccaagggaatatttcatgcaaagatgggcttgataaaggacagaaatggtctggacctaacagaagcagaagatattaagaagaggtggcaagaatacacagaagaactgtacaaaaaagatcttcacgaccaagataatcacattggtgtgatcactcatctagagccagacatcctggaatgtgaagtcaagtgggccttagaaagcatccctacgaacaaagctagtggaggtgatggaattccagtggagctatttcaaatcctggaagatgatgctgtgaaagtgttgcactcaatatgccagcaaatttggaaaactcagcaggggccacaggactggaaaaggtcagttttcattccaatcccaaagaaaggcaatgccaaggaatgttcaaactaccacacaattgcactcatctcacacgctagtaaagtaatgctcaaaattctccaagccaggcttcagcaatacgtgaaccgtgaactccctgatgttcaagttggttttagaaaaggcagaggaaccagagatcaaattgccaacatctgctggatcatggaaaaagcaagagagttccagaaaaacatctgtttctgttttattgactaggccaaagcctttgactatgtggatcacaataaactgtggaaaattctgaaagagatgggcataccagaccacctgacctgcctcttgagaaacctatatgcaggtcaggaagcaacagttagaactggacatggaacagactggttccaaataggaaaaggagtacatcaaggctgtgtattgtcaccctgcttatttaacttctatgcagagtacatcatgagaaacgctgggctggaagaagcgcaagctggaatcaagattgccaggagaaatatcaataacctcagatatgcagatgataccacccttatggcagaaagtgaagaggaactcaaaaacctcttgatgaaagtgaaagaggagagtgaaaaagttggcttaaagctcaacattcagaaaacgaagatcatggcatctggtcccatcacttcatgggaaatagatggggaaacagtggaaacagtgtcagactttatttttttgggctccaaaatcactgcaggtggtgattgcagccatgaaattaaaacacgcctactccttggaaagaaagttatgaccaacctagatagcatattgaaaagcagagatattactttgccaacaaaggtccgtttagtcaaggctatggttttcccagtggtcatgtatggatgggagagttggactgtgaagaaagctgagcactgaagaattgatgcttttgaactgtggtgttggagaagactcttgagagtcccttggactgcaaggaggtctaaccagtctatcctaaaggagaccaatcctgggtgttcattgggaggactgatgctgaggctgaaactcccaatactttggccacctcgttagaagagttgactcattggaaaagaccctgatgctgggagggattgggggcaggaggagaaggggacaacagatggctggatggcatcaccgactggatggacatgagtttgggtgaactccgggagttgttggtggacagggaggcctgtcgtgctgcaattcatggggtcgcaaagagtcagacacgactgagcaactgaactgaagtgaactgtagcttaagatgaaaattctggaaaaagttactccttttgtgagtgactagtttctctgagtctcttaaaacaatgctttaagcatgatttctttgattagtatgtttgaacgtttcactttctactctacagatacaaagctgctttaagttttatgaagcttaactgttttacattggtaaaaagtaaactgaattttgaaatgaggtctttcccaatctcaccgtcatggttttgagttatcaaagttttaacttctgtttttatgacgaataatcacagtattcttttaggaataaccctgaagaaactagtgtccaaattttactttttttttattggttgttccttcattcaggccctgtattgccatgtgcctcatccaagacttccaatgtattatacattcttaggagagtccttaaagtggactgtcatgccttaatacagctgttgtctccaagtgtggttcctcaaattagcagaattagcatcacctgggaatttgttaggaatgcaaattcccagacctgctttagactgattccctcgaaaactgtgggaatggagttggacagtttgtgttttagcaagccctccagatgattctgatacacactaaagtttgagaactgtggcttagtaaatgttaaaagttcaaggtagcatgatcctgcagatcagtcacatagcattaattattagccttgtaagcccacctcctttttggtcactgaatttgattggttcactgagactaggctataaagttattttctatattgattgccacatattgactttaggttgtttatatttctctgaacctgtcagtgtaatgatttgccaggacacttaataggaacagactgatcttttttttttttttctttctttgcatccatggctttctgagtcacaggtgcctggcttctatccttctggataaatctttctaggcaccaggcgtggcactcatgttctgttaatgagggagctgtcactgttggatcacaggggaccctccaggagtatttagttcaccccgatttggtttacaggttgggaaattgatcccccatgaggttctgcttttcttgcacgggtgcagttcatttgtgttcaggacagggtttcaggacttctgactccctctgctgcaccaagattcctgtagggggaggacagagctgtggcttgctctgtgcctgcaggacattcctttcctactatgaggttgcctttttttttttttttaagaaaaaagcaaatagaaaaaaaagtcaggaagttctcattgaaactaataaaagtgtctaaagagaataaaaaaatcagtttgagaactttggtatggaggaaataacctgacattaactgttttaattatagttgttgcattgggcttatcagtgtgggaagagggagcatttgagccctacagggaagtgggatatggacaacaagatgaccctgttcctgcatatgcctgttcggactacaacctagtgactgcttgtgtgatcccaacagctgtcatggagatggggctggattcagtaaagccctgcagtgtcatagctagtgctagggtggaatgccccaggaagtggtctctcaagctccttggccttcactttccaatatgtgggtataataatacctgttctgcccagcttgagaagaaaaatgtcatagtagggagcagcatattactgtgttcagaggatggactctctcatgagatccagactccctaggttcaaatcttggctctttaactcacggttgtgacaataagtaggtcactcatgctttctgtggaaatgagtttaatgaaattaactacttcatagggttgtggggaagatttaattagtctgtgtaagtgctttaaacagtattgttgtgtgttaactattgttgttactagttttaaaaaacattattaccttaacagatgagctttttataaactttcatcagtttgatgttgataacagtagtgggcaagcaaagggttctcatgcagtaattgttagtagaggagttgttctgatatctagcttgtgcatgggccctgctgtgagaagagctggtatcccccagaagggcagacctagagcctctgattttgtaatttattcatagagtgatatgcacagaggaaactcagaaccagggccttcttgattttgctttcaggtatttttacatgaaccatcctaggagatgaatatctttataatcttccagaaaatgtttcatggatttccactttggttttttttgtttgacaaggtttctttctgtcttgcctttctaattgttactaggattcttgataagcattttggtgatgaaaattctaactctaaaagctaaatgatcaaggtattgtaactatctagcaaacaaatggcagcctttgggtagacttcctcctctttcggctgaaactcaatgaaagtttctactattgctgtttatttctgagcagtctcttttgggagggaattaggatggtgaagtgcctttttactacaggaatgaggattcaagaattcgagaattattattttatttatatatatataaaattaacttttcattttctttactttgatatcccccctcgtctccaagctctattcatggtctgtttcccatctttgtgtgagccccttgaagttagttagagattatgttttatttatttctctatgttttctatttccgccttttcttctggatcctaatacagtatctgctacacattggtggtggtggtttagttgctaagtcatgtccgactcttgcgaccccatggactgtagcccaccaggctcctctgtccataggattttccaggcaagaataccggagtggattgccatttccttctccaggggatcttcctgacccaagaatcgaactcaggtctcaggcattgcacattaggctctcaaatatagtttattgaatgaatatcattgatgttcctatttacttcttgaagtggcatgttttgaaacttaatgtgaaggcttaagtaattcattgatatcgtggtgacctagtatctacggtcttcctgaatattcgtcgatgaatccttacattgcttatcagaagtatccaaatcccaagatgcttgtggtatattgtgggttggatagcataactttaattctcttagtatcattgggaaagggatgtagtagcctagagagatagaagcacagagaattaagaatgccattcaggaccacagagcagttattatgggaagagactcttgggataagcttttctatgaccccagaagccaaaagataaaaagatgccctgaattggttgtttctttaatgtctaagggttatgattagtgacttatttctaatgtgcatttgtttttatttttagcattgcagtgtcgggatggctatgagccttgtgtaaatgaaggaatatgtgttacctaccacaacggtacaggatactgcaagtaagtttttctcttttttttttttttccattttcatatatcttatttttcctcagtaggaaattgggtaaaatttggttctaccatcctatacttaatactgctgtgaaatgttactggttcactaactttcctgatgtagttttttggaagatgaggatttggatgtcagataaatggttaataagaacttactgtcttacccttatctttttcatcatgataaaggctttcagtgagtagctcatgtgtgtgtatgtgtgcttagtcatgtctgactctttgtgaccctttggactgtagcccaccaagcccctctgtccatgggattttccaggcaagagtactggagtgggttgccttttcctcctctaggagatcttcctgacccaaggatcaaacccatgtctcctgtgtctcttgcattgcaggcagattctttacccactgaaccatcagggaagcccagagagtatattctttaacatttttcagtttaatcgttaagaaatctttcagttaagaaaatttcagttttcagattagaatcgattctcaatgtgttagctctgatcttgtttttaagttagaccaaatgcatgttaactttaattctgcctaccataggtaaatattatagccatgtaacactttttttcccccgaatgtaaaatatccaattctgaaggagagtctgtgagagaagaaaatacacacatgcctgtagggatggagtagggagcagcggctgtgggtgaaggtcattatatggatttaaaagaataagggttagggttaggaaatggcagcccactgcagtatttcttgcctggaaaattccatggacagaggagcctggcgggctacagttcatggggttgcaaagagtcggacatagctgagcatgcacacactagccacactagagatgaattaggatgaggaataggtctagggagtagaggccagttctcaatagtgtttcttttcttcctgtctaatcgtgaagtgtagccatactttttgtttgaggaagcctgtgaggtattcttttaaattgcttctctggatttcctatggataacttcccccgcttatacctcaattgaaaatttttgataggaacatgtatccattctatttccttaatagaaaataagatttggtaatatgacatttatcttctttaatattttttttggggtgtatttgttttttactttggtagaagtatgtgcttgataagcattttaagtgattttatctaacatagttttgtttcttttctggatatttagctgaataacttaactgtaataattacatttgttccaatcaagtctattctgacattgcgatttaagttctttaatgttatgaacaagaatttttccaagtcagaaaaaattttcttcaccaaagtgaaaatattttaagctgtgatgacagtaaagcttaacaataggttatttggattggaataaagataacattggaaatgaaattttttatgtagctcattataggctgttcacttagtttttctagctgggaaaaaaatccaaccaaaaacatgtgatgtagtctcctctaagaatggaaacacaactggagataataaggagaggaacttaatacgttagaattggccactgaaatcttgtttagtctctttttggcatctggtgtcttagttacttgcttcattctattatttagctatcttgtggtagttaacccattatattatgatcatttgttgataatatttgtttctcccactagagtatgagaggtcctggtcttgtgcattttcagtctagtatgtagctagtgcccaacaatatgtttcttgaatcaaaaaatgctcaataggtattatcattcacttatttatttatttattgaaggataattgctttacagaattttgttgttgtctgtcaaacctcaaaatgaatcagccataggtatacatatgtcccctcccttttgaacctcccttccatctcccacccccatcccacccctctagattgatacagagcccctgtttgagttttctgagccatacagcaaattcccattggctatctattttacatatggtaatgtaagtttctatgttactcttttcatacatctcacatgtttttaaatgtatttgtcttaaataagtagagactggacctttcctcagaattttgtttgcttcatgtagtgttcaggatgtcggtaccatacagagaggcaatttagttctatttagagataattcaacttggtgacttatgtaaggagaatttcaaatacgttccaagtgttagcctacatatttgtggtctgacatggggagagaagattctagaggagactaaactctgagcatataccaggaatggacactaagggtcattttgggagagaaaacagatctgtgagtctcaggctctccaaccaaggtgagagacacaaagttgcccccagttttcggaagaagcattgctaggaaacaggggactcactttgtgattgacagaaatggagctgccagaattctgttgctgaatacttgctaattattgatggtgtggattgcttatggatatgggtctagacatagttcctagacatccctcaaatggcttccaatcctgttgtgagggaaacaatcttctagtgaaaagcagagtaaggggaaaaataggtaaggccatcttctggggagaccagtgtggataaccaagcttataaaaagtgattgtttctctacttcagtaaaagtaatattagcaacttcgggagtagaagaatcaacataagtggacgcaggaatgcaagaacagtgtcaggggtgcctggtcacccgtctgcagtggcaccccagccaccatccacagaatgctaagcaaaatttaaataaaaataacattcacttagcagacctttcggtatagcttcaccaccttttatttttttcccctagggaaagaagttactcccgcttgctcagtaaatattattttcacaaaatggtatatgaatattagaacatgtagaagatttataaaaatcgcatttataaaaatcatatcagatatataggacttaatgactgtctttttattcatgagattgcttagtggattaaggaaagagagctgaggccaaacttcttttactggggtgagtggctgggagttaatggaaaatgttttaaagtagaaggcaactgactgtctctttaaagagcgtaatgttactgacttagctaaattataatggttgtttatggaaattatagaaatccttgataagatcacactgacagatgaggacaagtactcttaaaggttagttttgtatacagctcaactgtttttttctaactgttaagtattcttgtcagtctgtgattagattgggagctaggcaagaagaacctgtgtaatcttgcaaaaaactcaattattgctcctaaatagttgttgtcagctcttaataaagccctctctcactacacagaggtaagatatttcattctctcccttgtcctactgggaggtgtaaatatataattaagtttggctgtcattaatcactttcaagttgttttctcaggctttcaaatataaaccactccaaatcccactttgattaaaactcatgggcaactcaagttcactagagtgttgggggtgggtgaggttacaatttgcaaaattcacaaaatgtgtatttttaaggacacagtatagttatttaatgtccttgtctgccagtttttaacatatgggttgtctttgggtgtgtttccatcaatagctctttcagttaccttttactttatgtttatggtagttttattgatttttggacattgcaagtgatgcattttaaaatttatcttctactaaagaatgttactggaagatcagttttatgctatggaggcttgtatttaggttctggtatggtgggtctgttttgctcttagtatgatcgtgtgtcttagtcaagacttggaggctggatacagtccttattcccaaagtatgacccttcagtgaattcagtggaaagcaagaggtgtttactacatactggggtgtatctcaagcccctctaatttggtaggacttgaattcaaacctctgactccccaaaaccgtgctcagcttttcagccttccagcgcttgctttctgttgtgttcctcatatcattttgttgtggagttacatgacatgttttttaacatgtctggttaaaaaactggttctgtctggtccaggatttctcttcctcagttttcagaggaattttgacaattccagatacctttgacttcttagctcttacaggacttcccttcacttgtgcttcatgaactggggaataccttcagggaaaaaggtatataagtgtaggtttcatatatgtagtttgttttttcctttgaggctaatatctcttctagtttctgcctgctttgattgctctctggtaccttttaatattttgtctgaagtttataataattgtaaatgagagagttgatctaagttactctgccattacttcattggaaggactgatgctgaagctgaagcttcaatactttggccacttgatgtgaagggcttactcactggaatagaccctgatgctgggaaagattgaaggggacagcagaggatgagatggttacatagcattactgactcaattgacatgaatctgagcaaactctgggagatagtgaaggacaggggaccctggcttgctggagtccatgggcttgcaaaatatcacatacgacttagccactgaacaacaactctgccattatttttaacagtataaaataaaattttaagagttttcaaagttttctacatatcacttaagaggtaactagcacagtatttttgaaataatagaaagtcaccgtgagttatatagcttctgtgaatggttgattacttttgagaatctctactttttgccaaagtatctaagtagaaacattttaaagtaaattattataaataaaaaatgttataaaacataactgtcacatttcacctaaaatttatctattaatgctaacaaacattaaacttaactaacagttttccttgccaggattaggaaggagtgttggtggtccaggcctccaaaagccatccaagaaaaccagagccattgccttcttcatcctcttgagagaaggaaatagcaacccactccagtattcttgccaggataatcccacggatagaggaacctggtgggctacagtccatggtgttgcaaagagtcggacatgcctgagcaaccaggaatagagatactcaaaatattccagagcctgacttatagtataggatgcatcaccagtgtgttgtggtggtactgccctagaaaggcattttcaagtcatgcctgactcagcattttccactttcactcaccttgctggtgcactcagtgctgttcaggggcagtatcagatcaaagaaaggcactgggaaaatatcaactattaaatcactttctcttttcctgctgaaactggttttgtcagcaaggttccttcaatcttgataaataatatttgaaggcaatagttcaaaattaatgcaaaaattatgattaaagtatgtacatttaaaaaaggatgaaatcagaactgttgattttttttttttttgccccaggctcctgtatggttagtttggctctggtgagtaaagtaacatatttgaaaaagccctgtttggtgacatggaagggacaagttttcatgtcagatagacgtgaagttaagccccaagcactgtcagtaactagatctttggcaagttaaagagtattatactagctagcatttattgagcatttattacttactagcctctgtgctcagttaagctctttacatgtatttttctagtcctgagcatgctcagtcgctcagttgtgtctgactctgcgaccccatgggctgcagccccccagtcttctctgtccatggaattctccaggcaacaatactggagtgggttgccatttcgtcttccagggaatcttccaggcccagggattgaatctgtgtctcctgtgtgtcctgcattagcaggtagattccttaccactgagtcacatgggaagcctcctcatgtaaggtagataattttaatatccctgttttaccagtgagtatatgaaaactcaggttaaatattttgcccaatatcacataactctttaagtatctgacctgaggtgtgctctttgaaaatgtattgtttctctgagtcttagtttgcttatcagtaaaatgggacaaaattacctattttaaagtggtagtttaaacaggatcttctgaaaaggcggtgtggaacatttgaaagtgcatgaaaggtagcttttcagatcaggattatgattaaaattccatatagtttcctttaaagtagagacctagataggcctgggtagctcataatattgggttggccaaaattttgttagggtttttctgtaccatcttatggaaaaccccatatgaagttttttgccagctgaatacatgggccaggcttggctaatgctgcatttctgagaagtggccttgaccatgagaactcagtgcagttaatgcagatgaaatataagaagagagcactgaaggcgggggtggaggatattgtgtgctaacatgctttttagtagaaaaaattaaacttaaaaccttaaaacttctcccttttttcctaatggaagatgagcaagtccagacagattttatgcagctgtgaaactgagacaggttaaattctaccacttctgataaatgatgctgccatcacaaaaatcacaaattgttaaatgcacagccttatgcttgcagtgtgagttgtagacatatagatgtgtgtcctgtgaggctttctttgtttaggacttggggtctggacctttcaacagaaccatttctaagctgttgttattattaacatttatgtccttgaaaaaatcctttaagaaatatgttgtgtccctgaggaatttttcgtgaggtatgaaaaattgattaatagcttcttatcaatatataacagcagaattcccgtgttctgttcaactgatctttatattctttaggttagaaactttacaaacttcggtgttaggtggagaagtagaaaaaggtggttcttaggctctgcttgtatccttttgcctgtcttgggtcattgccagtaagttaaaccaactaatcttggcctgcaaacctggcacaaatagttaggagtttagctaggcttctttcaacacagtccccataacacaggttaaccataatcctaagtaaagtttctttctcattgttccattgtggcatgtcagcaccattaatttcatgtagtaattcctttatcccccttttgttttgactaagcaggatgagaaatatttctctttcatgatctggagtaacttaattaaatccttcatttaaaattttggctatctatcttttatcaaggctagcaagattgaatacaaagggtttgaggaagtcagaatgtgataaaaatgtaattatctaaaaatttccaagtacttttttctctgttaagctagcttaaatgtgtgggtgtgatgaagcttttcattaagcctccttctcagcgtcctgagctaggaattttgtagctaggaatgaagtttagtgtttcctctaccccccatccctctgtgtgtgtgtgtgtgtgtgtgtgtgtgtgtgtgtgtgtgcgcgtgcgcgtgcgcatattatgtgttttgttttcatagttttttagttgttttgttttacatctcactgtcatttatagtttctctggggcgtcccgaagttttctatacgttattcactcatcatccgtaatcttcactagcacttcatcctctgtgtctgaatatgtattactgactctcatagtgatgccttcagtcttctcttattaatgcagctaccttctttttaactgttcttctcctaaacaatcttctacttggatccagaagaaaaggcctttatggaaagaaagtgaaagcaaagactaataaaggcgttatttaaataacaggtggcattactgaggatacatatccaactggaatgttatatccattttttctttacataagtttgaggagaaagtaggtgttaatgagaaaagaggctgattaaaccttctgtagaatagtagcatttagggcacggagtctatgtggattcaggctacttttcaacaggtactatatgtatagtcctgtatcctcaaccctgaaagtcagactctaaagacactttttaggatcatcactgtttgtcttagccaactcaggctgctatataacaaactgccaaagaccaggtggcctaaccaacagacatttatttctcatagttctggaggctgggaagtccatgatcaaggttctggcttcttcaattccctgtgaggacttcctgctttgtagccagccagcttctcactatatcctcacatggtggtactaatcccctcatgaggaccccgccctcttgacttcatctgctgcgttatttcccaaagtccccagctccaaataacattacattggggatgagggtttcaatataaggattttgaaggggtgcactcagtccatagccctcttcaaagggaagtttaattttcatcaaactggtgtttattggactggctactgtgattaagcactgtgcagggtattgtgatcaaacataaaggctgaggagatctgtgctctctgactttcttattcagaagtagctagacctcaggggtgtctgctaatgagtgttgtgtttcttgcataagacatggtggcagttctctgatgtcttgccatcttattggggagatgaggcatacacatacatacacatatatgtatacatatatacacatacatacatacatacatacatacatacagatatgtaatatatgtatgcatatgaactggagattgagacaagggaacgactgctatggaagactaaaatcagagaatatcttgtggttcacttataatctgagaataaatctgagaatattgactgtgtcttaggaaatggataggcagaaggatggaagtagagagactgaggtgactagaaaaggctgtgtgtgattaactgaaataatcattaccaatattgtcactgttttttccttaatgacatagttttaaaacttttttttttttttttttttacatcgtgggtgttctgtgtctgtacttcagtttgtgtgaggttttgctcaactagcttgtggatttttaatctgtttcacaatgacagctaactgatttgaaaaatcattcctttagcacatgttggcttgaatgcctgagataggctgtctggattaaggcatgaggagggagacccaaggacaaagaagagggggcagctgggagcagtcatctctccttccctccgccttttggccttgactgttgagtcttgtgctgcttccagaacagagtggccaggtaggcttgtggacatcgtttacagggaaagtcagaattcaaaatctctgaggcaagaaagaaacaaagggttaggaggagtgatggaaaaacagagatgtcaggagcaggatcagtcttcatataaggcatagtgcattcttgatctgaggcatcccaacctcagatctcttctgtccagcatatcattgtcctgatccagttcatttcagggatccagcgtaagcaagcatctggttaccccaaattagctcgtgtccttttctgcttgtttcctctgattatatagtacacatccaaaccctcaattatacagaataaaccagggatgcctattctgtgtggaaaacatttaatagtggttatgattcctttgcctagaccatgccagtgacttggccatttaaccccctgtccctttaaaattttgaaatgctggtggttattgtgtaagccagagacatctccttaaggaattattttactgggcaacttgcctcttctgaaatctcactcagcctgaaaagtacctcaggaacctttttgactttaattttcctcttagctgcgtttgtaagtaatatttgtggtgtctcattctctgtctcatgttgttaacactcatggccttgaatttctgggtcactcttaaaaagtggacagaacttgattactaatgaaaagttgactcatttcctcctaggcaaaggctgacactgacaatcagagtttataattagtttttagagaagcatactctctaattatggaacatcacctattctttcttaaattttataaagattaatgagagcattatgagttggggaaatgagtaagataggtacttatgctgtgttgagatgatgtataaaaattatgtctggaaaaaggtcctacatgaatttaattaagtggttgattccccgcaagcttaaatttggtacagtctcttcccagacacacacagtcatttttagtcttgtgtgacttgtcagtggatcagaggccataaagggagggactgcagtgtctaccactgttctgtgctgaggaaaacaggctttcatgttggccacatgacttggggaagaggcctttctttcccttttaggctcacggttcctcttaattctccatatcttgtttaaatatatcgctctttctcttttgcttattctttgcttccttatgcttcctgcaaggggttagctgaaagtgtgggttgtgcaacagttcctttatacaagtgtgtattgaattgtctgtgtgcttagaagggtgagagttaggtagcatgaagaatataaaagaagagacgcaggcacagttcttgccccagggagcccctgcttagagtgggttgatggtcaagacatacacaaccactgaccccaagcattaccatcagcaaacatcattgcattctcgggcagtattgctgaagaaactcaaaaaccaaaattgtagagtcatcagactcaggaggtggaagggattttgtcgagcacctttcccactcatcttgttttataagatgaggaacccaaggcttaaagtggccaagtgacttgtcctgtattacataactgatgggaaggtagagtgggactgaaggctgcttctcagcccccattaggtgacctaaagattcagcactttttcttttcattcttggtaccaactctcaagggactgctgttcagggtgagagcagagaaggggaagagggagaaaagcagaattaaaaacaagcaacttagggcttttatgaggcagtttgaaagtcccagaattttaactctagctatatattttatttttttaatattccatgaaacaaaacaaggtggaaattcttttgagttcctcctaaagtaggtctttaatcctcctaaaggatattaatatccacgggggctatagaacatacctaaatggaatcatacaattttagagttaaaggtattattagaggttatttggcctaacatcttgttttaatacatgaggagactgaggctcagagaagtaaagtggctttttcaagattcacacctagtggaagaaccagggcttgatacagaggaaaggtctgtggggagacactcaatcaaaagctctaagaacatgctccagtctttggtgagagtttttgtaaaataatatactagctacatttttattctcattcagataagaaacagactcattacatatctatctacctacctgtcttcaagtatgccctgagtatgtctcacctaccagtagacatgggcttttaaagcagaatgatgcaggagaatgtggccacatcaggtgcagctttgccttgcttccatttaataagtgacgtgcctctcaggatgcatttatcttcactttgtgtgaacttgaatgcgtactttcaggattcttctttgatattcagtttctttggtttggaaggtcacaaatcattgtaataactttagcttaaaaaaattaaaaaaaaaattttttttttgaccctttgagcctgatcccatcttttaagggaagtagtagtttttgtcttgagtcaccatatttttaagtttgtacactctaattcttttccttaatgtctgttctttttgttattattggttctaattatgcagaggtataacaattgacaatgatgattctctgatgattgggttgcctttctgaaattaaacatggttcttaacaagtgctcctaaagtggcagacttctaataaacaaaaaaaagttaacctaaattgcgagcatatgttttgaaggtgtttttagcctctgttcagttcagtcccttagtcatgtctgactctgcgaccccatggactgcagcatgccagacttccctgtccatcacgaactcccaaagcttgctcacactcatgtccatcaagttggtgatgccatccaaccatctcatcctctgttgtccccttctcctcctgccttcaatctttcccagcatcagggtcttttccaaggagtcagttctttgcatcaggtggccaatgtattggagcttcagcatgagttcttccaatgaatattcaggactgatttcctttagggacggattgggactctcctatgtacactttaatattgtcctggccttaaagcaggtatcagtgaacttttttcttaaagtgccagatgataaaggttttaagctttgctggccaagaagcaaagtaaggatatgatgtacatacttatatacctctttaaaacataaccattaaaacatgtaaaagccagttttagcccctgggctggaggtacaaaaacaggtggcctgtagattttgcctagggcagtatttgctgacctttatcttagagtagccatttgaaatgcttcatgtccttggatggcatgagatatggaagaaccattctttgtgctaagctttttttttttaatatacaaaaggaattcttaaatcagctgttgctgaaattagaacaaagaattatatctgaatcttcctatatcagtttttagttgatacgagttttctagttgagatgatctatactggaggtctgcagcaaagccaagatcctgttaaataaagaattttttaaaaaataaataaaaaattacattttttctttgacagtaactgttctcttattgtcataagagtaataagtgttgtgagatgtcattaacttcatgagttatcttttgtgtggaaaattttggggggtgattattgtgatgatgatgattttaataattatctttgttctcaaaagcttataatctagaggaaaacagataacaaaccaaatccagtcccagctgtgtagttgttgatagagcatgtttccaagtatagacaccactaggctaagactttcacatgtactaccagcatcagctatgtagtgagggattgaaggttttgctgtttttgttaaagaatgcaagagtacataaaataatgatagcattgtatttttaaaagaaatcatctttatggtatctgaatgtatggtatataaatcttctcattagaccgctgtttagctttgcaagatttccactttgtccctatggaagcataaactttgatttcatacagcagatcaagcatcagttcagttcagttcctcagttgtgtccgactctttgcgaccccatgaactgcagcacgccaggcctccctgtccatcaccaacccctggagttcactcaaactcatgtccatcaagtcagtgatgccatccagccatctcatcctctgtcgtccccttctcctcctgcccctaatccctcccagcatcagagtcttttccaatgagtcaactcttcgcatgaggtggccagagtattggagtttcagctttagcatcagtccttccaaagaacacccaggactgatctccttatgattccaaagctgaggaacaattttttataagtcatgtgagtttgaatatatacaaatataggcagcatttgtaggaaacttttctgtttaattcaactaacatttatgagtgttatgtgtgccagatactaagctaaaaattactttatttggatatgctatctcagtgtttctcaacctttttatctttatcacccccttgccccaaaggagcatttttagagttttttcccctaatctctctaccccaaccccatgcaattttaataccgtagattatgatgtatcagtttatctatcgtagccctttggaagatcattataatatctaaggttttgtttttttttttacccccaagaaccattatttttatgctttgggtcacagccctatcttttatgggaactagtggttttggtcttgaagtaggattcaaggcactgttatttatttcctcatgctgtccattatttttattacctgtggttctagtctaagtaaggccatttaaatgggattttatagtgtttcagggcatttttaaattatatttttctatatattatatatatttcaatatattatattattcattgaatggtcttgcatacctctacatgtgattattacattttttgggagaatgatgtattcagaatctacaaagaaatattttttatttctcttcaaacttatctctcaaagttcgaaaaaattcaggtttttctcctgcctactctcgcattcacgtttggtttgatatgatttgagtacagttatttttcaactaggaatccttttaggccaaactataagcttttggaactttctgccttcagatattttttggacttcagaattttacaggtggtcatttcctcatgttagagaacagaaagcaaacacactcagttttttttctctgaaattttgtttaatttttactgctcagtgtctgaataatctagcagtttatgctactgaggccactttgtaggatgttctatcactcaggatcctggtggtttatgtagtcactgttttattaaagattaataaaaccacaagagaaaatgcagactgtgtgtgtgtgagagagagagagagagaggaagagagtgttcttatttggggagaaagtatgatttataaagtctactccatataggtttggctgactcactttgaatgatttagaggtaagtgaaggttaaaaagtcctgtatgtatcaggaatcttaattagtattgatagtcctttgggtaaacagctcaacctagtggttcccaaactttgagtataattaaagtcttttgatattgaaaagcagagacattactttgccaacaaaggtctgtctagtcaaggctatggtttttccagtggtcatgtatggatgtgagagttggactgtgaagaaggctgagcgccgaagaattgatgcttttgaactgtggtgttggagaagactcttgagagtcccttggactgcaaggagatccaaccagtccattctgaaggagatcagccctgggtgttctttggaaggaatgatgctaaagctgaaactctggtactttggctacctgatgcgaagagttgactcattggaaaagaccctgatgctgggagggattgggggcaggaggagaaggggacgacagaggatgagatggctggatggcatcactgactcgatggacttgagtttgagtgaactccgggagttggtgatggacagggaggcctgttatgctgtgattcatggggtcgcaaagagtcagacacgactgagcaactgaactgaaggtgtaaggattctataggcccttgcattttgccttttggctttggttaagaatatgagcactgaatagttgaatgtcttctgtacaccagttcctgtattaggcaccatgagtatagtgataataattctcagtctcttggggaagaaataaataatcataagataatgaatgatatatgttagggttatgggaatatacagcagggggcatcaagcctatttctcaaaggaaataaaatttgagcggaagcttaaagaaattttaggtcttaactatgagaagagggcagggaaaagtgtttggactgaatgaacagcacgtacaaagttctggaggtgcattagaacatgttctaggaactaaagaacctgagcctagcgagggtgtaaggaatgaagggatgatgttcttgagatgaagccagttctcagtctcttgtttgtatacaatgcataatgtcaatatctactgagaattcagtaaccctttataatgaatgtttccacattttaataactgtaacagcatttacagtccatttcatgtggagaggacattatttaatagtctagaaagtgatttataagcattgcaaactccttgcagtaactgtacaatgtttggggacaactagcttaactcatttgtttttgcctattactctgaagggtgctttttgtaaactcatgtgtttagaatacgtttgccatattttaatcacaagtagatgctttctcagggtccactcagtgaaatacggtaaaggtacagattgtatgctagaagacaggaaagaccaccttctgttatggcagcaacagaagttttccaatgctgtttgtgtgcccttgtccactctttcaagtgatgatggaagaggctaggcactcagttcagcttttgagttctgataaatgagcccagactataaactggaagataagggtgtttgcaaattcttgtgtaaataaagcatggtttccattgcagtggtcactgacttcatagtttctgatgaagacgaacagtgctatgaattaacagttttgaagtgtataccatggcagcttctttctggtttggatttattaaaatcagtgtgtgtttattgctttattcatatggggggtagtgttgaaaaacctaaatgcatggaaaccaagtgaggtggagcttcagaagataattcccagcctcacaattccccgtgaaattcttttcctgtgggaaacttttaatttggaagcattcagcctaatgtgggaaccaagattaacattttctgaaatactacaagaaaagcagaaatgttctgctcaggaagctgaatttacatagtagaaaaatgggctgtcctacagtattttgtagtctttattagttgtggtaaaaaaaaaaaaagtgcgtgtgtatgagagagaggagagagagagagaaagaaaatgagagagaggagggagaaattgattgtatattggtctttgtttcctttacatcaaaccagcaaagccctagaaagtgtgttttaccacagacagcccagcactgagccctaactctgtacatgaatatttttttagttctttttgtttttctttcttgctgagtaagctatagtatttccttttttttgtttttttgttttttttaattttctctttcttttctgggggaagggaggtgagaagggtagtggaatggcaagaagaagtcaacatctcagaactcttccctttctccctctttaccaggaagttagcaagatgtcttcctgaaccttttttttttttttttggtcagtaattagcataacccagtggttacctttacacagagttacagaatcaaaaagctggcagcctgatgagatgttcaacttggaggtactgagaggagggtgacagtgaggttagactagtaggctgggcctcttgaattccaatccgagagtttagacttgattctggagactctcgggcatctaggagcttgtaagccaggaccttgggatataggaacttttaactggttacagttagctttggctgttagcaatcatttttatctactttaacaggggcctggggggcggggagggggcaggaaactaagctggcgttatggtcacaggaaagaacagactgatttgggaccttttcagactgcagacctttgttactgaccaatgcttaatttggtttctggggtttgtaatcttttttccctctgcccttacctcatttaccttaacaacagctcccccctctcgagctcagctagggcaggctgccactgcggattggggggccgagaggcctagagcaagaagaaagtgggttgaaagcagagttctgtttaaagaattttctgctggaaaccagcccagagggagtaaagaggagctttaatgaggagcagctgcagggccgacgcaacccacatgagacatttttcccccctccgttccacattctgtgtagtttttaaaaaatcatgattttgaaatagctgttttgtaaagcacgcctctctttttcttctcctgtgtgatggtgttttgctttgttgttttttttgtttaatgaccaaatcctcactaaaagaaagctgaagccagagctgcagagaagccctgggtgccgcttgggctcaccctgctgatacagaacagtctgtggagaaagcaaggagagagaacattggcttttatttggaaaaggggcttatttcctgctcaaactttggtcatcttggagctgacacaagctactacagtattttaagcttttctctagacgagtggctattcacttaggaaacttgaaagaacagtttttttctgtcctgtattactagggagactgatcctgaatcacagccactgctagatagattggaattgctattcaaatcccagcttcgttgaaatctgtaaagtggctacatgtaaacgagtccaggctgctggtgacatgtgagagttggggtctggttttcatctgtttcattgagaggggacttacgggcatccattcagttggcatggtttctagctccattaggaggaatcccctgtttttccctatttccccctcatttctccccttcactttgttccccacgtgtctgtttgaatagtaacagtgaaagagtgggcctcttcgtgtcagacgtggcagactttttcagaaaaatgcctgactgtatggagctgataaagttcagattagtttatgaaattgttttacagggaaaaagcaccctcccacaaaactttccctgtactcaaagcatcctctatgaactatgttatttcagagatccaaagccagagaagagaagagactaggaggaagtcactgagaaaactacttaaataagttataaatttcctccagaggagggcattcatatagtttcaggaaccaaatgcaatttttagagggttttttttttggttatatttttagaagatttttttttttaacatacacctttagttcaagatataggctattttccaaaaatggtactggggtaacttaatagaactatagatttgtaagggaacttggataataaagtcaacttgagccatctcgagaagagagctctttaatctcttgttttcagtggagagtcccagttcctactaacagggcatatggcgtactcctattacagttgaacgtggatttgcaaagttgaaagatctcctgtgttaggagatggggtactttatttctggctgtctcacttacccatctctcccttttcttcctatgtccataatttcttcctgtgtccatattcacccctgggctgtgagggatgaccttgaaccccaggatggtttttttggttgccttgtgttctaccaggcagagccccacgtgaggttgagaggggatgttgcaacataggtggtcatggtgttcaagccaacagccccagggtctgaagacttgctcttccccacaaaaatatcagtttgaaagagacacagggaagacctcactatggcttaatgaagaagagccatattggtagaaataatgtagtatataacatggagtacaactactgttagatcagagatgggtgagatggtttggagaaagcttagtaaaggatataggttttgaacagatctttgaaacaaggatagaagaaaggaaaataaattagagacatatcagatggtaaaatgtggtacctctcactggagattagttagaagatttttatataaggaacagtagacctgagtgtggaaataatctggagtgcttaagttatgggtcactaaggagtaggttggatgataggagtagggcagacaaataggccataagaagggctgggcactgaaactagcttctgagcagaaaagtgagtgacatgatcaaaattatacttgagaaggatcattctttaagtagtgtgcttactttcagggagcaattttctccctgaatttaatgaagaggtgtagacagaatgctggtgtaattgcgataatagaactgactgaataggagccaatcttggggtaagactccatagaatactttcagttaagtgatgctttatattttgataaagactaggtaaagatagaagtacagttgtaggtgatccaaaactaggggaaattgctgggtctacagacaaacttgcggcaggtcagtttggtgtccttatcggtacaacagaggttcagaccaattgacttctgagatttggtgcagtgttgaaattctgtgattatatgaataaagtgtaaagttatctaaataaagaaaacttggggtaaagattcagcatgttgaaaagaaagaaattacaggaccaattattgcattcaaaaaacatggtgtactaatacaggatgggctgaatatggcataaaagtagttcatgtggaaaaaaaagtgtgaactttttaactgaatctggattttgtaatttttataaaagtgaacccagctttaagcagcaatagtagaaacaatagtgtccaactctatgctatagtggtaaggacatatgtattatgtgggttcccccccaattttgggtcctatcttttaaagacgtttttggtgaactagaatcatctagttgggggtaggcagatagcccagttttgaagtatgtgggctctggaatcatacttgcatttgagatctgcctctaaaaaatcttcatctagctctgaaatcttcatctttctaagctttaaggtcctcacatacagaatggacataatgctatagcataactgttagagggagtaataaaaacaaaatgcttagcaaatacataatacatagtaagttcttcaaaaatgttggtcacttttattattattactattgttgtctgaagcataggagagccactaaaatggtgaagaagtctggaatagtccaaagcattgaatcctggaaaaagaaaacaaagagaaaacaaaataattacctgtaaattcttgaagggccacatgtaagagaagcttgttcctttttgttctagaggacaggcatagccagaaatggaaattatagggaggcagaattatttttttaaataagatataactcacatactaaaatttttttaattaaaattttttattgaagtatatagttgatttacaatgttgtgttagtttctggtgtacagcaaagtgattcagttatatatatatattaatatatatatatttttttttatcttgtggtttgttataggatattgagtatagttccttgtgccacacagtaggacctattatttgtctatttttatatatagtagtttgtatctacgaactctatactcttaatttatcctttccccactctctttcccttttcatttgttttctacatctgtgagtctgtttctgttttgtaaataagttcatcggtatcatataataaattccacatataagtgatatcatatggtatttgtttttctcaaacttcactcagtatgacaatctctaggtccatctatgttgctgcaaatggcatcatttcctcctcttttatgtgtaacattccatcatgtatgtatatatactacgtcttctttatccattcttctgttggtggacatttaggttgcttcaatgtcttgctgttgtaaatagtgctgctatgaacacagaggtacatatatcttttcgaattacagttttgtctggatatatgccaaggagtaagattgctggatcatattgctcatcatattgctctattattagtgttttaaggaacctccatactgttttccataatggttgcgccaatttacattcccaccaacagtaattcatatactattaaattgacccttttgaaatatacaattcagtggattttagtatatccacagttaagtgtaactatcagcattatagaatttcaaaacattttcattaccttccagagactctccctattctttagcagtccctctccagttcccctcttcccagctcttggtaacactaatctactttctatctctatagatttgcctgttctgatctttcacaaaaatgaaattatacaatatgtggccttttgtgtttagcttctttcgcttagcatgatattttcaaggtttgatacatatcacagcatgtatcaaatcttcattcctttttatggcaaataatatttcattgtatggatataccacattttatttacccattcatcagctatggatgtttgtgttgtttccacttttgttattataaataatgctactatgaacattctttacaaatttttgcattgatctacattttatcctttttggtatatacatacctaggaaggaaggcagaatttgaagacatcagaaagaaaggctgccggacaatgagatctacccacactgaaggcaattctattgttgaagtagtgagccaatattttatcttacttaacaaatgcatggcatttactatgcactagataactgttctaagtgctttacaattgttttaaaccctacaaggtaggcactgtgattaactttattttacaacaaggaggtttaaaaacttgctcagggtcactctcagagtaaatgagattgaaatccaggtgatctaattctagtgtctgcacttttaatagtagaaagaagataacttcaagtatttattaaattctgtttcttagacatcatacttaattgcttttattcacatagaggctgtgatcatctttcagggatattttagaaagaattatcttttggggtagaaattacattaggatgtcttgaatcccatggttctcttattattatacagtgataaatggaagtggggggggaaagccagcgacaaggtgtctgacctgaggctttttaattgatcagaatttttatcagaaaggagacagtgagtgtctatgataagtactataggaattcagtttaacaagacttcagaacgtagtcataagttatgtataatgtaaaaggattaaccaaaagtaacttttgagatggtgaatggaagccttagaaaaatggagaaattaagtttcatgaaaatatgactgtacttttgaaatgtagtttcaggtattggcaggatatgttagggtaagtagatgacttttagtaaactgaccggatgaaactggcgcttgataaacgaaggtagttgctttaaactaaatgaacaacaaccaaaataacaaatgcataagggaggaaagagcagtccaacccagacttaaacttcaagtggccataaattgatggggaggaagaagaagattccagaatctaaattaagaatttgcccggctttgaagtacagagggagtcatagaagccaaatgtaaaccggttagagtgatggaggtatggccagcaatgcttcctctaagaacttccttatgaagaaatctcaggtgagaccactgaactggacaagggaaaggtcattgctcttaggacatgttttctggccaataagaagaatgcaagttttactgcaaaggaacaaataagatgggaaagaaagggaaaatagctgtgaaattaggctatagttatagaagtttgtttgtgaaggaagtatttagaaagggaaatgaggcttagtgaaaaatgtagattaaaagagacttgtacatgttttaaggtaaaagaataggctgatgtctagctatctagaacattttaaataagaaagtctttattattatatcagaagtgagtctagtttcccataaaaataagttgtgtttctatagatggatttcaggagaataactcagttgtacatcctgtcttagtattatctcatttagagtaagaccctgactccttctttgcagtggcctaaagtctcctcatgatctgcctcctacttgtaactgtaatctcttttggctactctttcttaatccctttggtggaaccacagaggtcttctggctattcctcaaccatgctaggactgttccctattaaggggctttgcatttgctcttctctctgcctttaacatgctttccctagatacctcctgagctatctcttccctcatttagctcttgactcaaatgtgcctctcagtgagactgtctgcttttcctatttctaactgaaacacctcatttatctacctctgttatccccaattcattcccttcctatgcctctttcttgttttattgtttttcatagcacttaactccacgtagaaaattatagatttcatttattaattttgctttttgtcttctcctactagaatttaaactctgtgagttcaagaattttcctagctctagaacagtgcctgatacttaataggcacttagtaactgttgcatgaatgaacgagtgtaatattctttgtggaagctgatatgaaaatatgttcttcatcatcatcattattaataagcattttggatgctatatatagaattctgctgctgctaagttgcttcagttgtgtccgactctgtgcgaccccatagatggcagcccaccaggctcctctgtccatgggattctccaggcaagaatactggagtgggttgccattttcttctccagtatatagaattagccttcatatattctgttattcaggagttggcaaactttttctgttaagcatcagatataaatactttttggagccatatggtttcatcacaactactccaccctgttattataatgcaaaagtagccatagacggtccctgtatgaatgagtatgattgtgttccaacaagagtccatgtgtggacactgaaatctgaatttcgcatacttttcattgggcttccctggtggctcagaggttaaagcgtctgcctgccatgtgggagacctgggttcgacccctgggtcgggaagatcccctggagaaggaaatggcaacccactacagtactcttgcctggagaatcccatgggcggaggagccgggtgggctacagtccacggggtcgcaaagagtcggacaccactgagcaacttcactttcactttcactttcaaatgtcataaaatattattttcttttgattttccccccaactattaaaaaatgtaaaaatcatttatagctctcaggccataaaaaagaacaagcaatggaccaaagcagactcacaagcggtagttgtcacctctatttttactggtttcttaaacatatcttagttgaaacatttttcctttagtggtaggaagcaacaatgtagattaaaccttagtaacagataacttgggaatacttttgtttggctccagaatcttgtctggtggctcagatggtaaaaagactacctgcagtgtgggagacccaggttcgatccctaggtcaggaagatcccctggagaaggctatggcaccccactccagtactcttgcctggaaaatcccatggacggaggagcctggcaggctgcagtccatggggtcgcaaagagtcggacacgactgagcgacttcactttactttagaatcttccatattgcttcatttttgtttcttgggaaccttatgctttcgttatgtttatgaagctaatatttaagggaatttgtgttctctgagcagatgccacatgatagtgttggggaggtggtgatgatggtagcaaagcttgggcaaagcccacccaggcttaaaagtttgtcattatttataaggtaaataattcccatatgggagaatcagaagttgtcagccaagcttaatgcccagaggactgttaccgtgaatgagaattgtgttgcagttttaacatcatccataacagatttcttaaataagttgcaaatgcttttaataatatggttaattttagctatcctacattggcaatttttgctgctttactaaaaaaataattagaaaataacctattctattataaaatcaagctgtgatatgaataaagcattatattttcctcagtaagtgcaaagagagaaaaaaatgtttttcatttgcaaaacttaaaaaaatatttataaagtttttcacatactttgttcagttcttacaagagactcatgatggaggtagctttattaactatttaaaatgtgaaagagctgatagtgaaattatttattcaaggtcgtaccaccaggactccagataggccttctgatgataggaggtggatactcctcactggaaacttcagccatgcttggtttcagtgctgtgcccttccctcactgcctctcattctctagctttacctgttcccaaggatgctcagagctctagctgctcctggttctgctgtgcttgctgtacagagctctgagaaaagattgaggaggctgggactctccatcactgccactgaagctacttactagcgctctttcctcttccgttcttagtccccagattattagtccccaccagaccattctgtctggtcctccttctttcctcaaaactatgacctctaaagaccttatgtggtcaaccagtgactactaaacattgtggacaggttggcaaagacaagaaggaatgaaacagaaccccagggctcaaagtctgagtggttgggagagtcaagacacagtgactgagcttcggaggatgcaaaaggagctggttttgagggggagaatttagtttggtttaaatgtattatcttcaaggtaatggtggaacagccttgtagttagttttctatcctccaaaaagtctaatggagaaataggttgaaccaagtatctggggcgacagccaagtggcaaaatttatagttagaatcaaagactttttgttccttttaaacgcttcttagagatcctgtttatcattatgaaaatagagactttctatgccttttttatggtgtttggagaaaactcttataaatattacacacattttgggatggttgtgcatcttacaaatcagtggtggcatgtaaaaagatttctcaatatgtgggaaatgttgtagactgttgttcttgaattgttttcccttcttcactttggtgtttgtgtgctaccttacatatttttaatgttattttaatgttatgctttgcttttttggttaggaaagctgcttgctactaatatctttgcagatttaagtttctgaaaagtctcttgaattcttccccattcctgtacctccttttcctttgtcacagtcttgaccccttgaacatgatccagaagtctagatatgggccaactgatgtctcagtggaaataagaaaaacttattattccttagtgcttaattgaagccacccgatattttacagattttaaatttgagagggtaaggggatcagtccatgcattatcatgcgtgtcttaactctatcaattgacttagtcaaaaggagaaagttactgaatttgaagacaagtctccacgatgctgcacaaaacagtgctgttaccgcctaccagcctgcgcctacatgaaaaaggctatggttgcattttgcctctgaataaggatcaaggtcaaaaagacatgagagtatgtggttaagtactaaacacttcgcctaaagtgagacagtcttatagattgtgccttcaggtttctcaattcacagtccagtattttcttgaaagaactgcattatcttgtaagtttgtggacttataagaagtccacgttttcatggactcctctcttttccatatagatgtccagagggcttcttgggagaatattgtcagcatcgagacccctgtgagaagaaccgttgccagaatggtgggacgtgtgtggcccaggctatgttggggaaagccatgtgccgatgtgccctgggcttcacgggcgaggactgccagcactccactactcacccctgcttcgtgtctcagccctgcctgaatggaggcacctgccacgtgcttagccgggacacctatgagtgcacctgccaagtcggttttacaggtaaccagtgggactcaggcccacattttcctgttctcagcaggtacttccatttagtgtcttttagatactatcacctggtcctttagggtctccctctatagtacatgtttatcattatgggaaggaactggaatgttccagtcagctatccttaacttccttttgaaaggggagaaagagaaagcaaaagggtcaaatactccgcagtggctgactgaagtgtatatatcaggactggggatcataattactgccctgtcactgggagaaaagttgttagtgttactggtaacttatttcttaaaaactcctctccccagacgttcagggcactggcttttctggttttctaaaccggttgtttcttttgcttctccgttgtcttgtccttgtcctcatgcatttaatttttgttcttggaactctgttttgagccttcttttgagccatatgacagctttccccagggaatctcgctctctccagtttcctcagctgtcatcatcttcatcccctgctgatgactctcacgatcatcctttttgcttcacactgacactgacattcaggctcgtatttctaactatctattgcatattatccttggaaattcaacaggtacctgaaactcaacatgtcgatgtagatagtgacaccagtgtaccctccaaataccctaagctagaaactccctctcatttatctgtaccccatgtggactcaggcatgcattttaatctgagttacttctcacctgtctactcccctccatttccccttctgctctgtagttgacattcatgtcctttctcacctggactcctgcagttgtttcctaattggtttcctcacctttactttctccccatcttgtttacctgtcacattgccacatctttaattatacatgcaaatcttctcacagacttacctgcttaccatgcctagtgacttttcatcatctgcagagtaaactgcagactcttttacttggctttcacagcccttcacagtctaggccttgcgtctttttatagcctcacctccccacaacatctcgctttagtgacgccagcgttctcatcatttcctgaaaatgtcatacttcctgttgcctccatgctattgcatacccctttgctggaatgcccttttctacatttggagattgcctaatgttattgtaacctctcagtgaccctctcatgattcctttacacagttagtctctgtgttctattattttatgtgtcatagtttgttgtaattaatttttacgtgtttctcatctgactgtattagttcttcacaggtgggtctgagctttattcaaaatgaaccataagtgtttattaacttcgttgtgaaaaggagaactattcactgttttgtcctccagtatatcaacaattctgtaaatctaattagaaaatgaaaaacacactcagaaaactagactgattcattcagtttggaatgcttgttctattggtttttcattaaaaggtgttacagttatatctccatcatgactgtgacagcattgatactgtgagtcactgaagagatttggtggttgagagaataatttttcctgattgtcagtttcaagttgttttgctccacaaggcaagggagggcatatccacttaaaagattttaatcctgactagtggaaacggcagtgataccttcttcataattaaaacgttattctgaaataaccctcaaattaaagtggattccttggtattaaaaagatctcttcttggtggtcctcagggtgctaatcatctttatacatctgccacttccatctaccactttaggaaccaccacaggtcaagcttacccttttagtttagggatagctcactaccctacctcatcagaccttatgagctcacatcactcagatgaaaaaaacagaggcagaaggttagtgcttgtacaaaacatatatgggaaaccaaggtcagcaaccttcttgtttcagttggaggcaaatactctgaaatacactgttggcagaagtaaccatttttatctgttctccactgtaagtactctcagtagaacaaaggaaaatagaaaaatgaaggttccttcactctgtcttccctgaagtatacatgctgtacctggatttttgtttcaccttttccctttgatttgatattcctggtagacagagagtacttttgcgtacttatgtgtcacctttctcccttttagagaatctgtcatgactcttacttgcttttctacggggaggtggggtcaaagatttggatgtttacctagacaaccaattggagtattaatacattcaggggattctcagatctttagttttgaaaaaactcgaactcatgaaaatagaaagccatgagaataccgaatttactagtagcataggactatttttttccctctctctctctacctcagataatctgttttgattccttgagatcgaatactgtcttcctgattctttctagtgctttcctacctgagagagtccacaagaattgcctttctagatctttattcttatgacagcttctagtttttttttcatgcttaagaagccagagattcttcatcttcttcaaacacatccagcactatttttgtcaagaccacaattaacaaaatgtttcccggaatacgtgtgcgtgtgtgttgtgtttaagggaagcagaagtcattttgacttgtttttatcatctaagaggtctgtttagtcacagtgtattgtggaaaatatcagtacactttattttcattcaaaagacatgatttgagagcctactctagggatcggagccctgctcgtgtgacaggtgacaataaaagaaaacagcaaacttggggtatgtgtttgcacgcgtaggggtgtgtgtttgagggaaagggagcgggtgggggtttgggtccctgagtcgagcattaaggatgagtttatggcagtggtgacttatgagtagagttgtcaagacagtggagcccactgggtgaacaacaaggaagacagccttccaaacagaggagtatcttaggcagaaacagaggtgtgagacactaggtggatccagacccttctgtgctgcagggattcttgtagctgcctgtgattcacctacagtcactcctgtgcttcactgagtctttgtgtctcagctaagggccctggagagtgctcctgtccgatgaacttggggaggctctgatatgggctcctgtacagttcagagagcttagggattctccatgcaatggccttaacgtcgcctgttgggtgggagatgtggggtgggatggggctgacacccatttctgtgggcagtgcttacttctgttatctttcctgtaggtaaactgtgccagtggactgatgcctgcctgtcccacccctgtgcaaatggaagtacctgtaccactgtggccaaccagttctcctgcacatgcctcgcaggcttcacagggcagaaatgtgaggctgatgtcaatgagtgtgacattccaggactgtgccagcacggcggcacctgcctcaacctcccaggctcctatcagtgccagtgcccccagggcttcacaggccagcactgcgacagcccctacgtgccctgtgcaccctccccctgtgtcaacggagggacctgccggcaggctggtgacttcacctttgagtgcagctgccttccaggtaaggagtccccctggcgtcctggcttgggggtgcacctccagcgggaaggaaggggatggggtgtggttcagcgttccttgaggaagtgtccttccccgcacggaaaaggggaagtgagactgttgtgtggggtggtttgctggtgagagaggagttttatgggcccagtgtggtccataaactgagcagggggtaattcaacatgtcagagtttatgatgatgagtgacttggaaattgtttattgtcctctttggaggaacagtgagaaataagagaaacagagctctgggaaaggatttataagtctatagaatggaaaggaacataaggagaattagacattgaaaaatttatatgtgtgattaataaaatgcttcaaactgaattgatagtaataataaatgatcaactttcttatatgcttttacctctgatggaataatggattattttactagttacctgatttcacccccctactcttttatagtttttcttgaaattctggtctttagaaccctctctaactttggggtagccctacccagacttgaagctgaagccttttgcagctggcgtggtggtagtgctctgttaacgagtgagcactttttgatgaggactgatagattatgtatggcacaacgacatataacccaagatggaagcaaaagaggagtaatgtgtgggaacttggggcccattgttccataggatggaaaaaggagcaaggctggccagttcactaaactccttataaaactgatgaggaggccaaaaactgagaattttgattgagaacagagcacaagtggctggagcagatgaattactaagcaacaaagattctgtttttatacaaatatccttagtgcaaaaacaaaagagtgaaaaactgtagggggaataacatgctgagtaagcagaattgcctcaaaaagctgttctagccactcttggagtaggaatcttagattctggtgttgtggatatgcgtcacatgtagtgggatcgtgtgttttctcttttgaggattaaaggtcatacattggtcttcaggataaaagcaaatggtaatttattcatttcattcagttaaaattttttggctgccagctatgttctaggcaccatcctgtgtacttggaatacacaatacaagacactgccacctaatagaaaaagataccacttaaccataagccacaaaaacaaactgtttaattgccttgctttcagtttctctttcagtgaagagtagatactgctgtcattttagacacgaaatatttatttacctaatattactgtcatccacattatcttgtagaaggaataactaaaaggtatctttcttcactcctgcttttgtttgcattttaagggttaaaagaaggaaacagaaatgtaaacaatttaattttgtgaatattctaatagtctggtattctaatagcctaagtggctagtaattgaggttagtgcgatttattgctgaccactaaacgtgtcttttagtttcaagaaaattagttttaatagttgcctaggacaggaggttgatttggcagcagagtactaacgggaagttagagaagtcaataaaggaagtttttagctgggagagagtgattattcactcccatagcctctgcattgttatccattagccacgataagaaccttagggaattctgagagtgtgtccaggaaaggatctgtcaaaccagaatagtatctcctccttgagaaaggaaataaccagggattccacagctagaggctgccagggctggtgggatggagtaaggacgtcttggctgtctcttatacttaaagcaagactttttttttcctttaatatactgatgaagtgtgtgtatgtgtgtgtgtttgggattgggatgggggtgcaaggctgggggcagaagatttggcaaagagcaaactaacatttatttaatgccttttataagtcaggcactgtgccaggtacttctgcagccattagctctagtacacaaaatcgttggggataggtattattgttcaagttttcccaggtgaaacaactcaagttttgagatgtgaagcagtttacccaaagttgtacagatgacatgtggttaggccgagtcctgaaatccaggcaggttgttgccaaatgttaactgcttgtctgcccctgaaggtactttgaaatgtcttaagactttttgttaaatgtttagggatgtatgggttaaaaaaagtaggttcatgttaaaataaaaaggacatacttctaattatgatcgatagtatttgttatatgccaccctgtgtatgggcttgcccaggtagcacagtagtacaaaatttgcctgccaataaagaagacacaagagatgcaggtttgatcccctggagtaggaaatggcaacctgctccagcattcttgcctggaaaattccatggacaagcgagcctagtgggctacagtctatgaggttgcaaagagtcggatatgactgagtgactgagcacatgcctacaggctgcatatggcatcatgcagatatctaaaaatagtaaagtaggctagttgctgcctttcagggtctcatgatctgagacagatgatgtcagcttggacaatatatagaaggaaattaaaaaagaattaaaaacaatagatgatgcaataacactgtgaataaatatgtatttataaaatgtgtaagattttatgctcattgtttttatgtcccaggtggagtttgaaaagtattaactttatttccacatagggaaatatgtctggagatgattttcttttacagagtcctttttataaggaaatactattctcctgtccctcctgcattgcccccaacactagtcaagagactaaaatgttacttaaaatagcaatcactatctcaatgtaaatagcacccttatttgaagagaatcattatttccattctaaagatggagaaaccaagccagtgacaggtaaagtcacttttgtccaggttctgcaattctcagatggttgcttcccaccacatttcaaatcttggcagttttaactgaggcctgccctaatcaccctatttcagattgtaacctttcccttccgccttcatctctggccttggtgtaccttttcttttttggtaacgcttgtcatcttactgtgtaattttcactatataatttacctcattatgtctattgtttatagtctgtctttccaaattcttctgcctcttctcctctccagagtaaaagctaggatctctgtttttgtttggtgatgtatcccaagcagctggaaaccgtggcaggtatataatagacacacgccttctgactttacaggccgagtttagtgtagtacggtagtactgagagcataactttggtcttattttcttcctggtaacatacctgctagacttggtctagcttctccttctgcactggtttacactagtactgagtaaaaagaattggaattcttttcaactctaaaactcagtgaaccccacataagttagtgattatatttgaatggttatgatatagttcttttcctgcaaagggcacagtagttactgagatgattttagtattattttaagattgatgggggaattaaaactgtaaatatgactcatcctgagtaataaagaaagaaatgtttctcaatagaaggaagaaaaaaggaatatattcaagagggagctgatagaatgaaaccaaggaactgtatttcatcttttccttggttcagcaactgttaataacccagatccttccattaggtaaagcttttagcagaaactgtaaggaggagtactcagctagaataattttagctaaagaacaaaatagaagatacatacttgaatcactgactcccagtattttggggtttatgagttaagctgattgtatgcctgtggatatgttaagaagtagcagtgtgctgtttgcatctcctggctttgcctgcgagttcacagttggactggacaatccctgatgggctttccctttttctttctctcctgtacctccttattcctttatgatttttaaacttcataaaaagctgcccaatctgttctctccaaacaaagaaggtttatcctttgtaaatcacccctatactttacaggcttgattatatgtaatatccctatatcattaaaataaagcttagccacattctgtggcttttgtgtctgctctgcagttgctgagcttaaaaactcttagaaataattccctcttgcattctcatatgcacaaggcatgtgacgttctctggggtattatactaatcatattctggcagatttctctggagcagatgcagaaattatcataccgttttgcagggcgcattcttttagcccctttagtttgggccctgagtccagtttttcttgatgttcctacaagtttttcgtatcctcccatgcttgacagttttgcccctgctatctcctaagccttctatcacttacctccccctctcaccctgcctttttgtatagaatttattcctggtgatatgccaaaggcatctatttcactgaaatgccttctgtattccccacccctggggggactagagacgttcttaagatctttcacaacctatgtacctctagcacaacacttaattaaactgcctgttcatcctttctagtagatattctcatcttaactacccgccccagtatccaacctcgtgcctggcacaaattgagactcagtgaatatttgacaaatgaatgaattggatgtgatagagaagagcattcctacattctgtaattaaataaaaaagtttagaaattatttcttttgaatccctttactcatttctctgacttcttaggaggtaaagttagaaaggaaagtagagctcatttgggagatacagagggaggtggctaggaacagcagcctgggtgggtgatggggctaaaattcacgggccacccatggggtcagtgagctcactggagcccattcagaggatggatggagtgtgccagggaaaccagtgggatggaattggaaccaatttgctcttttaacaggcttctttccagaaagcagggagagaaggtagcctgtagctgtttacctttggtgcctttgtccagttccaggtatccctgggttttcttcactctcttatccctgggcatggaagctcttcctaaggaccttcagcctggcctgggagaatcccagttgtgtcatctcagcttccccctttctgctctcctctttgagcctctgcaccaagtctttccactgtcatgcctcctagggactaaaagtgaaaagatatggaagcactcttgagagatgctgctatctgtgtgggatgacaagttcaaaagacacttttctgctccccaccctccctgtcatcgtttatcagttatgtggttttagaacagcatggtcttaaaaatgttccttccgagtttaatttctttctttctggccttttaaggatgtgagttggcttcgggcagcagactccttttagtacagtcatgtgagcctttccataagtcagctacacccatcccacccacaggtctggagacttgtctgcttccctttcccttaaaaccttcgaacattttaaagaagtgattgcactgtaacttattcatttaagccacatccatcctctgcacccccttacccctacgctgggtagactttttataagaatttgctagttatttccaaaaagagacctgtatctgtatttttaaagcataaatcctgtcttaattttcagggagaactgattcggctagagttttctcagatatgggaacttttgacccaaggtcagtttttcagatttttggaagagaactttggggtcccagagaccatactgaccaaatctaggtaaagtttctggtttaggactgactcctgcctcctagccatgtacagtaagtcagccatgtggcccttcttcatctgtaacataaaaggattagagtagataatctctaagagatgctttgatcccattgatatataatagtattagctaatatgtataaaacacagtgcatcaggcattgttttaagtgcttttccttctaatataacagttttattgagatacaattttcataccatgtaattttcttttaaagcacactattcagtgattttgagtatatttacagatatgtgtaaccattaccacaataaattttagctcatttttatatgacttcaaaagaaactttgttcccgttagcagtcactccctaacctgtcctccaccccacccccaccccgtaccaattccctcccagcactaggcaattactcatctactctctctatagagctgtctattctggacatttcatataaatgggaacacatagtatgcttcttgtttatgcattatattccattatatggatttaccactttgtatttatccattcatcacgaaatagacatttgggctgcttctgcttttttttgacaattaagaataatgttgctctgaacattcttgtacaaggttttgaatgggcatacattttcatttctttttggttttacttatgagaggaattgctgggtggtatggtaaccctatttaatcttttcaggactgccagactataccccatagtggctgcactattttattaatacattccaaccagcagtgtatatgctatgctatgctaagtcacttcagtcgtgtccgactctgtgcgaccccatagacggcagcccactaggctcccctgtccctgggattctccaggcaagaacactggaatgggttgccatttccttctccaatgcatgaaagtgaaaagggaaagtgaggtcgctcagtcgtgtccgactcttagcgaccccatgggctgcagcctactaggctcctccatccatgggattttccaggcaagtactggagtagggtgccattgccttctctgagcagtgtataaggattcccaatttctctattacctcaccagcacttgttgctatctgtctttaaaattatagctattctagtgggtgtgaagtgatagcttattgtggtcatgatttgcattttcctgattgctgatgctgagcatcttttcatgtgcttattggccttttgtatatcttccttggagaaatgtctatttagctcctttacccattttataactggattatttgtattattatattatggatgttgtattttaattttgttgtaagaattctttgtatctcctagatatatgatttgcaaatattttctccctttctgtggactgtctttttactttcttgattggcgttctttgaaacccaggtggtttcagttttgattaattccaaactgtcagttttttcttttgtgacttgtgcttttggtcatgtgtaagacatctctatctagcccaaatctcatttcctcctatgttttatcctgagaatcttatcattttaactcatacatttcttagttcatttttgtttatgggatgaggaaggaatccaactttattcttttgcatctagatattcagttgttccagcacaatttattaaattgtttttgtttttttttctgtctaactcatctaatcgttaaaacaacctttcaggtaggtcctgttaattagtccagagaggaaagtttaactattaagcatatataatgtcttgcccatgttcactcagctactgcatgaaaagtgtgagaattgaatctaggcagtttaacccagaggccatacttcaaccatgaattaactctttcacctatttgcctttctgcctaaataactacatagtgacaggtaagaactatctcaaaaatagtgatgaaaagaaaacattttatttcttatatgttatggttatgttgaaatgtttctgctttcttaatttgtctgtggttggtgaattctgttcattgtaacactggctaatataaattcaaatagtttggctacaaaggtttcatcacctccttgacaccttagccaaccatatttagccttggtcaccagggagatcaagttgggatggccagtatcaattctaggacaccaccaaaccacacgggtttctaacagtggtgggccaggacccatttctctcccacattctgaaagtatccaacttttccaaagaatgtttccatttaagagcactagactagaaacagggacttcagttgttgttcagggacggtactttgcagatctatagatttgctctcactttatcataattttgggtgggcttaagcagttcagcatttactgactcaatccatttgaaggactgtcatatgattaaacagatatgagtgcgtgctaagtcacttcattcatgtccaactctttgtgaccctgttgactgtaacctgcgaggcttctctatccatgggactttccgggcaggagtactggagtgggttgccatttccttctccaggtgatctttccaaccctgggatcaaaccctcatctcttatgtctcctgcactggcaggcgggtactttaccactaacaccacctgggaagcccagaagatatttgagaaatatgattaatttttttaaaatctgagtctatacattttttcatagtctttctcaagcttacttaatgactcatctgcttgcatggacttcttaccaaatacccagagaaatagaattctcttcagtcaagcgtccaattatctctgtcttctacaaagtgatttcctttggtctctgggtaatttttttggttacttggttcatactcatgtacatgactgcaactgtattcagagaaaccagctatgttccagtgtaacggagcagatgtagaacaccacagtagcttgtgctaaggaatgaagaaagcaaggcgtgattgatgtctgcccactcaccggactgcagtgtcctgaaagcaggaactccttcttttacttaactataccagtgccagtataagacccaatatgtgttttgagtaaaagagagaaacttaagggacattctgaagaggtgaaatacttagtatttcaaataagagaatgttcagtaaacttcctctcttgtcttaaagctgatagtcttccattttaatagttaagagatttggtagctaggaaagagaaagaaaaaagcccaatgtataaattatataggacttccctggtggctcagatggtaaagcatctgcctacaatgcgggagacccaggttcaattgctgggtcggggagatctcttggagaaggatatggcaacccactccagtattcttgcctggaaaatcccatggacagagaggctacagtccatgggtcacaaagagtcggacatgactaaatgacttcactcactcataaattatataggggaacatgctatgtgcaattaggatgaagtttgatgtgctagtttcatttttcataaacgggaaaaatcaagaggaaggaagcagtgctagaagtgtgaaaaggaggatgaacaataagagctggcaagtttggttagtaataatggcaccccatattcagatggctttttatatttatattgtgttgtccttacgatgtggcacttataacaacctcaaaagacaggctgggcaggtgcagccagacttattttacaggtgaggaagctactttagagcttgtaattaccaagtattaaatggcttataagcagtgaggttagaacttgacccttatcttcagactttcagttcagtatttttttgtctccctattctcccccatgattttcccaagaaaaaaacaaaaaggaatttaaatttaattaggtaatcttttatttgttcttcccattaatctagcatggagctggggaaaatctaataccctttttttttagaaccagctgtcctgagtagacatttatcttcactgggattttatttcatgaaaacactttgaaattcttgtgaggtaactatgaaggcatgtcattggcataatgattcgtgttaagaaaagacagaagattgggggatttttatatggtgagtcttgggttgaccatctgctgtctgttgaactgtaataatgaagtcagtctgttctgatgaccatgtcctgtggagaagaacagatcgcatcatctctatgagaatgtatcatttcttttaatccttctcttactaggttttgaaggagtcacctgtgagcggaatatagatgactgtcctaaccacaagtgtcagaatggaggggtttgtgtggatggggtcaatacctacaactgccgctgtccccctcagtggacaggtatgtatggtgtgacaaaccattcagaatggggcgtgggtcagtaagcagaggcaggttgttattgaagtgggccccttttacaacagtgtctgtgctacatcattggatatagtgctaactgcatacgtccccctgtgttcacttaaagaaatattctcacggacatttattgggcagatgttctgaactcagtaccatgctaagtgctgtaggacagctgtccctcacctttctggcaccagagactggaagatctctggtggaagttttttccatgaaccagaagtgggagaaggatggtttggggatgattcaagtgtattacgtttattgtgcactttatttctattattattacatcagctccacctcacattttcagagattagatcttggaggttggggaccctactgtagaaaataggaaaaagaacattactgaaagactctgaagttattatctggcaaagcaacacactgcctggaacatagtagatgcttattaaatatctgagaggaaaagaacattgttaaatgcaaaaatataaatattcttaccatatacaaataaaaaaggttaactgtgtgagataatggatgtgttaactgatcttattttggtaatcatttcacattaaacatatctatcaaatcatcatgtatatactgcttaaacttacacatatgttatatgttaaatatagctcaataaggctggaaaaggaaaagaaactacaacttgtcaagtttcagtgtagtatcaatgaatattctaaattatatgaaaagattattagaatactcttccttctgctcttctgttatcaagctaaaaaaaaacctgaaaataagttgtacagacggggaaagttcagagcttattgtctgtacacagatatctatctcatcttattgttatgacaaaattatgcagaaggttgggcaggtcctcttgaagacattatttttatgacacctgtctacatttctgtattttcctttttttgtatctttttgcacatagattcttctgcctctgacattagaagagtagatttgcttaaactgacaaccatttggaagtttataatgttgtcttcttttcttatttttgaaattgagtctgtatagacatttagttccagtttctgtttgtatgtatttatctaactgaaaatggagacaagtaagaactgattaagcaattaagaactgggccttttggagagaagttgtttgatttaatatggaaacccaagagcaagctaatgttattaggaagaagctatagtaccagcaaaggattgcgtccagcaaagaagtccagatcttatattgctgttgtttttacctgatattcttcagcatctccaagttgccttccctcatctaaagcagctaattatttagagtactctttagagctgtagcctatgaatagaaaaagactaaaaggatttagaactccagtaacatgatttcctggaagggcttttctgcttttaatccccaaactgtctgtttaaaaaaatactttcccactgggtttccctaaagttggacttcccctagaatttcttcttggtatcttaatcctaggacttcactcccaacactctggtcttgctgtcatattctctcttctcttcagattctgccatttctgtggtggtttccccccccccccataggccattttttttttcaacttaaaaagattactctgtgatgacctaatgggagggaaatccaaaagagaggggtttatatatatatatatatatatctgattcactttgctgtagggcagaaactaatatactatactccaataaaaattaattaaaaataaatagaaaagattactgtaaatttaattatgtgacaaatagtaaccggaaatatttaatttttctctttttaatgatcctcccagaagtattaggcaggatgagatacatgttaggaacttgacctcactctaagtctctcccttgccctgtgggagagagttgctctgtgtggtaccaaggctcctgatgctgatgaagattaaatgataattgtgatttcattgttgatttttctttgataccacaaataccctttgagttcctgctttggtattaattaggaaagctcaatcttggggaaaggtttcccagtgaaattacattttaccaaaatttcttcccccaggttgtttaatagataccttttttccctatgaaagtccttaaaagatgtttcttgtttcatgtatttttgtattgtttttttagaggggatggcagagatgataaatatgattggtgtgtcattatttatttcttttgacctgctgtcatataaggtacgcttatagtctttggtttcctaccagtttccttcctcttttcactgatgccagtctttgatttccagttgacaaccttgtttttttgtttgtaccacatcctatgtcttcgctcgcaccgtttcctttttaatactcatttatttattcgcttttgcctgggctgggcctttgttgctgcatgggctttcctctagttgcgacgagtgggatctactctctagttacagtgcacagacttttcattgcagtggtttctcttgttatggagcacagactctagggtgtgtgggtgccatagttgcaacttccaggctctggagcactggctcaatagttgtggcacacgggcttggttgctgtgtgggcatgtgggatcttcccggaccagggatcgaactgggtctcctgcattttggcaaacagattctttaccagtgagccaccagggaagccccacaccacttcttatctctagatttccttctccactcctttccctatagtcctcaccagttttgcctgccaggagcagatcaaatggttaccttcttcaggaagccccccatgccctatctctaggctaagctaagtgttacctcctgggctgccttactaccccctacatttctctgtgataatgctcactgcattaatattggcattattctaggcttgaggtaatggaatggggtcattgaactgttgatgacagcagatactagagctctttacagatctttgctgtcagtagcatatagctgagttcctcattatcccagccccaacatcattctgagaagagtagaaaaattggggattgtagggttcctatttatattggtattagagctataaataaattcacataagtattttctgctttgtcaaaattaaagaaattaatgtggctaggggctgagagttaactgatgcttattagcacctaaataatgtgctgattgcaatattttattttgtgtaatctttgcagtaactgtatgaaggatagagttttggctattctttttacagatgataatagatattcagaagggttaaacaatttactcatggcttataatggttggattagggtttgaatctaggcttgttgaactctaagtctgtgctcaaatctatggtcttttttttttttttttaaactacagattgactgactctgtgagttatctttaaaaatatttttattaagggctttgagtcttttttaatggattgaacatttaattcatagttttattattctaggtaggatattctgatttgttctttctgtgtgtgtgtgttcctggttacttagagattggaagttaatattaagtaaatgttttatatttaatctggtggttttttcattatatttcaaaggcttattgcaactttgttcagaattccttttacagttttcagctgcagagttgaggtatgaactgtttgtctggcttttgacaaaattgagaaggaagggttggagccagctaagagaggaaatttagttgccagctatctggaaaaaaaaagaaaaaaggttggaattgtgtagttaaaaaaacttaggtatcagtttgaagtaaatggagatttgggaattggccacatttttaatgagaagagcctgataggtaccatgttattttaataagttgacctacaaaggcagttttgatctttcgtagcaagttctagacttcaagatgaccaggaattttttccaagtcgactcatggtttgatttggaataaatgagtcatgttgcctttcttcagaaacttttatttactgttcacagaactgctatctcttagtttcttattgaggtactgggaaaacaaatggtgcagttaaaaagctttttgagtttttcatttatttagcagacagttatcacgtaagtcatttcaggtccatgctgtttgatatggtagccactagccacaccttgccattgagtatctgaaatctgactggtccagactgagaagtacctcaactgtaaaacacttgattttgaagactcagtatgaaaagtaaaatgtctcactaataatgttttaaatattgattagatgctaaaatgataatgtttcacatacattgttagataaaatataatatttaaattaattttaccttgttttcctttaagtcctaccagaaaattttaaatgacatctgtatctctagggatagttctatttgacagcattcctttgatgcagggaggttttatgtagaagcatcctctttgatcctgagtggcagagggaaggacatgaaactatcctcaaggggcccttgtattggcctcactatggggaaagtatgttggtttccacatcaggtgtggacagaactgtgtccaagctctgtccagagcgcttttacctgacgtgttgtctagaatagtactaattagtacctacaaaggttactactgttccagacaacctaaagtccaggtggaagaaagaaattgatgttgggagttgggcaaatggtttactttttaaaataggaatctggttatagaggtaagtcagcagttagatgtttctttaggaagtagaagtttacctaagaatttgatgaagcctgagcaccagtatctatactgttaccgcatttggctccaagccatcttacgagagcagttctgctctggcagatatccatttaagaaaatataaaaggcccccaaattaatcgaagccatgtagactaatgttttgtctacataggttgttattcgaattttcctttaaaggttcatttccttcagaattaaaattgactctaaactcaactcacgaattcctctctggcagcttttggttttgggttcactcctagggcagacgtgatttattttcctgtgcttgttattaacccagaaatgtgatttcaacttgggcttggaatcgtgctttgggacactaagcagaagtgaacaatggaagttaggtggacacgagtcaaataaaaccgaccacattttctctcgcctctcctttatggcatgatgagcctgaagtgttagttaagattccctttgctgtcagttgctccaacttcagcaaaaaacttttggcatgaatcagaaagtatacatactgccagagatggtgtctgggaatggagtcttttcatgctatatttttatttagaaatcagtgctccaaagctgttctccagaataaggcttttctccaaactagttttctgtgtttttaatactatagaataaatggagctttttggttgagagtggaaactaagtatatcagggattgcagacatttttttcatttgtattctgcatggaggaatggaaaaatgcatctcccattacaatttttctgctgtcaacttgattgtggggacttgaaattaagcctggtttttggaattctgcttcccctcccaatttcagtgtgctatcagttgggcagactgccaagagtgttaacctgaggcactttcatcccagaggtctcagagctgattaatagtcatgttagtgggaacagggctgagtagttactataacccaacacaaaatgcagggggtgacactgaggaatcttttctgtcttcatgtccatgactcactgtctgacttttgctcgatcccagaaaagatccagtttttacttcatgttataaggtagcttcaataacagatatttgttgaataactaacagttatatccagtacactatgctagatgctatgagtgagtgaagtcgcacagtcgtgtccgactctttgtgaccccatggactgtatcctatcaggctcctctgtccatgggattttccaggcaataatactggagtggattgccatttccttctccaggggatcttcccgacccagggctataagagacacaaagaagaaataaatcaattcctctctttgataaatggtcacattcactaggaagaaataagaaagtctacacatagccacaagagaagttaacaggtaggagtgatcatgagtttgaaagaagcatggataggacttgtggaccatctgagtacttggctgggttagggggaagattgagaagagctaacatctatttttaaatgtgagtaatgggagaatatggagacctttgacagagataaggaaataggctagagatgatgatgagtttgaggtgagttttccaagtgaaaatgttcagcagtaagacctaggcaatcaaaatagaggtaggggttagagattgagacttttgagtcttatttttggttgcctgggaagtctgtaaggaaagtgtgtgggctgagaagaccagagggtttggacctgtttggatcttaagtctacacttcagaagtgaggaaaaggatctaaagaaggaaggtgagagaagggaggactgagagttcagaagaagctctgccattatagcatcactgagtcaggagtgcatttcaagactatgcctttgactcaactctatatgcctctgttatagcacctgcaatgttacaccgatcttacttattaatatacttaactcacataatacactcttagcctctagagaattaggaacctgtcttacttattttggcatatctaagaccaagtttaacaaatgatgataattgaaagaatggcaaccaggagactcaaatattaatgttaattgcagagttagtcagaaattttgaggcctttagaaatcttctacaatggagtttccctgtaaaggagagaagaaagccagattgcaagaggttagagagaaacgtgggtgttgaaggaggagtaaagggagaagtggaatagatcacttattcaaattttgtaggggtaaaaaaggggagggagaaagagagagaggagtactgtgcagtagcttcaggggacagaaacttcattcatgtgaccaaccctagaaccttggctagactaagagttaaggcagctaggaggggttggttaatgaagtgggttatttaggagtgctttactcttgccagggctttcctagtggctcagacagtaaagaatccacttgcaatgcaggagaccctgggttcaatccctgggtcaggaagagcccctggagaaggggatggctacccactccagtattccttcctggagaatcccactgacagaggagcctggtgggctgcagtccatggggtcacaaagagtcaaacatgactgaggaactaacactttcacttttcactttactcttttgagttttagtgggaaaaattaggtgaactggttgttgggaatgggaaagaagagtgattgaaagttatagtcagagagtggaagtaccgatttgggatcttggagttggaacaatgagtatcttctaatgagatctggaacgtgagtctgtttgtgataatgagtagatgtggaggtctgtagagttgaggaaagtgagaactcttggcttaggtgaccttattggtcctcaacccagatgttgatttcatgggagatgggagagcaaagaatgagaagataaaccatgtgtttaaataattcaaggacatagaaattagtccttgaagacagtagaggtgaaatgatttgaattatatatcatgtttactcagttgcttcagtcttgtgaccctatggactgtagcctaccaggctcctctgtccgtgggttctccaggaagaatactggaatgggttgccatgccctcttccaggggctcctcccaacctggagattgaactcacaatgcatattctgcgtcccctgcgttgcatgtgggttctttacccactgagctacctgggaagcccatatagtgtttagtgctttttagattttaaaaggtatacatgtttagaataattttgatttgaatccatctttctgcttttctctatccaaaatgaaactatatcctcttttgtaaggtaaggaatgagcatacttttacttcttttaatcttctcttaactctccggattttgttataggatctgggattttaaaatttatattatagtattattattactcaaacttaaagtcttactcatgttctttaacatgactgctattcatactgttttaaaattccgtttataagactttagacttagttatatgtgtaatttgttctgtgttaactggtagtgcatttatatcacaaccttcttacagagctcatgaatatttgaaaaatattttttaacgtagttaccttcgtacacaaatggcatcatgtatagatattgaactcttgggtcacgaattatattatgaagttcctagacattattcctttgcttcttgtagtgagcattacagagaagtccagtgtcttccgagttattctgtctccctctctttctatctctcttcctcctttaaaatcagaactttaaccaatattagtataggcatgtttcctgtcattttttttcctagtctttttttgagttctttggctctgcaaacttaggttcagtctcatctcagaaaagattgtttctcatttgttttttgtgtctttaggaatacctttacactaggtcttcattcttccccagagctaaaatcttttctctcgatattttaatcttttttcctttgcatttcataagagcttcttaagctttttttttttgcataactgatttgtttttcttctttgtcagctctattgtttatagttgccaattctgatttgtgtttgaactgcattcttattttctgataatatttactcattctgtctaggtcctctctatttttgcctttctctcagcctgccccattttatcagagcgtcttaatttcttttgaaagattgtataaactgtatacagacactgcatgtgtataagattcttgagaatatagaaccaattctttctgtgacgtactcatttcaggaagtgtgtatttttcacttgtatgcttttcatctacatttcacttggtatatctacatctttcatattgcaaatgttctaatgaacaccaggttgctgtttgtttgtttggcttactcattctgctcattagtaatgccttgccataaatagagtagtctgattctctttggaatccctggtatagttagtttttgcttccagggaggtgaggggctctgtctgtaaaccgttaacaacccagcagcccaaagaggtgggagagagccagagtgtgtgtttttcctcctggcaggaatgcaaaagcctagcaccatttttttatctgggtagagaagcttctgtgccaggtgtccgttctccgtacagtggctgagcctgattgctctttggtgctgttgcatctggaatttgctccaaaagtaccacagacttttttgatgctatagagaccacaggagccctgggactcctcagtgctttaaattgctattgacctggaatggtgggatggagttcagtccattcttcccacaggagcagggtgggctttttgaaacacaaattggatcatgttatttctttgcttgaaatgattcagtgggtcccctttgtctttggatagagttccaaggctctgcacataactacctgtccaaccttatctccactgatatgtgccttataattaaaccacagtgggctttttcattgcctcaggtgagccatattttaccttctattcaaacttgtacacatacacttcctcctgcctgaagtaccccacaccattctcctacgttcctacacaaactggttaacatgtagagtctttgtctctctctctctttcaacagtaatttatgatttattcagctgtaatgtacttattctgactttaaggtgccatcacatggcatacttttgggttcattccagagattcctgaggtcactctttatttatctctgtcattttatagatttgtgcagtctctggcactcaggagtcatctgggtttggaagacatagcattgaaccaatggataaaaaaagaacttcagaaacagttgaagcaggaggacattgtgatcttagaatatcaatacatatgctgctattactgttaatatttggatgataaactcttgtaaatgcaactttaggtggtttgaaggtggaatctgtaggaatatgaattttcaaaacacacacaaaaatactgccttgatgcaggctgccattaggccataatcttggcttaatcttcccccacttgacctgcaggacatagttcttctgtgttctcttgctctgttgtcctcaggcaacatgtatgtattactgcacttctcaccctctgttataattatttgataggttgtaaaaccctcttttgtctgtatattctgggtagaatccacaactgcttgtttaccagtttgtataggtcaggcctggcacataatttatacatatttgttcagtgaatgaatggagcattaaattttctcattgttctggcccaacatcatgcctccaaattcagggctatccctgggtcctgtcagggtctcttctccttacttccctgagatatattagtatctttctttatcgtggaccaggtctgtgctgtctgtaaatctggactaattttatatgagaggattacatttgactatcattgtaagcactcatcacagtgtctagtacctagaaatagctgaataagtctatttttactatttgaagtcagtagcaccactaggaaataaaagagtggctctttgcctgtttaccttcatgcagatggaggcaactggaagaggagggttgcttgcctactgggatggagtctttagggaaatcttaagtttcaattgaagaagtaaggtactccaacaatgtagagtcacctcgagacatagttgagggattaaggtcaaaaggccagataaatttggtgtggtataaacgagatggagtttagcagctaaggaagagagtggaatgagagacgtgtatattgatggggggatgtagataaggggatgatgaaaactttggcagtatgagtagaatagagacaccttgttctactaggaataggagtcaaaagatgactgttgagtttagaatgatctgagtgagggggaaaagagcaaataaaatttgtttaaacaaatattttgattacttctcaagaaatactattagcaaggcactatgctaagtgctaagggttcactgatgaagtaaatggtaccacccatttctccatggaacttggagcatgtgtctagcatatgtttagtgaggaacccaggcagaaagcatgtgattatctataagagtttgaactgtaatgaatatctagtgggaaaagtagaggttatttggagaacatattaacaggcagaactatctgagtttggagtcagcatgtactgtctttcagctgtggacagtgggtatgaattattaggggatcattgagcctaaaatgctccaggtgcagcgtcctgggcaaagacccatagtaggtgaagattgtgatcatgttgagaaatgatgaaaaagccagagtgcccagcactagtcatatttcaaggggaaagactggagtggtaggcataaaatgtagaaaagatttagaattttatcctaagagtaatggcttgcctcagagggtttgaaaaggcaaatggcacaatccattatccatggtgaggtcaagttggtgatctttagatactgtattgatcatgatgcagggaaaccaggcttttgaggagtctggcaaagatgatggtgtccagggttagcaggaacattcactgagattcttgcatttatctgcctgtgtatctcctatgcctatcatacctacaggatcttgttagacacttgttgcctcagcctcacaggcacatttgtgtgcttgcacgttagtgcatgcacacagtctctcatcaggcagatcctgtagactccagtgtttgtgcaaaatgtttcaaccatctttagccctgggaggttgaagaatagtcaagcttgtcctctgccctttcacttcaggagaggaatagaaaatctcctgtgtgtagaggagaaggtttgtaggacagagattaaaagaatgccctgctatgataggaagagatgaaactccacacctcaggagcctgagcgactgctggctgggaggatatattggagaccagactctcttgatttaaccaaagaagaggaggtagagggtcagggcaagggtcagccaagctcattttttacatgttgttcatatggtgactgttgcaaatgagaactgacccttaacagggccactgatgtggtaaaagtttttcccacacacttcacacttgagagatgactaggaagggccagggcttcttccaaaagtgctaaggctcagtgatcatttcttttctttcctttccgcccttcctcctcttgtttcccagtcacttgtaactcaagtcagattgatgttttgtttgtggtgtcttgagaaaaccgtagtgagctgtctgtatcgtcatgtgttgcagctcataaaatggtgtcttgtgtagcggtcctcagttcacatggccagaacttgatgctagtgaggctcaggtcagtttccacttcagtacagtcctgttgggttcactctattttctgccacacatgctgctcctaatcttactcattcatcctttgcttttaagaccatagatggcggcagtaagaaaagatcattatgaaagtgaccccactcctacaaaatcaatatagtgtactcttttttcttgttttccttttataaaatttattttttgattgaagtatagtacatttacaattttgtgttaatttctgctgtacagcgaagtgttacagttgtacatatatatacattcttttctaaattctttctcattatggtttatcataggataattgaatacagtccctgtattatagtagaaccttgttttatatccatcctgtatataatagtttgcatctgttaaccccagactcccttccccacccgcctttcctttgtcaatcacaagtcccactcctggccacatattcagagaaaccataatttgaaaagatacatgcaccccagtgctcattgcagtactatttactatacctaagttctctgtgtctgcaagtctatttctgttttgtaagtaggttgatttgtgtcttatttataattaaagtgtagttgacctacaatatcattttggtttcaggtgtagagcacagcaattcagttatgtatgtgtatacacacacacacacacacacatatgtacatattcctcttcagattctcttcccttataggttattacaaaatattgagtgcagttctttgtgccatacagtaggtccttgacatcactaattattagagaaatacaagtcaggactatagtgaggtaccacttcacaccagtcagaatagtcattataaaaagtccacaaataataaatgctggggagggtatggaggaaaaggaacctcctgtactgttggtaggaatgtaaattggtacagccgctgtggaagagagtatggaggttccttaaagaactgaaactagagctaccatatgagccagcagtcccactcctggccacatattcagagaaaccataatttgaaaagatacacgctccccagtgctcattgcagtactatttactacacccaagacatggaagcagcttcaatgtccatcagcagaggaatggataaagaagatggggcacaggcatccagtgggctgttactcagccataaggaaggaagaaataatgccatgtgcagcaacacaggtggacctggagattagcatagtcagccagacagttgttgttcagtcacttggtcgtgtctgactctttgcgaccccatggactgcagcacgccaggcttccctgtccctcaccatctcccggagcttgctcaaactcatgtccatggagttggtgatgccatccaatcgcctcatcctcttggccccttctcctcctcccctcaagctttcccagcatcagggtcttttccagtaagttggctcttcatgtcaggtgaccagagaaaggcaaatatcatatatatcaattatatgtagaatctaaaaaagtatgaatgaacttatttgtagaacagatatagaaaacaaacttatgtttaccaaaggggaaagggggatgggggagatataaattagcaggttgggattaacatacacacactcctatatacaaaatagcatgcttgtttttctaatggtgggttagtagtattgtctgtagttgaagtactgcttagatgttttgctcttcctatacatttctcaatcctgttcttccctcaagatagttttgaaggctaacttgaaatgttgtgatcacacaccgcagtgttccttttcagcactcgctttccacttttaagtttgtctgtttctttttataaaaaagttacttatttgtttttggctgtgcttggtctttgtcgctgctggctgttctctagttgcagcgtgtgggcttctcattgtcctggcttctctggttcagagcacagattctgcggcacgtgggcttcaggagttgtggccggtggactcagtcgttgcggttcccagtctctagagcacgtgtccagtagttgcggtgcacaggcttagttgctctgcagcacgtgagatcctcccggaccagaggttgaacctctgcctcctacactggcacggtgattctttaccactgagccatcagggaagcccgagtctgtccatttctaattctttttctaactagctgtgtaaacgtggataagtcactatacctctctggtcctagttttgtttgcaaaatgagcacattagattgaatccaaggactgtttcatcactgatgccaagtgtctggtacagcggctgatatataaactgaggtgaatgaccaacagaattcgtgctttcatggaacttttagtctaacagagactgtaaaatataaatgaatataaaattacaccatttgataaatgacaagatggactgatcagaatagatgcaatgaaggagaaaaaagaggaaatgtgagcttgaagatctgcccaagttatgaagaaggtcaaggtggtggtggtggtttagtcacaaagtcgtgtctgactcttgcaacgccatggactgtagcccgctaggctcctctgtccatgggattctccaggcaaggatactggagtgggttgccatttccttctccaggggatcttcccaacccaagaattgaacctggttctcctgcattgcaggcagatggtttatcaactgagctatgagggaaggctgaaggtcaaggtatgagaagttaattaaccatataagtaagaggaagaatatttaaggtggagaggacaggctatgcagaggctctgaggtaggaaagaacttgtttaaggaaccaacaataagccatgtggctagaataaaatatatgaaggaaagatagacttgagatacatttaggaggcaaaagctatcacccagagagttatcagtatatactagtggctctgagtgtttaaggtggcgctaacagtaaagaacccacctaccaattcaggagacataagagatgtgggtttaagggacacaggttcgatctgggtcaggtcctccctggaggaggaaagggcaactcgctccagtattccttgcctggaaaaatcccatggacagcggagtctggtgggctacagtccatgaagtcgcaaagagttggatacgactgagcgacttagcatgctaaatgtttaaggtgtcagccttcataccaagttagtccaggtttatatggcagtagagaaagtagtttctagaaacaagttatttcctttctagtaggagatggttaaaacctaacagcccactgccttaatcccaatgttagataccagtagcctgcaataactggcagatgaaattagtaagagggataattgatgccttcacaaacttgcccaaccgagctttgtgcaacttattttgggagttcaccatcaaggtttgtgtgctggcacaatgatggtacatgctgagacttgtttggattgaaggtgtagtggccaggtagggcatggaaagaacgcagctctgtcttttcaccaggggcttttatatgctaggtagctagctcctaacttagtgctttctccttttctcccaactaacacaaagtcatttgcttttagttcacgttatattctactgacagactaatgttcatatgcagatttgatcatatcttctctcacctgtgagcctgcaataattctcctttgtcatatcaagttcaaaattcatataagaattcagagcctcaaatgatctccagccttttcttgttttaaacccatctcaagaatatactccagtccctttgatatgttcaagatctaagcccacaaacctgagtgaaccttcttcctccagcccaggcagatgcttttttgccatggagtagtgggaaaagctgaatgcacccaacctgtctagaatatcaccaagaaactttactgtttcaatatttagtgactttttttctttgtcagtttctaccaagggtcttcttttcttgactcatgcttccatcccttttaggtgtgctttaagaccctagaatcagggacttagcctgtaggtcttattgatcagacccagagttggataattaactctgctgtagtggaaagaacagtagttttagagtcaaactgatctgggtttgaatgacagtgtctctgacttaccagtttttggctctgggcaggggtggtagggtcggtggttacttaacctttctgagcctcatgtttcttatttttaggcttttgcattggttttctcctttgccaagagggaggtgacatgaaagaagtgcagtatgttagtagactttccattgggaattttggaacaagcaattttgcggtaccctggtcactgttctaacattccaaatgtaataactggttgctggaattggaatgaggaaaaaattctggcataaatatgcctgggaggggttttgttttgttctggagaaatatgcccgaaccttagaggaaaatgatccattctataaaagattacgtataagccaggattcttttgactctccagatttgatttctctaacagtatctgacagcaaacacaaaacgccttaggtatttgaccttcaaaaatcaatctcattggaaaaatagtcagctgtactcaaaaaatacatttgacttttggatagtaatttgaagtcataagtttttccactaatccgatcatatgagtcatgattttaatcctcccctcccccagcctgtctccttcctcatgcctctgtgtgcttgggaagactgagatgcagagaggttgtttggatgtggtgagattcacaccttaagtctttgtccaggattttagagtcagcagctctagttcagatcccagccctcctgtaccccccgcctcatgacaggtgagttatgtcacctctctgagcacgtttcctcaatgagacagtgatcccaacacctcaagcccagtacgtggttcacagtaagccattagtgactcttgatttcctttcccaagagtacaaaatttttattccaaacattatttcgttaacctagtctgtctcactataatatttaagtgtctgggtgttatataatgtatatgaaatatatatgagattttaaaaatacacagtgtcttgtactcagaattatcatggaaccaataagaaaaacaacttccaaatttctcacaagcagcaagtcttgatggtagcataggtattttgagttagcattagtgtaagagacaagactctgaggaattccaaggttggagaaactcttcacctgcttcttggttatgttttcatttctatatcccacctgcatcttaacgacacatctgccattactctgaggtagcatttctgccagaaaagtaagggagcaaagctttctatactgacatcatctaccctggaggaaatgattgctcctgcacttcctctctccctctgtactagtaaatgctgtcggatgcaacagagagatccccatctcaaattagggaaacctgctggaagggacatctttcagactggctgtgctcgtaaataggcttagaaagagccagtctttgtgaacagctgaagctagtaacttgaatgtccccggattctgtttttcttttttgtgcacttctgttcattagtatcacaccatgtgtagactggtcacatttttcttttagtccatgtggcaaagggtccctagtccaaaagtttggaacagagacacagtgacatagcttgtatcagatgtccatcctagatcagggaggtgtgatcatgggaatacgtggtggctccttcaggtattatatggatgaagtggagggagaagagcagcatagaaggaggggccctgagcacagagttccggagttgcccacacattgccatcttaggcagtgggatcttagctgggaatacgaaaaatgctcctgaactgagtttgcttgcagcccagtgatgggagatggatgtacaatcaaagtgcaatagaatgatgttggttctgtaataatggatgcattggttaaataggagtaaagaataggtggtcagttaggttggctcagacacagaagcccctgttggcaatgatggctgcacagttgggcactttgcagactttgaaagtccttgagccagctgacttattatctggggactaggtatagccctggcgttttctaagtatgaatgccctgtgctttatcgttaagaggcctctgcatcagagtgcctctttgaattattcagtgagctttttacaaagaaagaattaaggatatcttgagggttttgtcatgttctgttttagagagttcatatgatctgaatattcattccctttggtagtttcttaaacctattgaaagacaacttattataagacagattcatcaacttgttttacaactcaggtaacctggcatttaactgctggtcaattacaaatcggttgcttttaagtagcttaaaaataactcctattccctgtcatgaggccggagagtgtttgccacagtccctatcctttgctgttgcggtgacctgtggtatatccattggtggtctcatgtttatcatcctttagtttgcttcctcaggcagaacaagctgatccttttccatcttctgctgcatgaggtcagctttctacatcttattccacgactccatctttggctccagtctcttcatcttggctttgcgtttcacatttatattctaccaaggcttttattgtccttaactgcttgatttttctctctgccctttgttgctcttgcatatattttttaattaaagcttctattttgagatcattgtagttttgcagaaatttataagtattaacagaggaatactgtttacctttaaccaagtcttccccaatggtaacatcgtcacttgcaagactaatatctaatatcataatcagaatattgacattgatatagtcaagatacaaaatggtagccttaacattttgatttttaaggttgcttctcatccttactcatctcttagacccttctctccttgctcttctcacattcattgtcctgggaatttaaccaaatctgatttaaggctcttacaagactcaattttctctctggtaggctggctagacttcatgctgtcagagtttctagggatagaacttgccttccctaaattatctgcctagaatttggatgtctctctctgctctgctaagtcacttcagtcgtgtccgactctgtgtgaccccatagacggcagcccaccaggctcccccgtccctgggattctccaggcaagaacactggggtgggttgccatttccttctccagtgcatgaaagtgaaaagtgaaagggaagtctctcagtcgtgtccaactcttcgcaaccccacggactgcagccttccaggctcctccgtccatgggatttcccaggcaagagtactggagtggggtgccatcgccttgtccgttggatgtctctaggtggccttaaaagtcatgtgagaaccgggtttgtctgtgagttaattttgccataagttcacgcaggtcacatgagggtgaagaacgtgtgggggttggtatggtactaatcctctgagactcagagccctaaacaaagacacttttccccccaaaggacagttctgcacagaggatgtggatgagtgcctgctgcaacccaatgcctgtcagaacgggggcacctgtaccaaccgcaacgggggctacggctgtgtatgtgtgaatggctggagtggggacgactgcagtgagaatatcgacgactgtgccttcgcctcctgcaccccaggctccacctgcatcgaccgtgtagcttccttctcttgtatgtgcccagaaggaaaggcaggtaaggctggcagaagaacagagctgaaagggtgaaagggctggtgagcattcaggacttctgcctgcgtctctttcatcccttttggggtatgtccttttaagtttcatcttttggaacatggcacccaaagctcttcttctggaaatgtaattggtagccaaagtgctgtgaagtccgtcttcttccataggacttttagctcacagctccatgtacctcagtgtttcatctgcccaaaatgaaagtaactcttgccttggaaacatctgttacctccataagattttaaactaaaagacagctcagaaattaaggtaaatttctcagaaattaagacaaaattactcacaaatagaggtaggtacttaattttaagaagaaataatccatttactcagaaaaggttagcaagagggaaacaatgaagtgtattccagctctcaatattgccctataggggaaggttttcaccaactgcaaagttaacactgctctagcctctgagtttaacagttctgggtctaggaatagagcagtgaaaggaggaatgttacagaaggagattgcttagcgatagaactttgtgcccagcagttttgaaatgttcctgtatctatgccttttcaaaagccccgcctccagctttgtagaagaagccttagtcacctcttcttaagctaattgcagactggaaaatccagttcccatgtgaactatgcagaacatggggcctagtcatgtcttcagagtcctgagggcacttgagccaggaatgttgacactattaaaaagctgcccaagtataggctgatgatgttcagctgggttttttttttttcttctgaggctaatgaaacacaggtggccccaagatcatcaggtagcatgatcttgggaaagtgggttgccagttaaaatataggatgtatgtaatatttgggacatagagtagataattatttgttgtttatctggaattcagattgaactgggcagcctccgtttttatgtgttagacatgacagcctagtgggaaggatatctcccttttcctgaccccagcatccaaccatctcacaaatccctcacattatcttcccttgaggaggggtccagctgaaggctcagattcagagtgtagagagaggtgtctgcagaagcttcttgctttgcagttagctgcagcatgtccctaaggcaggatcaggcaaaggggaaactgcctctaaatcttcacattggcttctgacgtgccagtcctaaggtgttcaatcctccatgaaagagaaactcattccccaggtaaggggcattttctctttcttctcctttccccacccctgtgacaggtctcttatgtcatctggatgacgcgtgcattagcaacccctgccacaagggggcgctgtgtgacaccaaccctctgaatggacagtatatttgcacctgcccgcaaggctacaaagggagcgactgtacagaagacgtggacgagtgtgccatgggtgagtacacagaacccttcctactcctgtcggtcgggctcagcggacacttccgctgaagcacgcttcactctgcgtgcaggttccatccaaacctcaggtctgttacatgccctctgtttacagctgacctttcagtgtgaccatatagtctatcctgggaatttaaatatacaggaggtttgtgcttgacttgtaacatggatccctaccttagcgactgtttgggcataagaacagcagagacacacaagagttgagatggccctcgttcgtctttctttccctatttccttccttccttcttcatttaattatttatttacttactttctgattgattgattagaatgacgcaagaaattgagaatcagattattaaaggactggccctagtgctactaatctgacccacttctgtagtccacgtttgtggaagctccatcgagtgctttgatcctggttatgggcgcttgtgtcttccagccaacagcaatccttgtgagcatgcaggaaaatgtgtgaacacagatggtgccttccactgtgagtgtctgaagggctatgcaggaccacgttgtgagatggacatcaatgagtgccactcagacccctgcaagaatgatgccacctgtttggataagattggaggcttcacgtgtctgtgcatgccaggtacatgggctgtcggtgtgtggggtctagaccagagaccttgcactgtgcttgtcttaggcagagcactcagtacagtgtggcatttccgtaagctctgttggcatttaatccctagccacgggacccttagggcttccctggtgcctcagtggtaaagaatctgcctgcagtataggagcctctggagacattggtttgatccctgggttggaaagatcccctggaggtgggcatggcaacccactccagtattcttgcctggagaatcccatggacagaagagcctgttgggttataatccattgggtcgcaaagagtcaaacacgactgaagcgacttagcatgcacatatgcaaggggacccttaaggactaaggcccatgttaaaattcttagatctatggaagacagtcccatcatgtcaaaacccagatacttgtgagagaaaaattcagaagatttttaaaatgcaagtatactttgatttaataaagtatttatcataaaaattctttaaatagcaagctttccttatcccctgatatattataaatagcataccattccatttatagaaaataatattacccataattgtacaggaacttgctctttatctcatggtgagatacacatgctgtgttatatcttggaactcttctgcagagacctctgcttgaatccttagagaacacagctgaactttagcttaaaatgacagctgtcaggggctgcttggcctgattacaggtgctaaccactctagccttggcaggccctcctgactttgacttacaccctgagtacaacagcatctctgattcattcagctggtccttaggactggggaccctgtgggcctggcactgtcctgaaagcaatgcctgggctgatccgagaatgtagttcagtctttgttggcatgctaggtcttaccaaggtctttggaggtaacctcttctccatctccacagtgacatggatatcccagactatgcccgtgtctgactgatgctcacagtgactgttttcaatcatggcatagtcctcttttccctctgcagaaatgttcatacgcatagaggatgtagtcagctttatgaatttgtgctttcttggctagaatatgcctttgtctttttctaagctgcttgtgtggtccattttgttcaggtttcaaaggtgtgcattgtgagttggagataaatgaatgtcagagcaacccttgtgtgaacaatggacagtgtgtggataaagtcaatcgcttccagtgtctgtgtccacccggtaagtgcccaccacctgcccctgttttctttgaaagcacaaagcttctgaccgcagggaagaaaggagggagagaatgtgtgtgggctctacatgaggaagtcattaaagcgagcgctttggggtaggagtgtgtgtgcacagaagtgggggatttgcttcagctagtatagcttccaaatcctttgtggccagaagtccaagtctgttctgaatggcccatgacctcgccgtctgtgtgtacatttcagaaagttcatacctcacggaagcccttagttctaggttattcaggattttattttttcctgtgagtcatattcttgaaacctttctctgagatgattatttttagacacttcacccatgggtacattaatagcacaagtcagttctttccaaagaatgctgtgtctctccttttgcccccctcagccattgtggaagacatgctgaattttctgccttaggctatagcctctctcgtttcttcagagagaaggtcccagttcctgtgcagctacattcacttcttagggggttctgtctgtatgcattcagttcctactttaagttgaagtgaaatctatactgggaagaaaaagaggtgagagagacaccccggggcctctgatgccctgagcctcacccgttatcccaggtacctgttcaggagaaaaattctccatgtgctgatccaggggtatgagcctgccagtaacagcccagctcttcctgggcatcaccctgatagtgaggaaaacataagataatcctttgacgtgtgtcatcatgtgcccttttaaggattcacggggccagtttgccagatcgatattgacgactgttctagtactccgtgtctgaatggggcaaagtgtatagatcacccgaatggttacgagtgccagtgtgccacaggtaagactttttcacttcttattctcctggtaggtccatctgcactaaataggagactgtcctcttctcgctgccctgccaggccagtctactaatgggctgctctctgtttagaaggggcttcttccagcctctttcttgctgctctccctgtttccttctacaacacctgcttccttcaccacaatgatggcctggcctggacatttccatttgatgtccccgtctttctagggcagattttggcaatggcgagtttccagctggctttgccttattcctctgcaaaagggaaggattccagctgaaaactatttgtcattggggcttctcagcaggaggcccgtctctgtgtttcttgaggcaagggatcgaacaaaggctcagaaacgcagtggtgggcaagtgcagagattttctgcataaatatgattgatgctttgagagtcaaatgtgtatctggacaggggagagagctctatctgggaaagcttgggtcctctttctggactcctgctgctagaatcaaaaagaatgtttacaaatattctacatttctgatctgtggcgacatttctaatttgggagtggatttgaataagccagacatttcttgttacatatttgcttctgcacagaccattattgtgtagagaaggatttgaaattattagaaaagagaatttcccagtttcttttttatctgactgtttaagaagttatgaatataattcaggacatttttttcttattttaaaaaatggattcttaaaagattttaagcatcatgtgcatgattttttttgtgatcacagaaaagcaaactaagtcataaaaataaacagagaactactattccagtagtattagaatattaccacttattaggccttctcagagtaggccctgtcagatgagccactcagcttccttttcttttcacaaactctggtctctgttggaaaagtttcaggttaggtcttcttctggctaagattatgcttatggagtataaccttcactggagagaatttaaactttgaactcatgtttaaaagggaggagagtccttccaaagtctcttaaaaagatttaaggttggataaagaaactcttatttgccccttttaactgtcttaacttggtcattttatttaacaagtattggttaaaaacttactatatttgcatagattcctgggaggttgggaggaataaagaaaagttctctgtcctctcaggtcagaactggaaagatacggtacatgaagtcattcatttagtacctatatatgcagactggtttgggaggaaaggcatatagagataaatacattaaggaaaattatagagagctattccccactgaagtccaatatgcaattaagatgcagttaaaatgtctctgcagtgaaattattgctcatttacaaaaagctatttgaattctacagatctgacttgaacaacttcgttttaaaccaaactctaggcttgccttataaatggtgcagttagtcagttccaaatgcttatggcccacagtatggattgtttacgatatgggatgtgtaggattaagaggacgctggaactatgtatgctcaggtgtggagtgcgcaccttgggttttaagtatcttgggtacaattccttctaaggattcactggtgtgttgtgtgaggagaacattgacaactgtgaccctgatccttgccaccacggccagtgtcaggatggcattgattcctacacctgcatctgcaatccgggctacatgggcgccatctgcagtgaccagatagacgaatgctacagcagcccttgcctgaatgagggtcgctgcatcgacctggtgaatggctaccagtgcaactgccagccgggcacgtcaggtaagccctctcttcactgcctttggagttttcaccgcttctgtaaaacagcttacaccgatgtctccgactttctcagcacatgcttaggtaccaaaaatacagtcttgattctgagaagcacagccaaagtacagccagaaacatctcaggggcagatagctctagccagtagggaagtcaaagacaatagcttcacagaggtgatgattctgtgtatgtgttttttttatcaaaaggaggcataccacttcaaaaaattgaaattattattgaaaattgaaaaccttctcacttttgtggctcaattggactgtctttttcaacttccaccttactcagattaatgaagttggtccttccctctccatccctcccgttcttccagtagtttttcctcccttttagagtccggtatctttaatggagaaggaaatggcaatccactccagtattcttgcctggagaattccatggacagaggagcctggcaggctgtagtccatggagtcatgaagtcggacatgactgagcaactaacacaccatctttaacgggtcgtctttcttctgctgtttttctctgctgggctttgggcatttgggggactcagagggagaggagagacactgcaacatgtctgggttattgtcaattagaatgcagagctgtcgtttcccatccccagttcatggctgtttcctgcctccagttgaatgacggcttgttagtcgggagggcatgctactccttgctggggaagtgttgagctgttttctcaggcagcagcatttcacagatttcagtggattctgttttacttattcgaggaataattatggtcacaactgtggttaatggacagagaagttctgtgtctcagatcaaaggaaaatgtattagtggaagattaactagtgtgtgcctttgttagaagggaacctgccaatacaaggagtgatttattgagaactcattctccatttaaggaaaatggcctgtgtagggggcaaaggtgggggaggcggttagctgccctcattttattttgttatttccaaatccatttcttcaaacttgtcaaaggccctggtcttcatccaggaactcgtacatgccaagtttgaaaacaaagtcctttttgagttgctcaagcatacgaaaaacatcccatgccttcccagttgaaaatgccttccccctccccacgtttagataactctctaaaagagctgaatagatctttgtgaaaccttccaaaagcaatttgcttccgggctggtccccagacatgagaaattgcagtacgaaaagaaatttgagagatttacaagcaattgaatggatgcctttagaatggtggggctgttttaggctttgctatcgttcccattataaaaaaatgtactggaaacctgggtgagtggtgggctggcaagtattttgttttctttgggattatattattatgccaggatggatcaggtgtgttccctggggagtacagagaagtcaaggtggaagtagctgtcagtgagaaaggcaggtagtaaatatcagcggtgtgcaggcagcataaagaaggaaggcacaggttctttcagaaaactgccagattcattcctatgactgtttggagaattcatgcaaagagatgcagaccacataaagagatcttggtctgtaatgtttgcagaaggacctggcacgtacagggagcctgggtgaaaggattcactcaattaaccatatgagtagactcttgagttgcaatctaagaatcgaaaacccattcataacatagtctgagttggtagcttggggtttggatgagtatatggatagaagggatactttacaatctgcaggttataattgtagtttctcactcactaagtacttaaagcacagtatactacccagaatcactactaatgccttttttcacctgtgatcttaagtaagtttgggggaagtttcaagttatagaaactgcattgcctagctaaaagaatcatcagcaaacaacaaatacaaaacagacaagcagaaggaattctgtgaaagcacacagaagcatcttacagattccaagtgagaattgaataatgaggctttggggggattagcgggcagtagggccacatgcagaccataggtcacccagttcatgttccagcgttccaatgagataatttcattggcccagcttgagctgagtgtctgttcctgctagaatacaacatggatttgggggcagtctcattaaaccgcatggcttcctggggcttgccttggtctgttgtggattaattgggattgtcaatcaagggctagacacatctcctaaaggtatccatttgtaattaaggaatattgaaacctttgcctcatctgtggctagcaaggcagcatagtcacattaatcacagtgaccagtgtggtgcggtgaagtgtatagaatccagagaactgggttcacatcctagctgtgctgatgtaattgtacaagtgcatgataaaatgggtgtaacacaaattggtttggcactgaagtgagaaaataaagttatatcaagtgggaagcagagtattttgctcacaataatgactcgatacattttcaatataataattattaataaatattcacataaagtttgagtgaataaatattaggcattttgttgtggaaatttcatttgttagtttatatcctaattatcaggcttaatttttagactttttaaactgccaatatattcttttatgatatccaaattcatcactaaattcatgttaagtaatataacagtgagtatttttacagaatagtggtaacagtagggattggtgtatctctactgtttatttacctgtatctataattaaactttcctgaacatagtcaagctctgccattcatctggggaatataccaggaggaaggcaacatactccaggagaaagctatgactctgtaagatttgtcctgaactttagcccttaatagtaacagtcagtatcaagcttatagtggtagatacaagtcccaaaattctaaggaaagcttaaattttacctctggagcacagtattgtcatagttgttttccttgaaacgaacgacaggctgtttctttcacttaactatttgctaagtacttaggtctgaatagtcctggtttgtctgtcagttgctctgggattctgtgaaaaaagttgcagtttcagttcagtactcagtcacacaactgcttttcctggagactgctctgtatgttggcatgccacagaatagctttatgtgtattttctatttcatcacacaaaacaatagaggtatactcaagggtcaaggtgtaatcaaatcgtaaagttaatacttttggcagcttcatcaaagtcattcttaagtgaaactatcttttttgtattgttttaactgagtacatggaggtgaagaataaaaacactagtacagtacagtttggcactttctggattcttgctaagatgccagcagtcatacctccattgctctttatttttttagtaagatatttactgtaatctaaagccatagctttatcatcaaaatggaaatatgggaactgggtaataatttggttgggtacagtctgatattctaaagcaatcatgtccatggagatcaattaacaagacctacataagcagttaatgttttaaattcaaagatccaaaatcagaatttttgtcttccaacaccaactctactctctcattcacgacatctgtcaagagtattatattttcctagacatccaggtatggtaactctgaatttccatgactttgcctttattctcttcgttgactcagtttctaagtgataaagactgtaactcttatgacctctcacattcatccttttgctttcattcctactggcatgtccttggccttgggcaccgtttctttaaaccaactccgtgtcatggcctgcccagtgttcttctcacattaatccatcccatacccttcacattgacctttcatgccactccaaatcattggcttgttaaccagggccccttcatttatgggggtgtccttcattatggagtccttcatttatgattctcatctcaccatttgcccatgtgtcccacccctggggttaaaaaaaatcaaagtacagctcttactgtgcctcctgctggctgtcagctgccttgcagatttcttcagtgctgagctacacttttttttttttttaaatcttcaacatttctgaaattaggaagcaccttatattcaaggtcatagaaaactgtcagcctcagaattaaggcagaagtgatgacaggctccttgctgcctgtgactaagaattcttcagtgtgtaaaagggatcagttcatctaattgtcattgcagctgtatattaactttggatccctaatttgtacttaaaatgaagcaacatatgctataaactgctctggatacttgaggcaaaagagataaaaatctctgccttgatggtgcatacaccatgaagaactgttgccaggttctgaagactctgtcacagggtctggtggacttttttttttttaatcaatgaatttaattgcctccattgcttttgtaacattagtgcaagtgccaacacaataaaaaagacaaatagtggcttagtgtgattaatacaatcgtttgacctcatgatacctttaacaaggtctggaagactgaactttcagaaatgctacattcctgtattcaagggtggctagatactcatgagatttcctaacacccagcatcacaaacagagatcattggtgtttctgtgctaatattgcacgatttctctttgctttcatctttgcaggtgttaattgtgaaatcaattttgatgactgtgcaagtaacccatgtgtccatggagtctgtatggatggcgttaatcgttacagctgtgtctgctcaccaggattcacaggtaatggtcctttttgttgggagactcctccttcagccccctcactttgggaaaaaggcatctaaaggttagttactttcaaatatatctgacttcttcgtctcttggaaggttagaaggctgtttctgagcttctctggcccagttttcaggccttccttgaactgtaacatgaaacttttcattggttacggtttttaggccatgtgtttatagctacttaaaaagggtttcttttcagaccatgagtttccatcattgagcttaagatatatagcttccatatttttctatacttagtagtgaatgccttctagaaaggcatggccaaggtaaaattctatgaacaccttatatgattttttctgagtacttcctcttataagtacttggctaaggtcaaaatttagcaaagcaacctatttttggctagcatagtgggttttattttctctccaggagggagaaagtaagtgactaaaataaaactggttataattcttcttaaattcttcttaattaaaccccccagctagaacatttatatatgcaccatgtgtatacacacacaaactcacatacatcttttctctaatcttcttttgttgctaataagattacctttaccttctaccttcctgatcaaaaagtactaggagctactgaggaaatatgaagcctgtttctgatacatctgtttgtcaaaggcaccatcagagggcgtgtaatgtgccagtcccattcttgctagacaatgccacacacaataaggcgcttacatcatgatgttaccattgcataaataccatgtggtcatttgcaaccaatgtgagaaacttcccacagagctttttaaactataatgtcaaaaagccaagagatgcctctttcttgctgggagcttaactctctctgtatttcacaatcctttgcactgcttggtgtgattgtggacacgagagaggaacgtttgtggcctacgtggtcaccgtaatctcttctcagtggaatatcactcagaagaccaggatgatgagagttcttatgtctagtacccagcactgctggtgtggaatcagatgtacttctgtatcctgaaatatgttactccaacattcagtgacagccaactgaatttctttcagacagaatggcatatgtacttgtttacataggtaataagaggagaatagctgccacttattaaggccttgttttgaggtaggcattaaatcaagtgcctaatctcatttagttgtcactactattattatttctacagtattgatgagaaaccctgaattcagacagcttaagtaacagtaccagtgcactagggccagcattccaccccggggggttctattatagagttcatactcattgccacttgactggacagcataagtgggtgcccgctgtggtttctttttagatatataaaccttagactcaacttaaattttttggaaatgtcagtgaatcatatgctctctctttttaacatttagcaaatcaggaaggtcatggagggaggacataggctaaaaatattctaaaataaacttaaggtgtagcatgaaactgtataaccaaggaatggaatgttttggttactgggtggtaccctgttcttggaactgttttctatgtctgtttttttctatttgttttttcaagtcagttgctgaaaatatcagaggcaactgtgttatatgctcatgacccataaatataaggtgttttagtcttgcctttattttaatactgttaactttttacaattttaataacagcttgaacagatttaagggaatattttttcagacaaaattctctgttctccgcagaccactttatacttactgattgaataggaaaagtaagaaatcatgtgtcacttcagtagattacttttcagtagtataaactactttttcagtttcacattcatgtccattattttgctgacttctcagaacagtccataaaagtagataggttgtaaatgaaaccaaaagcacaagtaacaaaaactaaaatgaacttctgaggggcaaaaaaacaatatattgaaaagctaacctacagagatggataaaaatatatgcaaaatgtgtgtctaacaaaaagttaatatccaaaatatataaagaatcatataactcaatagtaaagaagcaaataattcaattaaaaattggacaaataacaaattaagtatagtgacagatgttaactagacttattgtagtgatcatttttcagtatatacaaatatcacatcattatgctgtacacctgaaattaataatgttacatgtcaattatacagcctactccagtattcttgccttgagaattgcatggacagaggagcctggcaggctacagtccatggggtggcaaagagtcggacacaactgagcgactaacactttaaaaatgaaaacacgttagttaggagtcagaaacccaattttagaaaatattactggaaaattcccaataatttccagatataagatactggtaatgttcactctagttctcagagctacatgatttaaccacattctgattatattgttaggccgtaaatcattatttatattttgaaatccagtatcaactgaaacaggtaaagttttacaagctttacaatctatgatgagtagctagcaatatagctaatcctcatctcagtatcattatgcagctgtataaaatcaccaaattcaatgaaaaaataatggattcgaggtttgcaatctcgtctttctttcagtctcttacgggattttctaatcagaagtaaagtgaataaatatttataaattataagtgttgaacacacagttgtttttggttctccagccattagtgaaggcacactgctaagcacagaggagcactgggttatgggaaaagtggtagacagtgagctcatgcctttaaaaggatttaaggtatgatcaggaacccagactgcatacatcggaagatgactaaagactagggaagtagttaaaagcaaggtatacacattcagaaaagtataagcgatgaaggaaaacaaatgtttagaatcagggggaaaatgggcaaaggacattctttttccaaagaagacatatagatggccaacaggtacaggaaaagatgctcagcatcactaatcattgggaaaatgaaaatcaaaaccatagtgaaatatcacgtcacacctgaaagattggttgttatcaaaaagatgagataacaaatgtttgtgagggtgtgggaaaaggggaactctcatgcagtgttgatctgaatgtaaaatgttacagttattagggaaaacaatatggcagttgtcaaaaaattaaaaattgaactaccataaggtccaggaattctacagttgtgtatctaaaggaattgaaatcaatatttcaagaggagtttgtatttgcacacacccatgttcatagcagcattattcacaatagtcaagatatcagaacaaccagtgtccatcaaatggatgaatgagtaaaggataccttgtatgtataccatggaatataattcagccatgagaaaaggggaaatcctgacatttgtgacgaaatgaatggaacttgaggacattaagtgagataaatcaggcagtgaaagacaaatactgtatggtatcacttaatgcagaatattaaaaagccaaagtcatgaaagcagagagtagaatggtgtctatcatggtctaggctgggagggtaggggattggggagatattgtttaagggtacaaatttgcaactactagataagtaagttctgattgaatgcatagcatagtgattatagtcagcaatactgcattataaactttcaaattgctgagagagtagatcttaattgtttttaccacaaaaagaagtgatggttatgtgacatgatagaagtgttaattaactgcggaggtaatcatattgcaatatataaaatatatcaaaccaacacatcatataccttaaacttacacaatgttatatgtcaatcatgtcttaattttaaaattaacaaaaaaacttagggaatttttattatcctcctttaacaaataaggcaactgaaagagcttaatgtgtccatggtcttagctagtgagtctcactgttaggactgtgagttcccagaaggcaggcacctccctaattgtctttttagccagcattttctaaaactatgtagcactcagggagcacttagaaaatattgctgaatgaatgaccagcactcatatatggaacctctgaaatccaacactagactcttgagtctgcactgtaccatgcttccattcattaaatactaatttgttaggcatctacctacatgattagaaacattggctaatttctcattcagtagttactgagcccaacaaggtacatagttttgtgctgggagttcatgaaatgctaggatttccgatgctacttaaaggatgagaatttgctagtgaagcagctgcagctcaccaggtagactacacacagaggcacttaaccctctcagctaaagacgactcgaaaatggattctgctgagagctttaaaagcaagtaaagaaactgtgaggagtgtgagttctgagaatatttttcccaagaaaagacagaattgaaaaagctttttcatctcattctccacgggatttcagacagaggatagtgctgtagttgaagacttgtggctcttatctcagtgccagtggcaaacatctaaaaaaaaatcagcagttgaagctagaaagtagtattgtagaattggttattaataaaatacttaaaaggaaaacagcaactactatcagattatgggttttttaccacacgaaccaccaataatggtttagagagtagcagagagtgaaaaaatgttaatacccatactttaaaagggtgtgtatctatttcatttggaatttcctgttctaattgtagggttactctttcttaaataaaaatgcctggttttatgtgaatcagaaaattgtattctttgaaatttataattccttcatagcagttgcttgtcaccactcatttacagaattatgggttattttaaaattttatatcattttggaatatatagttaaatctcatttattcaaaacttaacaaagcaaaactcatatgtaactggcatactttattccactttatagcagacatcttttcaaagtccaatcttgggtatgttttagaggaagaacatattcatttcaatttcatatattctgaacatttacattataacttgatgaaataataattgtctacatcagaatttctcaaaatgtagtatctgaaacacctacattatttaaaatgttactttgaagcagtaaggatcttctttaaaaacaagtacttttagcaatccttgcacattaaaatttaagaactactgatctatactgagagaccctgaattgttttctcaatgatcagagaacaataaaattacatttaggtttctcttcttcctgagccagaaaatagattaatacaattacaaaagttaaaacaaatggcttttctttttaagcaacttaatccttaatagtgattcaatgttaatcactgaacattcctgttaattgagatttaccatatatagaaatgcaaaagattgactaactcttacgagaatgaaggcagtaaaccagctgacaacagtgataagaaaagcttgagagttctccgaacagcaggaagaggagcagccaactttgatcgcatttgatgttctctttttgaatatttgatgtaaagtttccccgtttctaaactggagtgaagaaacacatgtcgaaacactacaacaccgttccagtattttgttaactttgttaaattatcaaagtacaatgctctctgctccttccttgcatggcactaagtgctcttggatgtcttattccttaagtcttgacatttggtgcccacagcattttatagcctaggcaggtaaaggtatctgcacagtagatctcatggtcctgggtctattccctaagcattttggatttgacagaaactgtcccccttctctacagggcagagatgtaacattgacattgatgagtgtgcctccaatccctgtcgcaagggtgcaacgtgcatcaatgatgtgaatggtttccgctgtatctgccctgaggggccccaccatcccagctgctactcacaggtgaacgagtgcctgagcaatccctgtgtccatggaaactgtactgggggcctcactgggtgagtagctgttgtgtgttcatcatttcttattgacccgtgtcgagccagttgagttttagtactggccataccctgtagcagttagtcaggacttgagctgagactaggctgaagaggtcggtaatccatatcgtagtcttccaagtcaccacttcttccctgccttccatgactgagtaggtggaaagtaaggaggaatgtttcattcctcatgtgggtagtcagcacatgggaggagtccagggttattttctgagtctttagttgttgtgcttttagtactaactgcaagattgcgttctgagggatattctgtttgacttaacctcctgctcaaagaaaacccaactctgtttcataatgataccagtgggtaccactgaagtagagctggtctcagctagttagagtcttggccctgatgaagtgttcacagctggcaagcccctgagagttgtgtaatgtgttggcaagtaattttctagaatcacagagtgtgacgtttggttccatgagatagtcctgtgctcttgctatgcttgccagaggacgggactttggccaagacttagcatttgccatgcttacaacaggtgaaagaatgaagagtacatttagaggtaaatgggaaattaagtgatttctaagctgaattaactcagtattcctgtttcagagtatagcggccttcaaagcatcccaacccatttactttttttaaaaaagaatcgccagacaaggaggctgttatctcccgatattacattctaagtgctaatggtgtccaaattgtgaacaacatgcatacatttcagataccttcatttttgttccatttcctgctcagcacccttggtgctttctgggggcagggttgcaggtcagaacaaaccatgtctcagaagtcagatgttccaggagctctttgaggtcacttagagtctctgatactaccctgctttctgagtatctgttttacaccagaaacaagcgatctaaggtttctttacatttatttagcagaaaagaaactgcaaatttatcaatgtcaatgtgtctttcagattgtcccaatctgttgtactcaccactctttacatatgaaagcccactatacttaatttttccagcatttttgtgggccaggaagctgtgtttacagaatactccagatgggcccacatgattcacaaggtaacccaagtgtaggtttgaagaggaacagaaatgagcttagcccacccaggagctccttgatccttcatttcttcagaattttgcatttcacctgtgacttaattgtacattcataccacaactgtaacttatttctgtcttctttcagatacaagtgcctctgtgatgcaggctgggttggcatcaactgtgaagtggacaaaaatgaatgtctttctaatccatgccagaacgggggaacttgtgacaatctggtgaatggatacaggtgcacttgcaagaagggctttaaaggtgatgcagaagtgcatgtttttatgtcctttttctgcctttttgttggtgcagacagcttgactcacttctttctttccccttttcctactcattcctactcattaagcaaccttcatttgagcacttattatttatagggcagttggagaataaaaacataaatttaaacatggattctattttcagactagcagagaggtgagctcttgaaacgaccgtttaaggtgagcaactagagctccactcatacaactttggacattttgattgggtattctaattgtaagctccagtgtaggcttgattctgtgataattcaaaagagatattggtagaatgaaaatcttgttttactgtaattgtagcaataatatcatgggagaatccatgtatttaaaacctttccaacaagttctattaaacattgagatattcttagatgatacatagtcacctatgaccttctggaaaaatgcatagtagtgagtattgtgtaaaatcactttttgagttgtctctgttgtatttctcctgtcacttttttctttaacccttgagagagaaacctgtgagtaaatcatgcatatttgtactccttgatccatatagtcatttatttcacaactcaaagttgtgccacgctactgtgataggtcaatatatttcagtgtcactttatttgataacttgacatttttctaagatcatattttagtcattaactttttgacattcagatatatattatctgtaaagaaacttacagatttaaaagcatttttattcctttgtctctttgagacttgctgattgacaaaataaatatcaaaatagttcacaatcatatgtctagtgattaacagagtacagtttgaactcagacctctgtactcttagaccattattttctttttatacatggctatagttcctcagttttaagactctgtgtcaggccctattgcaggtataaaggtggtggcatttggtaatatcctgtccccatgaatgcttccttacttttctcttttttcatagtgggagtagattttgtgtcttggatcagggggaaaaagctttgtgacttccgtaaacaccaccacattgatggtagatactgtgcatttgaaaaagtgggcataaatcaagaagctttgattaactgttcaaatattttatcccttgataatttctagcctatttttaagccctgaccagatactttgtatagaagcctctatttagatatagcagtagctttttaccctagtgaacttcttggtccattatagagaaattacttctatttggacattcattaaactttcaagctattagaatatattgttcttccattcattttttgattaagcagttttactgactgactgcatgtcggggactttacactggaatgaatgaacaggtgtttcagtggcttgaagaaattaacgcagtttctgaggtgtttaatgtttacccctgagagcattgcttagtaattgagatattgaggaggctaacagaaagtttcactgtctttgatttccccccctttttgtgtacaggctataactgccaggtgaatattgatgaatgtgcttcgaatccatgtctgaaccaaggaacctgctttgatgacgtaagcggttatacttgccactgtgtgctgccctatacaggtgagtcctggggtccaggggctggaagggatgctcggtcttgtcttgtcgttccaaacctcggagtctcagagatggggtctgtggggccagtgatgctgccttgaggaatcactccctgatcacctttcctgccctcgctgtctaggtcgtccactctgagaaaacactgtggcctctctagatgcacgtggtggggatacttgtttgcctttattttttagggtttgaaaaaaattgtttaattatacttgtcttgaattgatacgtagatgatggtttagtcattatctgaatggactgtatggcctgtcctcttggtctttgttttgccaacacaacagttaccacttatcggtcctttactaaatgccagacactttatatattttggagtatttgctccagtgctcacagtaattctatagagtagaggttcctattcctgtcaccattttgtacatgaggaagctgaggcaaagagaggttacttgctgaaggtcacataggtaagtagtaaatctaggatttgtccctgagtctttgaatccaaagcttgtcctcttaactgtcattcctctcctcacattgattgccactgcgtcctctgcagagaggcactgccccttggatggcgatcacacacagaagacatggatgtgacttcatttcgtatcaggtgactttgtttcaggtggtgttacaggagtgtgcttggacgtttctctgtattctcccgcctcattactgccgtcttgtgactggttttgtttgtgtggctcgctcgcctcatgtcattcatttaatggctttgcatgtttctccaatgccgtgcatgcaggcaggagcatggcggagctcttactccctggagtcttggcctgttgataatagctgtggcgagtgactctaggctgtttagagtggccggatgcatgactctttcctgaaagacttgatactacattgctgtctttgtcacctctttagaaggaacactcatgcagacaaactgcatttagccatcctgactgaaaaaatcatagttactggagatccatagctatccccagacagtctaaataatgtcattccatagcaatagcagtcacatttgttggaaccgagcagatcatgtcatttacaaccataaagactgagaattgatggtagtagggagatataagcaggtgtcattatgctttgacacattataggcttatctgaatgtgactaaggtacatagctcattgggaaaatatttgccttcttgctattcaacactgtaagaatatctgactatatgctggatgttggtttttctacatattaggatattattaaaaagaatttaccatgtgtgacctctgggaaattatattagatattacagattaaaatttcaatgctgagtgccgctaagggttctgagtgtcattgaatttggccagcatgaagggagctaagcaacgttgcctttccttgtgaaccactgttctgaccagacacattaagaacttgttaggggaacttccctggtgatccggtggttaaaacttcatattccagtgcagcagaaacaggcttgatccctggttgggagctaagatcccactgcctcatggccaaaaagccaaaacataaaacaaaagcaattttgtgacaaattcaataaagacttttaaaatggtccacattggacttccctggtggtccagcacttaagaatccatttgccaacgtgggggacacaagtttgatccttggtccaggaaaatctcacatgcctcgaggcaactaagcccgtatgccgcaacttctaaagcccatacgcatagagcccatgccccccaacaggagaagccctgcaatgaaaagcctactaattgcaactagagagtagcccctacttgccacaaggcccatgtgcagcaacaaagaccagtgcacccaaaaataaattaattctaaaaacggtcctgggacttcccaggtggtgccagtggtaaagaactcacctgccagggcaggagacataagaaacacaggtttgatcccggcgtggagaagatccctgaagaagggaaaggcagcccattccagtattctttcctggagaatcccatgaacagaggagcctggtgggctacagcccatggagttgcaaagagttggacacaactgaagcgacttagcagccgcacaaaaaatggtccacatcaaaaagaaccttttgagaaaagaaaaagtggttagagacattgatgaaaatttgtggtaatatttttttctttttgaatgcaaagttttaagataaaattttaaattgagttaattgtaacttgaccttatttattttgttgcaacattgtattagtttcaggtgtacactatagtgattcaaatatttaaagattatactccatttaaagttactgtgaaataatagctgtattccctgttctgtatccatgtggattatttattttatgcctagtagtttctctctcttaatcccccacctctaccttggccctcccccttccttctcccgctagtaaccacggtttgttctctatacctgtgaggctgtttctattttattatattcatttgtcttttttagactccacagataagtaataacatacggtatttgtcttttttgtctgacttgtttcactaatcataataccctctaagtccatccatgatgcagatggcagaatttcattcttttttatttctgagtaatattcttgtgtgtatgtgtgtgagagagagagagagagagagagtcacaaatcacatctttatcccttcatttgttgatggatatttaggttgcttccatagcttggctattataaataacctaatgctgatttaaatggacttccctggtggctcagacggtaaagcgtctgtctacaatgcgggagacccgggttcgatccctaggttgggaagatcccctggagaaggaaatggcaatccactccaggactattgcctggaaaatccattgagatgcatatatctttttgaattagtgttttcattttcttcagatgtacaccaaggagtgcaattgctggatcatattttagttctgtttttagcttgagtgacagttcactgtgatggctgtactagtttacattccaaccagtagcatcaagagtttccttttcttcacatctataccagcatactttatttgtatacttttttgatgatagacattctgacaatggtgagttgtaatttgacttccaaaacaacttaatctccctttttaaaaaagtttttattggaatatagttgatttacaatgtgttagtttgaggtgtacagcaaagtgaactctttgtttgtttttgaactctttttttagattctttttccatataaaccattatagattattgaatagaatttcctgtgctatataataggtccttatacagtagtgtgtagtctctaattcatccctcccctccccttggtaaccatagggttgatttctacatctgtaactctatttctgttgtaactaagtttatttgtaagcttttttagatgctagctataagtgataccatgtggtatttgtctttgtctgacttatttcactctgtacaacaatctctaggtccatctatgttgctgcaaatggcaaatggcttaatttaatgcatctttaaggctgaataatattccactgcatatatataccacatcttttttatccattcctctgttgatgggcatttaagttgcttcagtgttttggctattacaaatactgatgcgataaacactggggtacatgtatcttttagaattatggttttctatggttatatgcccacgagtgaaattgctggatcatatggtagctctgtttttacttttttaaggaacgtccatattgttctcaatagtggctgtaccatcttacattctcaccaacagtgttggagtgttccatttctccataccctctccagcatttattgtttgtagattttttgatgatagcctttctgacaggtgtgaggtgatgccgcattatagttttgatttgtatttctctaataattagtgatgttgagcatctttcgatgtgcttttttagccatctgtatgtctttagagaaatgtctctttagatcctctgcccattttttgattgcagtgggatttttttttctttttttgattgagatgcataaagctgtttgtatattttagaaatttgcccttgtcagtttcttcatttgcaaatatttttttccattatgagggttgtcttttcattttgtttactgctttcctttgctgtgcaaaagcttttaagtttaattacatcccatttgtttttgctttcagtttcattactctgggaaagtgaaagtgaaagtcactcaatcgtgtctgactttttgcgaccccatggactgtatagtatagtccatggaattctccaggccagaatactggagtgggtagcctttctcttcttcaggggatcttcccaacccagggatggaacccaggtctcccacattacaggtggattctttaccagctgagccataagggaaacccaagaatactggagtgggtagcctattccttctccagtggatcttcctgacccaggaattgaaccagggtctcctgcattgcaggcggattctttaccaactgagctatcagggaagccttactctaggaggcggatcaaaaaaatcttgctgtgatttgtgtcaaagagtgttcttcctgtgttttcctctaaaagttttatagtatccggccttacacttaggtctttaatccatgttgagtttatttttatgtataatgctgggagtgttctaatttcatttgtttacatatagctgtctagttttcgcagcaccacgtattgacgagactgtcttttctccattgtatattcttgcctcctttgtcatagatttggtgacagtagtgtgtgggtttatttctgggctttctatcctgttccattgatctatatttctggttttgtgccagtaccatactgttttgataactgtagctttgtagtataatctgaagtcagggaacctgattcctccagttccatttttcattctcaagattgctttggctatttgtggtgttttgtgtttccatgcaaattgtaaattttttggttctaattctgtgaaaaatgccatgggtaatttgatagggattgcattgaatttgttgattgccttgggtaaaatagtaatttcccagtcgaagaacatggtatatctctccatctgtttgtgtcatctttgattccttttaacaatatttatagttttctgcatacaagtcttttgcctccttagataggtttattcctaggtactttattctttctaatataatggtagatgggattgtttccttgataatgtttctgagctttcttgttagtgtctagaaatacataattctgtgtattaattttgtatcctgtaactttaccagatacattgatgagctataatagttttctgatagtgtctttagggtttctttatgtatcatatcatgttacctgcaaatagtgacagttttactcctttttttttttttagttttggttccttttatttcttctctgattgctgtggctagaacttccaaaactatgttgaataaaaatggtgagaggacatccttgtcttattcctgattttagaggagatgctttcagtttttcaccattgagaatgatttttgctgtgggtttggtgtatatggcttttattatgttgaggtggattcctgttatgcccactttctggagagtttttgtcaaaggaatgttgaattttgtcagaagctttttctgcagctattgagataatcttatggcttttattcttcaatttgttgatgtggcatatcacgttgatttgcagatattgaaaaatccttgcatccctgggataaatcccatctggttctggagttttgtttgttgaaagatttttaatcacagtttcaatctcagttcttgtgattggtctgtttatattttctgtttctccttggttcattcttggaagtttgttcctttttatgaatttatgcctttgttttaggttgttcattttattggtgtatagtttcttatagtagtcttttatgatcctttgaatttctgtggtgttcgttgtaacttcttttttttcatttctgttttattgatttgagtcctcttttttcttgatgactctgactaaaggtttatcaattttgtttatcttcgcagagagccagcttttagtttcattgatttttgctgttgttttccttgtctctatttcatttgttttttgtctgatttttatgatttcttttgcttctacttacttgggagtttatctgttcttttttctctagttactttgtgttgtgtttggaaaagatgctggatatgatttctgtttttttaaatatactgaggtttgatttgtgaccgaagttgctatctatcctggagaatgttccctgtgcacttgagaagaaagtgtgttctgctgcttttagatggaatgtcctataaatatcaattaagtctatctggtccaatgtgccatttaaggcttatgtttacttattaattttctatttggatgatctgtccattggtataatgggtgttacagttccccaccattattgtgttactgtcaatttctgcttttgtggctgttagcatttgctttgtatactgaagtgctcctatgttgggtgcctatatatttgcaattgttatatcatctcggattgatcccttaatcattatgtagtgtccttccttgtcttttttaacagtctttatttacagactgttttgtctgatataagattgctactgtagctttcttttgatttccatttgcatgtaatatctttcttcatcccattacttttattctgtgtgtgtccttaggtctgaagtgggtctcttatagacagcatatatgtgggtcttgtttttgctgccattcagccagtctgtggcttttggttgacgcatttaatccatttacataaatattgatatgtatattcctattgccattttttaaatttgaggggtgtttttttaggtcctttttttccctttcctcttttgttctcttctcttgtgtttcctgcctagagaattaatttcccttagtattcgttgtaaagctggtttggtagtgctgaattctcttagtttttgcttgtctgtaaagcttttgagtctctgtcaaattggaatgagaaccttgctgggtattcttgattgtaggttttttcccttttgtcactttaaatatatcatgccactcccttctggcctgcagaatttttgctcaaaaactcagcttatggggatggggattcccttatatgttatttgttgtttttcccttgttgctttaaatactttttatttgtatttaatttttgttagtttgattaatgtgtgtcttggcatgtttctctttgggtttatcctctatgggactgtctgtgcttcctggacttaggtgaccactttctttctcattttagggaagatttcagctctaatctcttcaaatattttctcaggttctttctctttttcttctttttagacccctataatttaaatattggtgcatttaatattttcccagaggtctctgagatggtctgcatttctttttaaaaaaatattatgtatttcatattgacatttttggtccacaccctgcagcatgcaggatcctggtttccgaagcagagattggatctttggccccctgcagtggaagtgtggagtcttaaccctgggctgccaggaaagtccctgtcctcatttcttttcattctttttctttgctctgtttcaccacagagatttccaccatcctgtcttccaggtcacttatcccttcttctgcctcagctcttctgctggtgactcctcctagagtatttttcatctcagttcttgtgttcatctctatttgtgtgttcattagttctcccaggtctttgttgaacatttcttgtatcttctcgatctgtgcctccattctttttctgagatgcttggatcatctttactatcattattctggcttctttttcaggtagattgcctaattcctctttatttagttgttcttttagatttttattttgctcttccatctgctagatgtttctttgtcttttcattttgtcagacttactgtgtttgtggtctcttttctgcaggtagcaggatcataattcctcttgcttctggtgtctgccccccattgggttaggttggtcccgaagcttgtgctgttatccccttgaaagggagtttgattgatgctgtgactagagcctgcactggatattgagcagggcctccccttgctctgtggttgtcactgccctgttagagacaggatctgctctctatttgttggagtagaagcccctagatctgtttcttagctgtgtttctgatttgtgatatgaggattggagcatttccactggagagaagccactgagtattctttctctggggctgttcacctgtgaatgtgctctattgtgtccctttttgcctgttgtatgggttcacaaagcacagtattcttggcactgcactctgcccaggtaggagggtgctgggtagggattggaacacgggtacccttcaggtggcgataggggtgagctggtcacatggtttgaggagaggagcagaggaggcagtgacagggacgtgcaagccagctccggtaggagccctccctagcgctctgtaggcaggggttgggatatgaggagagagcctacaatggcaaccccaccccttgtgcattactcaacaatgcagcttcatttctgtggttgtccaggcttcctccacgagcattctcagttgcagagttctgcaaccccagcctctcaagttttctcctcatagccatgttttgccaaaagttaaaatttcaccttaggttcaaaacatttgttaacaaaagaaaccactcgttatacataaataaataatttcagtaactaatagagaattacctatcttacttttaacaaacaatcattaaaagaaaagaaaagtagaacagtaaagaaaagtaacagtccgtatatcaccaagttgggttttgactgatatccagactcaaacagtgctgggaagtcctgtgtgacagcagcctggagccccagttgtgaagaggtctcgggcagcgcatctgctccataggtgagacttcagaattgtaggttgggggttcctgcttttaatcccaggccacaaactgatattgtcatcagtctgagagcagattgcagctctggtttcatctttttttttttttacagtgccatttgttttgtcttgtaaatcttggaatgttattaagtccctggtatggttggccagacctcctccaggggctcaacaattccaggatctgcccccttctcatctatggtgccatgcaacttgcactcaccgcaggaaggtagtcaaggcagtgtccaggcaggtcagaagcaaggtcagaagcctgctctgctttctttgtctctcaagcctgaacaagacaagactacttccatttaatttccctaacaaaccaacagcaggcccctccccagatctgctctccaaaccccacgttccagcacccagcatccatgctcactggcaaacacctgtctcaggctggggcatgcagggccgtggcacggaccatctgtgtaggtctcactctgtcctgcctgtcacagaccagttactggactatcctctgaacccccaaggctcccctctgctccagctcatctccctgctggtaagaggccttccccagatgcagggacctctctataccttcaactccccacaaggggtgcaggtatcatcctgcttcctctcctcttcctttgccttctttttttcaccttacccattatgtggggatctttcttgtccttttaggtgtccaagatcctctgctagtgttcagcaggtgctgtgtgggaactgcttcacgtgtagatgtattcttgatacatttgtgggggagagagaaactccatgtcctcctactcccccaccatcttggaaaaagcccatctcccttttaataaaagtattcttttatttttttttctggaatctcatattcagtatactaaggtaggaaatgttggtgggcaactattaatgtcatgttttgatgttgaaataaggagagatgttactagacaattggtataacttcactggtttccacctctgatggccttctgatcaaccccattgccttctggaacaggcctacagaggtttaagaataggaggctgtgttgttaactctgcaaggtggatctatgttgctaagctccagcagaatcttagctacgaagatgcaaaaactctcacacctgattgatgtcagtttctaaatccacataaccgcttgtgacaataacgtgaagataacaggagcccagcagttgttgagtacttactccatgtgctgggccctatgctaataagaactttgtaaccattttttcatttaatccacaaaaagcctctatgagttacataccatcctaattcccgtcttgtttgtgtggaagctcagagaatgtaacttgcctgagatcacactgtgagttatcacatcagatccaagacgcaaaggtccataggtctctcagatcctgaaactaattcattacattagatctgaattcggaaagcatcctttggtatagaatttggggaaatctcagttccctggactttttctctataataaactctgtaatttgatttacaggcaagaactgtcagaccgtattggctccctgttccccaaacccttgtgagaatgctggtgtttgcaaagaggcaccaaattttgagagttactcctgcctgtgtgctcctggctggcaaggtaacagcgtcggaatgtagaaaccaagagcatttaacagtgatctggttatttgatgacatggagaatcaatctatcttttgaggcttgcccttttttgtcaagaacccaggccttgtataaaagccgaagctgctaacgaatgttttagaaagactttccatttttacatgtctttgctgccccctggtggctagaagactcccaccagagtctgaaactatgatgttctatgtagaattttagcatctgggcggcaacttgttgggggaacagaaacctgaagggacttcccaaagcaggaggccaaacagcatatccttgcagtagccccacccaccccagctaaagctcagcccccacataaatttctgcgtggaaatcgatttccaaagactggaccgttcattgcccctttgtttccaggtcagcggtgtaccatcgacattgatgagtgtgtctccaagccctgcatgaaccacggtctctgccataacacccagggcagctacatgtgcgaatgtcctccaggcttcagtggcatggactgtgaggaggacattgatgactgccttgccagtgagtgcgccagcctgctcctgagcccctgggggagagcggagccccgggagcagaggaggacttggtcgggcacttgcctcggcgctgaggctgcccatccagtagtgtatcacctgtctttaatcttcgtattttaaaaatcattttgaagctagtggctttaggagttaatacacgggagtcacttttaagcattgccttactaatttttgtacattgtcaaagtggggacaatgctatgaaagcttctaataaaaagcagatctattgaagtataattaagtatacaacatactgccagtatttaaatgaaccagtccagtaagttttgacatatgacaactcaaaacagtatttaagatactgatcacattcatccccctgaatgtatttcacctcttgtaacttaaccctcctttctactttcctgtctcacacaactaggaatctacctctgtcactttagatttgtgtgaacttttttacaattttatttttctctgagagctctacttggcactgtacatcttaggggaatctttccattctgactggtatgaatgtgaactgtgctcagcctagtgtaaactttagggattgttctgcctacttctttctagtggttctttacccagcttcagcagtttcaacacatgaatgtgatatacttatcagtatagtcatctctcaatatgtgagggtattggttctaggaccccctgtggatactaaactctgcagatgctcaagtcccttatataaaatagtgcagtatttgcatataacctatgcacattctcttgtatactttaaatcatttcttaattacttgtaatatctaatgcaacgtaagtgctatgtaaatatttgctggtacatggcaaattcaagtttagccttttggaactttctgggattaaaaaaaaatttttttttctgtccttggttggttgaatccatgattgtggaacacataaaaaatggggggccgcttgtattcagttacttgtgtggtgattaagtcattaaacttcaaaggagcttatgatagtgcatccagaataatggcatcttattcacagcatgtatcatttcagattctcatatggatggcactatactaggggctgacagcgccagtataaataaaagcttacatttatgaaactcatagtctctcaggaaatacagttagacaaataattccgacattatatgactaatggtgaaagaaacatgttcaaggtacaactgatggagaaatttaagggagtgggatcaaactatttggattcctttcccacattaattagtatatcaatcaaatttctactgtttaaacattttttcctatttgaagtaggactaacaatatttgcaactagtttaaaattagtgaattactgtgagttgcttgaaaggtgctatggaagttacagtagctgtgtagtattatgtataagaagggataatatgacttctagagttgttccagtagagactgcaaatgagccttagaatgaaattagcctaatagatgactaaggtataaatatctctcttataaaataagggctgcattacccacctggtgtttagttttctctttatgtttatgacctgtcttgtaattgtatttcaagttccttaagaccaggagccacatcttacttttcttgctccgattcgagtgccatctgtgttgcagaggactgtgctctgataatagctcaaaatttcttgattaactgctatggctgtaaagtgttctctaagatcaaacaacgtgatgtttaaaatttttaaatgctcatttcctagttgtatgtaaatctaaaaaacaacaaaaacaagaaaggaaaggagaaggggaagaaaggaagagagggagggagaagaaaaggttgaccagcacaaggggactaactgatatctatcccatccctggttttatgagtattaattttgcaaaacagtgatgcatgtaaagttctttccagctattaaacagactcttactaagaatatcaggcaggtgttactacattcatttttgtaaatggaggagtcagggaaaaatagatgtgaagaaaagtcagaattgttactgttgttagtgtggctcagttcagggtactcacctgtatgactctaaggttaaatggatgctgctgttcagagttctaattcttgtgtgcaatggcttagatccttgccagaatggaggttcctgtgtagatggagtgaatactttctcctgcctatgccttccgggcttcactggggataaatgtcagacagacatgaatgagtgtctgagtgagccctgtaagaacggagggacctgctctgactatgtcaacagttacacctgcaagtgccaggcgggatttgatggagtccactgtgagaacaacattgacgagtgcactgagaggtgagcagcccgtgtcctcaggcaacagtgtcttacgggaaaagggagagaggggaggaacctacagagtactatactgggattgaggggccacataaggcatcgccttggatcccgccacacagtcatctcctattttctagtttctaattccttgtggacatctagttataagtttaaggcagaggttgaaaaacttagtgagatgttcagttcagtcgctcagtcgtgtctgactctttgcaatcccatgaaccgcagcacgtcaggcctccctgtccatcaccaactcccagagtccacccaaacccatgtccatcaagtcagtgatgccatccaaacatctcatcctctgtcatccccttctcctcctgccctcaatctttcccagcatcagggtcttttcagatgagtcagctcttcacatcaggtggccaaagtattggagtttcagcttcaacatcagtcctaccaatgaacacccaggactgatctcctttaggatggactggttggatctccttgcagttcaagggactctcaagagtcttctccaacaccacagttcaaaagcatcaatttttcggtgctcagctttcttcacagaccaactctcacatccatacatgaccactggaaaaaccatagccttgactagacggacctttgttgccaaagtaatgtctctgcttttttatagtgagatgaatcatcatttatttcttacgtaggaaacagaaagagctataatttctatatcatctccttttggtctcttgtaaatttcagttgacaaaaaaatcctaacttctttacagatttgtcatccctctttaagtaatctctgggaggtttgattctttttttattatcaacaaatctgttctgtttctcttccataaagaaatatagaatcaagagctatttatttgatatgttccttataaattaaattgacttagagataaaatgaaatgtgatacatggagagctacagaagggctgggtaaaacctggacgccttcactttctcttggaatctctaataagctcagacttttaaatactcctcggatctttttggttgtggaaaggaagctgagactcatgctgattggtgcccattctaatttggaaaaaggtaaagtttactggatataggagtttggggtgctcaggagtatttccttctgtaatatcttagatgtgaggaacctcacttttaaaatagcaggtcagaggatccagattatctagctgatgatgttcttcctgtgtgcttctcagctcctgtttcaatggtggcacgtgtatcgatgggattaactccttctcttgcttgtgccctgtgggcttcactggttccttctgcctccatgagatcaatgaatgcaactctcatccatgcctgaatgaaggagtatgtgttgatggcctgggtacctaccgctgcatctgcccattgggctacactggaaaaaactgtcaggtaattagatttcatcccattcattcagctcccgcagaattgttgagtgttacacctgtttctttcctaggcaaaataatccccatctaaaagagaaaatttggggtcttaggaatgtactcaaaataaatttggacagcttcttaattatacttctaagataactaagttaatctaagttcttagataacttctaagaactaccaacttcttaacctggtagatttcaaaatggtgatactggcaagattatgggttaacacacataaaattgttacagcaggctaacctagagctgcagaaaatgcatatgggaaataagcacattgatatcatttaggaaagacaaaaagggaaacaaagaacaatcaaaataaagtttataaaattcagatacaacatctgaggggataatgataattatgccctacaatgttgtaacaatctcaaaaccaaactattcacatgtctttcaaattcaaatatttaatattcattttcataaactcttaggatggaacgacccctcagagcctactagtctagcctttcatgaaagaataaattgagccccagagggtcaaagtaacttttctaaggttgcaccccaaacagcattgtgtttaattttatgcagttttacctctcaaacaatgatggaatgatagaatatcataccagcagtccaaataattaagaaacagatgccaaatgtagccagcctttccgagtacacttcagtggcgctttggctgtactggacatgcagataagcacctctgcgtcttaaacagcttgctgctgatcccctggatcaggaggctgttcttcgccgggcttctgcccttcacacagtgtggtggccctctgcccttcccttctttcacagacggtcagtgttgtgagtacggccttcctctccccaggggccaggccacgacacgggagttttggaaaaggtgctcgtccacttgcaccctttgcctcttgcttttcagaagcctgagtttctcccatcaaaatacattctttgttttgtggatgggttcatttgtgccgtgttttggattccacacgtgacagcatggttttcccctttctgacttgacttagtatgataatttctggttcaacccatgttgctgtaatggcctgatttcactctagtaggagtccattttatgtgtgtgccgcattttctttattcatctgtgcagggtcatttaggttgtttctgtgtctcggctgttgtgaatagtgctgtcaacttataggggtgggtgaacaacagggtcctgctgtacagcacaggcagctgtaggcagtatcctgtgataagctataatagaagagattatttaagaaagaatgtctgtatgtgtataactgaggaactttgctgtgcaatagagattagcatggcattgtaaatcaactgtacttcaataaaaaagtttttagtttttattttttaataacagtaaaaaagtaagctttgggacagtttttaggtttattaacaagcgttaagcctttaaatcctgaacgcttactcaccacagacagatttgatcaagcccatgtgatttctcactcaggagtagcacatggaagctgtggacctatctgacagctttaactcttttctagccctacagggtggccgtgtttctagacataagcgtgatatagggaataacttaaccaattaagttcctcaaattcttaaacttatctggtaagaatttttgaatagcagagctaaaagaattagactgtataaaatgattagcttatctggggacagtgaatctaagtttaaggcttgggtgagggctcttttttttttattaattagtgtgctttcctttgagtttttaaaatgcagtgtagctttttttcattcctgatgtctgaatgttgatatatgtgtctgcctctgtttcagaccctggtgaacctctgcagtcggtctccatgtaaaaacaaaggtacctgcattcaggataaagcagagtcacggtgcctgtgtccgtctggatgggctggtgcttactgtgatgttcccagtgtctcctgtgaggtggcggcctcccacagaggtgagctctgcaccccccgagactcaagggtcagtccatgaagtactgactaacgagcagcactgtagggcaagagttgttattgtgggaggagagggaagggcatacaggaatgaatgggcaaggctctggaaaaagggtctgaaatggaaggtgaagggcaggggagcaagtctagagattccaaaaaggaatgtacttgacgtggaaggaaggcatgttccactttcagcacttgtttatttttttaacatatttatttttaattgaaggataattgctttacagtattgtattggtttctgccatacacaacatgaatcagccataagtatacatatgccccctccctcttgaacctctctgccacctgccacctcatcccaccattctaggttgtcacaaagccccgttttgagttcccgagtcatacagcaaattcccactggctacctggtttatacatagtagtatttatgtttccatgcttctctctccatttgtcccaccctctccttccccagtacccccgggctctgggtccataagcctgttctctatgtctgcatctccactgctgccctgcaaataggttcatcagtcccatctttataaattccacatatatgcagcacttatttatttttaacacaaaacagatcctgagggttgtgaactagacaagaataaaatatgatgtgtcaaccagcttagattagttcagctgaccgtgacgtgttgtgtgctgttccgtgatgttccttcctccactgggtttcgcaggggtgcctgttgaccgcttgtgccagcactcaggcgtctgtatcagtgcgggcaactcgcatcattgccagtgccctctgggctacaccgggagctactgtgaggaccagcttgatgagtgctcgtccaatccctgccagcacggcgccacctgccgggacttcattggtggatacagatgcgaggtgagtaagaggagcaggcaaagtcagaggccttccagaagatggcacgccgcttacaaacacgggcatcctgagtttagctgcatatgtctgattctcacaatttatagatttcttttctttttgcgaatcatgattgcattgctttctaatcactgttgcttttggtcccctgtgcattaagttagaagagctctggtaagctgttttcacagaagtctggaaccgtcttgcttccacaggattgcttccagaatccagagctacagtactctgccagggtgcatttcccagcctacccagcccagtgacccctggtacttctctgaataagcagttgagataggagaagccactttgaggagtgggcctttgacccacgtcatgtttgtaaacagtcattggtcaatcgactaataattctctcaaaaaaaatgttacccaacctgttctgtgtagcatcatactgttacacgtgtatatttgagggcatatgtatcttttaagggatgtatcatgctgcagtccatggggtcacaaggagtcagacacaacttagcaactgaacaacaatagcaacaacatcattgttcttaatgtctgggctgatagatcaagatgttgacaaaataccagagacatgaatttgataccagtttaggccaccaagcaacaccgagaaaaactctgcttctctgcttctcaaaatgagccaaagatggcttcagggtattggtccctgtttcttatttttagttcgaaagccactggtaccattttttctaaaacatagccctaagaagtagaatttattcacttagggcctgcctgctttatatgttctgcaaaactgcacctggcactgctagccacaggtaagatgagccccaggatgtgaagataccaagctcctgctgtccttcagagctctgtgacccagagactctggcctggctgctgagtcatatcaccaaacatgtcagccccctctctgttaccctcttccctctgagttcatctgccctcctcttcttatccttttttatctctctatgagtcacatctctgttaaggtttgcatgaaaagtccaatgaaagatgttaaagttattcatatgcagtttgcactatgaattgaacatctttttattcagcctatacacagatctttgttttgagctctcaaagtactcagacaacattttgtaactgctgctgttgctttataggttcaccaaaaatggcattaagaaaaagaaaggagatgttgcatagtttttaaaccagaaggtggcacttcgtacatacaaaattcgatagctatactgggaagcatacagcaatcagttacagtgattttgctgtgagggactcaaagcattgcccaaatagagccacttcatggtcagtattttcttccttgatcagccctgaaggccctagaacgcctacatctagcatagctagcctgcccacctctgggtgcgcccacccctacatcagccagtttctcacacgtaaacatgtagtttcctgagcatggggatcagtaaatacacgcattatctttactaccatccacatgtaccatttctgtgagccaccgggtcctcatcacatacaaaggaatgaatgttttaaagatgggaaaaccttgcacacagaagggacggaaggcttttgcacaggcatcatttgagatatccctcagaatattcagtccttgccttccttttcaagtggcttttttggctagaagtgataaatgccagtgagctgtgagttgactcggcacgagatggtgagtaaggagagtgatgataccagagaggcgtacaagagctgggtggggtttggcagaagagggtcacagtaacttacccgatttcatttgctcccttgatatgcatccaacaatagtccagcatttcttgttctttttgctttgctcttggcagtgtgtccctggatatcagggtgtcaactgcgagtatgaagtggatgagtgccagaaccagccatgccagaacggaggcacctgcatcgaccttgtgaaccacttcaagtgctcctgcccaccaggcacgcggggtatgaactcagccttacctatcttccatccagggcattctctaagttataaatgcatttttagtctcgtgaaggaatttttaaaacaagattcagcattattctgaatcttagagattcaagccatttcattgctctcttgccaagctctggtgttctgacgcctgttctcaattctgtctggttgttgttaaaacccatgaaacacagaatgtgcaaatgacataatgttgcagcaaagttaatctggttagcaagatctcttggtactttgagggaaaacaaccagtagcctcttgaataaattatttgtatttaccagctcgtgtatttttctaaacttcaagtcttacctccataaagtgggaaaatgaatgaaatgaaaacacttgcctgttttcctaagcccaaggggagaaggttgatggtccaagaatgaactaagaattacaataagacctaatgagatgcaaccctagatggtggatggtggaaccatcattccaccaggggcattcccttgcctgcaaacaatctcctggaaagagcttggagtattattttttagaagagatatagttataatggtgcctgctctgagcagcatgtgaaaagaaaaagccatccacagtggtggaaaattgattctcatcaaagagaatagaatgttagagaagtatttatactgtcttaaacctttgggtcagtggattttggctttccttcttgagttcagagttggctaaattagaatggaaaagttccccagtagtaggctagttattgagcagtgagattaacagggaagtcaaaactaaggagaaacagcctttaaatatttgaagattcgttccactaaaggagagttgttttctgctcagtacttgaaagagaagtagaggttaattttaattgcttctagaggtaatattatccattaaaaatcctgttactatttttattgaggtcacattaaatttatgaatttgtataaagaagactgacatctttagaatgaggagtcttcctgaccatcccattgtgtctttctgtttattcaagtttccttttgtgtcttttaggtctactttaaagtctgcatgtaggtgtagtggatttcttgttaagattattgttagatattttatcttttgcctagcatgctgcagttcatggggttgcaaagagtcggccacgactgagtgactgaactgaactgattgctgttgaaactgaggcctttttttaaaaaaaacatttttcttttctttccaatagtcttgctattacaagtggtaagaatacagtattgtttttctttcttctgtaatttttttgaattgatcatgaaatcacttctagaatagtcattgatttcttttgtttcttcctcaaaaatatgtacagatgttcatacttgatgggccttttacatctgtagcacattaaatgagttctgttttaaatggaataacctttgagctctcaacaggatatttcccttctatttttttgataaaagatatttgtgcacttacactattttacagaaaaagtcatttgtgggattcaaaatttacttccagttcttaccaatgattacttgtagtctatttatttatagttatattctttttaactgtttttatattttaaatcaaaatgaataaattaatgaaaagttaccaaatctctcttgagttccaatttcctcacctttcaagtggaaaaataatactagctatgccctaagggatagcttcatcactgggttgtgtggggagtacatgagaagccctgagaacatcctttgcttgctggtgtccaggacgatgggcacactcctgggtcaagcgtgtgttatgctctgcctgaccaaaatggttccagcctgactaattgtggaaatgccaccagggctggttttcccttcctggaaagcagcgttccaagaactgtcatcattttctctccctcctctctctcctccaggcctgctttgtgaagagaacattgacgactgtgccagaggtccccactgccttaatggtggccagtgtgtagacaggattgggggctacagttgtcgctgcttgccaggctttgctggagaacgctgtgagggggacatcaacgagtgcctgtccagcccctgcagctctgagggcagcctggactgcattcagctcaccaacgactacctgtgcgtctgccgcagcaccttcactggtgagctgagcacctttccagcttccccagccactctgcctcacagtggggtgggggtttcagtgaggaaactgggccctgcatgacacatctagacccaagggaagcttttctggcccatagactgtagcccccctggctcctctgtctatgggattctccaagcaagaatattggcatgggttgccatttccttctccaggggatcttcctgacccagggatcaaacctgggtctcttgcattgcaggcagattctctaccatctgagccaccagggaaggccacaggtagtcgttggcgagctgtatgtagtctaggctgccctcagaggtgcaagggtgaaaatctagaccagcttaattcaagggcccaactttttcctaggcctgcgctccacagatgtttatgtttcctgagagatcctatctcttttgttgtatattaattacatcttattgtagcagaaatatgaaaaaaagaaatagaatgttgggagaagttgagcaaagtaacatttttaaattgaggtaaaatacatataaataaagtttaccatctttaccatttttaagtatgcagttcagtggtattgaggatattcacattgttatgctgccatcaccaccatccatctctggaattcatttcatctcatgttcaggaaccttacatctaactctggttttgtcaccctgcctcctgtggcatgtagcgacttgagtggcttggttgttgccgccatagtgacctttctaccttctgggatccaaagaagtttagggtcttcttggacgattaaagggaatagatccaaattgggctgtttaaccaaaaaccaactgatgagggtatgaacaggaaaacttcagaggtcacaagcggggcctgcacgctaagacttggctgtgttcatcacagattacaaagatgagtgagtcctgcctccgaataggggttttatcatagacagttactaattatttctggagaagggcaacttggtgactttgggggactaaaatagctgtttatatctaaatatggcagtgccatcagttacccggaaatctgtcttgcactctggggtcagctcaaatcttttgctgtagaagtattctttggaagtcagatgagagtctgcattagtctacttactagtaatctggaaagttgaactctgctacattctgggcttattatatccagacatcccccccttccagttttaaagatatattacctttaagaactttggaattttatttaaaaaaggggggggaggtggattttgaaatatggaaaacacctagatacagcatcaaaagagaaacaatccaatacgaatgtcatatgtttgaggcaaccctggacagaaagactatgaacaaatctgtcatctcacactggtcatgatatgcttgagaactagaagacaactgactcctgttcctttcattacctctgaggcttcctttatctggaaatgctgatgagtcctaggaagaaagaaggaaataggcaaaaggagtggagaccaccttgaattggggtcccatagccagaagtggcggagaaggcaatggtaccccactccagtactcttgcctggaaaatcccacggacggaggagcctggtgggctgcagttcgtggggtcgctgagggtcggacactactgagcgacttcactttcacttttcactttcatgcattggagaaggaaatggcaacccactccagtgttcttgcctggagaatcccagggacgggggagccaggagggctgctgtctatggggtcacacagagtcggacacgactgaagtgacttagcagcagcagcagcagccagaagtggtgtttctacattttccacacctgtgaattaaaaaatactttgactctcaatcacaattatggtgggagtgttaagctgtgggggtttttttgtatgtttgttttaaatttttatgggaatataattgctttgtaatgttgtgttagtttctactaacacaagctgtgtaggtaatgctaacataagctgtgttttaaaacaatgccaataaggttacagaaaggctggaacattttaaaacagatgttactgatgaaaattcaatataaactgcaaatcaacatttttaaaaattaatttattttaattgggggctaattactttacagtattgtggtgggtttgccatacattaacatgaattagccacggcccctgtcccaaaagtttttctttttaatttttattacaatatagttgatttacaatgttgtgttattttctgctgtacagcaaagtgagtcagttatacatatttatcagtccactctattttaggttatttccccatgtaggtcattgcagactactgagttaagttccctgtgccatacagtaggttcttattagttatcagttttatctatagtagtatatatatggtaatcactgttttagatgtattggcctggtgtagcctgtccaggctactgtaaccccactccagtactcttacctggaaaatcccatggacggaggagcctggaaggctgcagtccatggggtcgctgagggtcggactcgactgagcgacttcactttcacttttcactttcatgcattggagaaggaaatggtagcccactccagtgttcttgcctggagaatcccagggacgggggagcctggagggctgccatctatggggttgcgcagagtcggacacgactgaagtgacttagcaacagcagcagcctgtcttatgaagtagacagtgttaacaaaatgcagtgaatttttgctaaatgtttttgacttacgaaagctaaagtgccttcaaaagagcttaggtgtcattttctttctttctttttttttttttttgaggggttagtcattttttgtacacatcttgttttgtgagtcacttcagtcatgtgccatttgcacttattgctgtagataagacagatgagggaactgtcctgagtgggtgatgggccaaggatgttgggatttagcgtgtgccttcctcatcctctcatgtccccttaggcttagaactcaattctcacacctcttgctccctctcaaatcctttgactagctcacatcccggtagtatcctgttcaataacctgagttactgcttccaccttttaaaaccccctttcgttttctactctgaggtcgtcactgtgaaacgttcgtcgacgtgtgtccccagatgccttgcctgaatggaggcacttgtgctgtggccagcaacatgcccgatggtttcatctgtcgctgtccccaggtgagtgccacagtgcctactgaattccatatagcctgtgacagagccgagacgaaacctggcatttccgagctcggtggggagctttcttggtggggatgtttcttaatgttagcctctttaggagaaaatgcttccgttttccatttaaaactattaaaatacttccagaaacagtgagctccctgatctgcgactgtcagtcctcagaagcactaagggcagtggcatattcccttgggaatagggctagtgtatttggcttctgggtcttgtgctggagggtagtcttgctgcccagactgggacagagtaattggaaatgctactctgctcacatccctcgacagcagttatttgggaacagactgcttcttcaactagaaggaagtcttaacgttagccatttgctctgcaaacacttttgctcctgccagaggctaaaagcttcctaacagatgagtagagggatatcaaaagaaaacctgtccagtaaccttggcctggactgagccagacgtccaagaacgaaatgacataggcaagtcttttagacatctgatcctctgaagtgtgtattttccccggtaaagtcactgtatgagtgatctactgatgatttggaaaggtgctaataggttcagggtcaccttatcctaacgtgaactccagacttcatttctagaagcaagctcttagagtaaaaaagttctgtattcatcctggaaccaccaccctgacctgtaggttgacttgaagaagtctcttcctataactcggtccaggaggctacctggagggatcttagccaagagcctggtcttcacctccctagaggtgtggcggtgaggggccgggggggagaatggggcctgccctcacgggtcacctgccatcctcactcgttcactgattcccacagggcttctctggggtgcggtgccagagcagctgtggacaggtgaagtgcaggagaggggagcagtgtgtgcacacggcctcgggcccccgctgcttctgccccaacccccaggactgcgactcgggctgcgccagtagcccctgccagcatggggggagctgccaccctcagcgccagcctccgtactactcgtgccagtgtgccccgcccttccggggcagccactgtgaactctacagcgcccccaccagcacccctcccgccacctgcctgagccagtattgtgccgacaaagctcgggacggcatctgtgatgatgtgtgcaacagccatgcctgccagtgggacgggggggactgttccctcaccatggaagacccctgggccaattgctcctccccgctgccctgctgggagtacatcaacaaccagtgcgacgagctgtgcaacacggctgagtgcctgtttgacaactttgaatgccagaagagtagcaagacatgcaagtaagcgcccagggtccccagaactgaggggcagcgctgtcactaactcacctcagtctcttgttcttttgctgctaaccactccagtgcttctgcccaagccgcctctgccttctggactggcaccagttgcccccttctcccttgtgccatcctgccccatcacacgctaccctgtgctctcccttgctgaccaaggggcagaaacgctcactgcacagccactctctctctgcctgtctctgcttcctcgcctgctgctgtcacaggttcccaggggaagtgacttttggaagtgttaccactgtcaggcagcctctcacataatctgcctgcagcatggttgcaaaggtctgtacccctctctattcatcccgtgcctttccctaagactgggtttcccctccagatttatcaggaagcatctgctagattagtcagcttaaccctcctggtcttcactgctgcaactatagggggctttgtgggttacttaatagctttccatttagtcatcccatttggttcaaccctgattaattctcaacaatcttgtgaggcatagatgttgttaatggtctttaacaggccagggaagggagacttgggaggttcaagaacttgccagagcagatatagctcctcctgactcctgatctcctcactgagctagagtggcaagttggaccaggtggtgtaaccatcagggatgggagtgaggagggagaaggggtgagtggaaatcaaacaatttttgcatcaacgggccttgggagtcaatttccatttcccaatgtttgaaagatgctgtacgaattagatctggcatcctgtgtgggacacacttctcgccacctaccttccacagtgaagattcagtcttgattagaaaagaaatgggccatatcaaatgggccaaaggtcaactgtacagcatctcttgttggtatggggctactttccagtttctggaagcactctctagagtcttgttttactgctggaagcccagaggcaatggatataaaaataaaggaaacatgaaccaggtatttttgtttcagatttgtttacaaatctgatttaacatgatgacaagctgcctaggggcccatgagtttagtgagtagctttgtttctcattcagagagcactcactgatgctaaggtgtgtagactgtatatactccaagaagtcaggcacggagagtcacagaggcttcagaggacattcaggatctaatctgagccgtagaagatgggtaggaaaatccacatagttccaagtggaaaacaaatagcgctccactgtgatcttaccatattctctgcctccctctgcctagatatgacaagtactgtgcagaccactacgaagacaaccactgtgaccagggttgcaacagtgaggagtgtggctgggatgggctggactgtgctgctgaccggccagaaaacctggcagagggcaccctcgtcatcgtggtgctgatgccacctgaacagctgctccaggatgcccgcagattcttgcgggcactgggcaccctgctccacaccaacctccgtatcaaacgggatgcccagggggaactcatggtctacccctattatggtgggaagtcagctgccatgaagaagcagagattgacacgcaggtcccttcctggagatgaagaacaggaagtggctgggtaggtgtttaatttctgaacttaaagcttaattttatcaagctgagcactttgatacacagatatcttaactgcaactgcacctataaagatgaaaggtcagaaaacaaaacagtcaactgaataacacaagcctgtaatctcagtctttaaggttagtgctcaaggtttgccttgatcttggaatcctgaaaagtgggctgaagcaagtcaagtggcaggatgtcagaacgggcttgtcatgtgctagaatctctaaccatttgccagagttggggtaaatccctctagtgatgacttctctttgtattaatcctgggcttcttttcaaggcccttcatttctgtctctttgacaagggtgatgttctgcatatattatgttatccacactgaggatttcttcgtatctcacaatgttcagcttgctagctagctcgagtacagatgcagagagaaacgagagtaaggaacaaaaagcaaaaggcaggggtgtgtttttagagtagctgtatgtaccgttgagtacaccggaagggggaaggggtagaagcagcccaccaaaggcaacctcaccccattttctcaatgtgtcttatgttgccgaaaagtcagaacacttggatgcagccaaaccaagaacatggaagtgttagtcactcagtcgtgtccgactctttgtgacctcatggactgtagcccaccctaagtgagaattaggatgtaaaccatatcttaatttctgggatcttcctggagacagcatcccagaggtagagggcccaaggctgagggtgaggaagcgggtctacctcagattcctgggttgacattttctcgccatttctccttggctcccctcagctctcaggtatttctggagattgacaaccgccagtgtgttcaagactcagaccagtgctttaagaacacagacgcagcagcagctcttctggcttctcacgccatccaggggaccctgtcatacccacttgtgtctgtcgtcagtgagtagctctgaaatgaaggggaaagtgtgctgaggaatgccacttgcaggcagagagaatggggcacagcttacagtgtgcaacgctctgtttctcagggctagcgaggtcaaagttgttctctgaaggagtttagtgggaatattgagaggtggatgttttgttcaccactttccctatctctctgcactttcaggtgaatctctgaccccaaaacgcactcagcttctctatctgcttgctgttgctgttgtcattatcttgtttattatcctgctgggggttatcatggcaaaacgaaagcgcaagcatggctccctctggctgcctgaaggtttcacccttcgccgtgactccagcaaccacaaacgtcgtgagccagtgggccaggatgctgtgggactcaagtaagagtttgtcaacaagttactattcatggtagtaacaagtatggataagtggaaaatcagatcttgttgaatcatgattttaaattcagagttctggccatgccatgctactatacttgaccgtgatgctgaatgcctgcttgtggctataaaataagaatctggatgcttcagttctgtacgtattatcacagggatgctcagcttctgtgatgagacacgcctttgttgtaagctcttgcttagtggaaaaggaaatgatatttactcaggcaatgggatgtaatattgcccattttttccctgggtcctgaaagtctgactgtagccatgataatgtgtgatggcagaaaaattatgaaaatttctatgttcttttatgatataaccctgctcttattttataccttcatgattctgtcatgttagaaatctctcagtgcaagtctcagaggctaacctaattggttccggaacaagtgaacactgggtcgatgatgaagggccccagcctaagaaagccaaggtaagctggccatggtctgctcatatttcacgtttttgtcctttggtatctagagtatcatgaatgggagagaagggtggtagtctgtacatgttgcccaggccttgactatcctaggttgtttcaaaaatcaggaatatttaggtcattgatggccttgggttactatgtaagtttttcagaaagaactctttaaaaataataaaacaaacatgcttccttcctcaaatgtcaggttgatggtacttgaataaggactattatgtgtaaacaccagtttctttcatagccagatctctcccttattcttcctggatacttcaagggaaggtggagttagttagtggaggaaagccggtgatcactgagtttggaggctttaaatcttgatccctggaaacaaaagccatatagcagtaagaggtacattgggctgggtctgacatgaaaaaggagaccattcacccatagacatacacggctgggatatgcatgtattccacagatattctgaggaaataaacttgaggaaaacaggcatgatggttaagaaaattactacagtcaggactggattcaagtcccaaacactggcacattatttaacctctttatatttacttatccttaatctgtaagatagggaaaataataatgattctttcaatatgggtgaattgccttacctgttttctatcacatactgaatattccgtaaaggtcagctgcttttaaaagtataataattatccagcaaatacttcctgaatgctggctctttgctgggcactggggtggatacagggtacaaggaggcaaccttgaacaaggcttgctccctgtcctgaggaacctttcaggtagcagtgggaactgccatgcaatgctgtgtaagcacctaacacaacgcttcattaaggagagtgagcagcgtgttaaagtctgctctctacttgaagggtagctagaagttagtcagtcaaagaattgggagagatcctggggacgtaccagagtgatcaggagagtttacctcttctttcaggctgaagatgaggctttgctctcagaagaagatgaccccgtcgatcggcgtccatggacacagcagcacctggaagctgcagacatccgtaggacaccatcgctggctctcacccctccacaggcagagcaagaggtgggcgtgctggatgtgaacgtccgcggcccaggttagtgcctgcgagccttctctctgcactgtgccatgcccaccccctggttccaccttatccctctgtttgccccactcagagatcgaggaaatcagactggaaatcagcttgaggaaatgaacgtctaaggaaaacaggcttgcagaaattatcaatttgtatgagaaaagaggcaggatttcattttgtttcaccttctgcatgcatacatgctaagttgcttcagtcgtgtccgcctctttgcgaccccatggactgtagcctgccaggctcctctgtccatggaattctccaggcaagaatactggagtgctttgccatgccctcctccaggggatcttcctgaccgagggatcaaacccacctttcctgcattgcaggcagattctttaccactgaaccaccagggaagctctcacataatgcgtgttcatcaaccaaaaggctgattctttgggatagattttagtgggataaaaaaaaataatatcccaaagcagaggaatagagaatttgtttagttcgtaccttagtgtatatagtttattaatactggatattttaaaatgtccaatttaaaaaagcatagcacttagaaacttgaatagataagcttgtttaacttagagactagctcctctttacagaaaggatactaccaagggaaaatcaattgccatttatcacaagaagcacagggttttttctgaaaagaataattttcttcaaattttgctcttccagcaatagggttaagtgaacatgaatgtctttcccctccttgaatactatttggaatttccctttcctccagatgggtgcaccccactgatgctggcttctctccgaggaggcagctcagacatgagtgatgaagatgaagatgcagaggactcttctgctaacatcatcacggacttagtctaccagggtgccagcctccaagcacagacagaccggacgggtgagatggccctgcatctcgcagcccggtactcaagggcagatgctgccaagcgtctcctggatgcaggagcagatgccaatgcccaggacaacatgggccgctgtcctctccatgctgcagtggctgctgatgcccaaggtgtcttccaggtaaagatcatgtaaagagttgattcctaaggaatctagaatatttccccttcattaagacacgtaataacccattatatttgtccagtgattctttgagagaataaggcagatgataaagtcatgcttgctggataggaaagcaggaaagggaggcaggcaggcagagctgaccatatacagctagctcatggtaaagcaggtaccaccagtcttctgattgttcatcagcgctttgttttttgtttgtttgttttgtttttgatgaggcaaaataacctcccaaatgaaaagatcaggtgcatgacacctgcctccgactagtgtctgtcagcttctccctcgagatttatctgactctatgggcttccagctgctccttggtggttttcctgacctgagttcacagtgcacacctgatgccctattattttagccttaagaggaaattgaaagcaattctgtaccatcttaacttgtacaccacaattgaggttgtggtattttcccacattccctcttctttctttagaaagcagaggtacattaatttacaaggccactgtagagcttgagcacctgtttgtatattcattcatcttattccttcattcattcattccacagagattaggtgactgaccctagcagaacctggacacgaagatagcaaaacattccctgccctccaggaacttattgtagagcctcaactctgatgcttttatgtgtgtcttatcttagcttcattatcttttgtattcagctgagtctcttttctgtactttctcatattctagatactgatccgcaaccgagtaactgatctagacgcgaggatgaatgatggcactacacccctgatcctggctgcccggctggctgtggagggaatggtggcagaactgatcaactgccaagcagatgtgaatgcagtggatgaccacggtagggatgagcagcagggattcagattcctacctgcaaagcaggcctctaaggaaagaattattgcatgatccctaaagagctgtctcagatccgaatccaccaaaaattcgttcattcattccatcttccttttgcaatattgagttccaagatctgagacagtgtgaagtccatagatgaagttgggaagggatttttagtgagagttcttggacgtaagagcaggtctatgagagttttcctgcataagttcccaggtataccactcttgttatgaggatatgagagctgacttcatggaaggggtagggtggtgagatattctaactatatatcctggcatgtaataaaaaagcaggttattgtcttcagcatgtgacagggtagattctgccacacaaaggatgtggtaccgtagacagatgatccttttacttagaggtcttctgaaagctaggcagcctgtaccaaagtatttctagaataggggaatatgaagataatctttggtttttcctttgggcccccagagaaaactgacttctagctgttgtctgagaagttcaaggtttccttgtacaactcataacacttcccgatgggaggggtaggacatgacctcttactctgtctgcttataaaaatgttttttcctgcaggaaaatctgcccttcactgggcagctgctgtgaataatgtggaggcaacccttttgctgttgaaaaatggggccaaccgagacatgcaggacaacaaggtacagtctgggctctgagctaggggcaggtgcagcagtgcctcggattatgcatgaggccattccttttctcctgtagctgctctgtaataaggataggcaaagatggaagcagactgggcaggaaatgggtccagagtgcctgagtgcttgggcttatccagtgaaatgtcagagttgacccttagcctgctcactctgcaccaggctgtccctttgataactttggtgtaaccttttctgcctttctcttctttgacatttccctttttcctggtctctgttctgttcacacacacttccttcctttttacttgtttgttcttacttgttttcctgatgctccgcgtcccccagccctgccccgttcttgggctccatgatgttttcctgcttcctctgacttctgtgtcatgcgtccctctgttgttcaccttaccttctcttgttcatttcctcttttccattattttgttctttgtctcagatgttttgtctgtctttctttcactttcccttatttttctgtacatgctttaggttcttcccctcatacctttatttctgttacgccttttagaaccctattttgataagctcagtgttcttgcaggtgaatttatggctcagggacatgctttatttcacactttccccattaagaaaacaaagccctcagtagggcaaagctggatcttggggagaagtaaaataatttttctttatgtataaattacagatagccattcagtacataggtaggtgcacactttttatctgtggtattaaaatttcatgtgggaaggcagttaggaaaaaatgtctaaaggagtgataacaaaaagattgagaaacatggctgtattctcaggagtgttattaaaatgcactctgcatgggctttttctttctttctttttttctgtaggaggagacacccctgtttcttgctgcccgggaggggagctatgaagcagccaagatcctgttagaccattttgccaatcgggacatcacagaccacatggatcgtcttcctcgggacgtagcccgggaccgcatgcaccatgacatcgtgcgcctgctggacgagtacaacgtgacccccagccctcccggcacagtgctgacttctgcactctcacctgtcatctgtgggcccaacagatcttttctcagtctgaagcataccccaatgggcaagaagtctagacggcctaacaccaagagtgccgtgcccactagcctccctaaccttgccaaggaggccaaggatgccaaggggaacaggaggaagaagtctctgagtgacaagggccagctctccgagagctcagtgactctgtcccccgtcgattccctagagtctccgcacacatatgtttctgacaccacctcctccccaatgatcacatcccctggaatcttacaggcctcacccaaccccatgctggccactgccgcccccgctggccccgtccatgcacagcatgcactgtctttctctaaccttcatgagatgcagcccttggctcatggggccaataccgtgcttccctcggtgagccagctgctgtcccaccaccacattgtgcccccaggcagcagcaccgcagggagtgtgggtaggctacatccagtccctgtcccggccgactggatgaaccgcgtggaggtgaatgagagccagtacaacgagatgttcggtatggtcctggctccagctgagggcacccaccctggcatagctccccagagcaggccgcctgacgggaagcatttaaccaccccccgagagcccttgccccccattgtgactttccagctaatccctaaaggcagcattgcccaaccaactggggctgcccagcctccgtccaactgccctccagccgttgcaggtaccctgcccaccatgtatcagattccagaaatggctcgcttgcccagtatggcttttcccactgccatgatgtcccagcaggatgggcaggtttctcagaccattctcccagcctatcaccccttcccagcctccgtgggtaagtatcccacacccccatcacagcatagctatgcttcctccagtgctgctgagagaacacccagtcacagtggtcacctccagggtgagcatccctacctgacaccgtccccagagtctcctgaccagtggtcaagttcatcaccccactctgcttctgactggtcagatgtgaccaccagccccactcctgggggtgctggaggaggtcagcggggacctgggacacacatgtctgagccaccacgcagcaacatgcaggtctatgcatgaaagaatctgcctccagcctagacacagaactcctcttgtaaatgctgctgaggaacaaatgaaggtcatccgggaaagaaatgaagaaatctctggaaccagcttctggaggcaggagagaggagaggctcttatcttgtagataacccgaagaagcgagttaattagcttcactgagcatctgcggggtttggggaacatggaagggacaaggctccttgtagtctcttgcccgtcaagtccccaagttcacagaactgcaagatgaatacaagacttgggaccacatttcctctcttcaatacagagaacaagatggatgcctgttgtagacattcttgcagcctggagtgcatttttcagccttgggggcttctgccatatccatgagaagattctgcagtagactcctcctgggagttgtgccctggaattctgccagatgtgacctgtctcctgttctcatccttggaaaattcttttgacttcatttggtgctt

SEQ ID NO: 84 - DNA, 289043 bp, Hippotragus equinus
  source 1..289043: mol_type = genomic DNA
tccggtcccatcacttcatgggacatagatggggaaacagtagaaacagtgtcagactttatttttttgggctccaaaattactgcagatggtgactgcagccatgaaattaaaagacgctctctccttggaagaaaagttatgtccaagctagatagcatattcaaaagcagagacattactctgccgactaaggtccgtgtagtcaaggctatggtttttccagtggtcatgtatggatgtgagatttggactgtgaagaaggctgagcaccgaagaattgatgcttttgcactgtggtgctggagaagactcttgagagtcccttggactgcaaggagatccaagcagtccattctgaaggagatcaaccctgggatttctttggaaggaatgatgctgaagctgaagcttcagtattttggccacctcatgcaaagagttgactcattggaaaagactctgatgctgggagggattgggggcaggaggagaaagggatgaccgaggatgagatgctggatggcatcatggactcgatggacgtgagtctgagtgaactccgggagttggtgatggacagggacgcctggcgtgctgcagttcatggggtcacaaagcgttggacacgactgagcgactgaactgaactgaactgaactgatacctgcctatcttgggtcaggcctcatggacctggcttccatttcctgactcttgggtcctagccaccatgctgtgaggcagtccaagctttaaggtacaggccacgtgggaatggcaatagactcacaccagatgtaagttagtacaccttcacatgcttccagcctccagacccaagttacttcccacctttgtgtcaccctgactgtcttggtatatagatgagctatttccatggtgtctttttgaattccattctgaccaaaagaatctgggagcatgacagatggtcactatttttgttactaaacttggggtggtttgttacagcaatagataaagacctgtctgagtttgtgtttgacttttctgctttctgaggtgggccaagagatagaagggaactgctctggccatctgccctagtatcccttcctttcccatacctataagggatcagtacacaggtttggctgatctgaccatctgtgggcaccagtgggtgagcagaacataggggctttgtggtcagagcagacaaaggctggggtccacagaagcctgaagagccagtggtcacagggatcctggaggagggtggagttcataaagggaagccacaggcaggtttccactgaagacgtggctggagggcagggcaggggatcactctgagttatacctgtcaattgaggatctgaggtcaggggcatcttcacaggatcacccacaaacacataaaatatgcgtaaacacacattcacacaaacctaccactgtatataatataagcaaaaggattttattgcagaaatgctgaaatttgcatgtacattcaagtatggttggcccttgatcaacgtgagagctagggatgcacaactgaaaatccatgtgtaaatggacctacacagttcaaactcatattgttccagggtacacagtaccacgtacttcaaaatacacactgttggcctttgtgtcagattccaatgatgctgctctttgctgagaaaacttagagacctcctaatttggaatttcctgagccatccaggaaaagtgtgactttatggtgatatcttggtaaaatcaccatgtatttcctgaactgtccccaaccactctggctgaagaaatccagtccctattcacagggaagcagggccatatgaatcacactacaggtttctagtgatgcttctgtatccaattgttgttcccagttgccaagaagggaacccccatctggacctggtttcagcaaccaagagggtgtgttggcaataaatcaggatccgagatagctcatggtttggtccaacatggtacatggccctggagactcccctgctctgagggaccttcactaccatgtgggtttgccaattccttgcaagggtgagatttcttccataatttaggccatgcgtgttcaccccctggagcaggaataggggtgatttcactacaaatgtttagcggctactcaagggacatagactaggcaggcttggggtcagcacgtagatgctggggacatgggcatgaggcatggagagccgtatggtagccacaattgccctgctggtgcgttgtgacccttctctgttcaggttggcactcacagtcagcctcccactgtatggagaccattcagtaagggcagggtagcctggaaccttctgtctgccccagatgcctacacaatcatactctgggacccccttaccactttcccatgtaacagagttctcaaagtgctggaggaagacttggccaaggtggcctccactccacgtgaatagggttgttgctgtgtccacactggctgcaagtggcagtctgaatagagacaactactaatgtggcacttggccttctcttggggaggctggggtctcttgctggtgtgccagcactggtattgctctgtggcagtgcccactgtgctctggggggcctggcgaccctgcatccttggtctttgctcctgggcagcccccaccacaccctgctttgtacagttcagtttggttcagtgactcagtagtgtctgactctttgcaaccccatggactgcagcatgccaggcctccctgtccaacaccgactcccggaggttactcaaactcatgtccattgagtcggtgatgccatccaaccacctcaacctctgtcatcttcttctcctcctgccctcaatctttcccagcatcagggtcttttcaaacaagtcagctcttcgcatcaggtagccaaagtattggagtttcagcttcaacctcagtccttccaatgtacacccaggactgatctcctttcagatggactggttggatctccttgcagtccaaggaactcttcttcttcaacaccacagttcaaaagcattgattccacagcatacgtgttataagtgtataccttcgaacacctagtgtaactgggcttcatggttctctcagaaaggcttggagaggaaactcccataaggataactttttcagttctgcctgttacactgtaggtgagccaagagctctggactttctgcagtgcctagtaggttaaagcgccagtggggcttcccagtccacagtaagcctgtgtgtctgtctgtgtgtgtgtgcctgtgtgtttgtgcctatacatatgtctgtgtgttggggtgtgtgtagttatttctgtgtctctctgtgtgcctgtttatatttttgtgtgtgcttctgcctctgtgtgtgtgtaatgtctgtgatgtgtgtgtgtgtatgtttgtgtctctgtgaatagtttacctgtctcggtgtgtctgtttgcatttccttatgtgtccgtgtgtgtccaagtgtgcatctgtatgtgggggtggctgtgtgttgtttgtgtgtgtgtgttgtgtgatacagtactttccacaagtgtaagcttcacagccctaggctggaggcaggaaaccataagaaaataagatgaatgctgatcaggtttgccagctgtagtagagaactctgaaagagcagaacagaaaaaagttggcagaatatttactaatttcacatttttccaattcttgttcatagggaaaaaactgttacaagtatcagtacttggctaccttctatcaagcagagctgcatggggcacagtaagcgctggctgcacctagtgttcagagagggctctgccccatggcactcattttggcacatactaaaattggaacacatgccaaaattggaaccatgcagagaagattagcatggcccctgagcaaggatgacgtaaattcgtgaagcgttttgtattttcaaaactcttagaggaaaccataagcagaacactctttgacataaattgcagcaagatcttttttgacccacatcctagagtaatgaaaataaaaacaaaagaaacaaatggggcctaattaagcttaaaaccttttgcacagcaaaggaaaaaatccataaacaaagcaaaaagacaactctcagaatgggagaaatatttgcaaacaaaacaactgacaaagaattaaactgcaaaatatacaaacagtccatgcagctcatcagataaacaaacaacccagtcaaaaaatgggtggaagaccaaaacagacatttctccaaagaagaagaaatacagaaacacaaacatatggatggctgacaagtacataaaaaaatgctcagcatcactaattagagaaatgcaaatcaaaactacaatgagatatcgcttcataccagttggaatggccatcatcataaaatttacgaagaataaatgctggagagggtttgaagaaacggaaccctcttacattgttggtgggaatgtaaatcggtatagccacaatggagaacggtatggagttaactttaaaaactaaaaatggaactaccatatgactcagcaatcccactactggacatatacccagagtaaagcataattcaaaaagatacctgtaccccaatgttcatcacagcactatttacaatagccaggacatggaatgtccatcaacagaggaatggataaagaagatgtagtagaaatatacaatgaaatattacttgagactgtcatacagaatgaagtaagcagaaagagaaaaatcaaatattgtatgataaagatgatctgcaaagcagaaatagagacaaagatgtagagaacaaacatctggataccaaggggaagtgagtgtgtgggtaggatgaattgggagcttggggttgagaaatatacatatatatacatgtatatatatatatatacatatataatgtataaaatagataaccaatgagaacctgctgtacagaacagggaaatctactcagtgctctttggtgacctaaataggaaggaaatcctccaaagataggatatatatatgtatagctgattcattttgctgtacagcagaaattaacattgtaaagcaactatactccaattaaaaaagagagcgagctctggtctctgatcaggagcatcttttcttcatttcttttttattaaaaatttttttatttttttaaatttatttttttaatctaaggataattgctttacagaattgtgttcagttcagttcagtcgctcagtcgtgtccgactctttgcgaccccatgaaccacagcactccaggcctccctgtccatcaccatctcccagagttcactcagactcacgtccatcgagtctgtgatgccatccagccatctcattctctgtcgtccctttctcctcctgcccccaatccctcccagcatcagagtcttttccaatgagtcagctcttcgcatgaggtggccaaagtactggagcttcagctttagcatcattccttccaaagaaatcccagggttgatctccttcagaatggactggttggatctccttgcagtccaagggactctcatgagtcttctccaacaccacagttcaaaagcatcaattctttagtgctcagccttcttcacagtccaactctcacatccatacatgaccacaggaaaaaccatagccttgactagatggaccttagttggcaaagtaatgtctctgcttttgaatatactatctaggttggtcataacttttcttccaaggagtaagcgtcttttaatttcatggctgcagccaccatctgcagtgattttggagcccaaaaagataaagtctgacactgtttctactgtttccccatctatgtcccacgaagtgatgggactagatgccatgatcttcgttttctgaatgttgagctttaagccaactttttcactctcctctttcactttcatcaagaggctttttagctcttcttcactttctgccataagggtggtgtcatctgcatatatgaggttattgatatatctcccggcaatcttgattccagcttgtgtttcttccagtccagcgtttctcgtgatgtgctctgcatataagttaaataagcagggtgacaatatacagccttgacgtaatccttttcctatttggaaccagtctgttctatgtccagttctaactgttgcttcctgacctgcatacagatttctcaagaggcaggttaggtggtctggtattcagaattgtgttggtttctgccaaacatcaacttgaatcagtcataggtatacattatgtccgcaccctcttgaacctccctctcacctcccagtctatcccacccctctaggtttgttacagagcctaggtttgaattccctgagtcatacagcaaattctcaatggctatctattttacatattgtcttcaatttttgacggtctgttgcagctgctagggtaagggagcaggggcgggagcagcgaggggatggagtggttgggggaggaggggatgcccgtcgtgacgtctgtgggtgtggccaggccggcaggaggacggcggagcagctgggagctctcctgcctcccaggactacctccatcgtcattcagcgctctcatcttcaactgtaaacttgcttctggaagaagatcaagtcttcaggttagttgggagagaggagatgaggagctaacctgttctagggagcaggcagggttttaataagcctgtgctgaattgttgcttttaggaacaaggaaaattcctctcagggaaaatgtgcaaagtctaagactgaatagctggtatgagcactcggccttgacaccacaacaagttattttctggctcactgggaggcaaattcccaagacaaagggcgtccccggccccggagggagggccgtggggatacggaggaggagaatttggaacagttcaggcagcaaatgttctgcctgaactgaggaatggcatttgttctcaccgctgacttaatccacgtgaacactagtcaggcgtttttgcggaatggaatgcgccagagtgaaaacattaaatccctcagagctgcttctctgcactctgaccacacacagtggagtaaatgaatttaagcttgcccactctttccaaagaaaggatgtcaagcacaggcatccctgggtgtggatgtgcttgggtttgacagggtaggtatctggagctcctaccacactgacctggctacctgtgaagctacccaaggaaaatgtttgagcactgatttaaggaatgtgataactctacaacctgcagtgattttgaggaagagccaacaggaggctgtgagcagggtgggcggcttctatatccttgtgtttacaaggcagtcccctgtaacctaaatcatctaggaaatgccatccctgacgtgtgtcaggggtgagcatgaggtctgctgtccaggcccctggggcaaggcctgccagggcttggagggcctgggagattgaatacgtctagggatacttgtgctgtgctgtgcttagtcattcggtgtgtctgattccatgtgaacccatggactgtagccaccaggctcctctgtccatggggattctccaggcaagaatactggagtggtttgccatgccctcctccaggggattttctcaaatcaggggtcaaacccaggtctcccagattgcaggcagattctctaccatctgagccatcagggaagccctctcatataattgctattaaggattaaatctcaggttagttgggagagaggagatgaggagctaacctgttctagggagcaggcagggttttaataagcctgtgctgaattgttgctttttggaacaaggaaaattcctctcagggaaaatgtgcaaagtctaagattgaatagctggtatgagcactcggccttgacaccacaacaagttattttctggatataatggctcattgggaggcaagttcccaagacaaagggcgtccccagcccgggagggctgtggggatacatacggaggaggaaaatttggaacagttcaggcagcaaatgttctgcctgaactgtgggatgacatctgctctcactgctgacttaacccacctaaacactagtcagatgagagctctaggtaaactgtaactctgtgtttagtcgctttgtgatcctatggaatctagactgccaggctcctctgttcgtggggattctccaggcaagaatactggagtggattgccatgccctcctccaggggatcttctcaactcagggactgaacccaggtctctcgcattgcatgcagattctttaccatctgagccaaactgtaaaggattgcacaaaaactacctcttattgcagatgtagtttacaaatgcttgagtgtcattgttcaaatcaggtgtaatgtgagggtgatttaggaatataagtccctaaagatttatggcactgatgcaaagcatatgctgataccattcttgttctttgagaagccacgacacccttggggttagtgagatctgagatcatcaggaatcatggggtagggggagacagtagccactgctagagatctgggtgcctcgatgactgaggaaggttttaagcctgagtccagggcatcatgtgcatattggaaatatcgccgtgattagatggtggggagcagctaggaggttctagaaagccactgcagagtcctgccagctgagaggtgactacagtcaggtcagggaggctctgcttaggtgaggggtctgcagagtcagagggagtcatcagaggtgctcctggttgtgtgtacctgaatggtcacagggccccgagggaaggaacaggttttgggacttctgcagaggtgtttgggcaccttggagacgctggggtagataagaaggcagctggaacacagtggtctgggctccagaaggggactggtgattcacatgtccatgggtgagaacctcacttgctggttagattttacagagttttgtgctttcagttgtgctgtactgcgagatatgtggaggtacttgcctactgttcagggaactgctcacttgggcagcatgcccccgtgctgggcacctgagaccccaagtacgaggagttgcacttggcaagcagagtagcaggactcagctgcagtgcaagtctcttttcggggagggagagctctgtctcctccagtcgggggagagagagaggcctgagcacagagcgggacctccaagttcttctcacctggggcttcctgggtggcactagtggtaaagaacctgcctgccaaggcaggagacaagagacttgggtttgatccttggatcaggaagatcctctggaggtgggcatggcaatccactccagtattcttgcctggagaaacccatggacggaggagcctggcaggtcacagcccatggggtcacagagtctgacaccgctggagcaacttgacacgtgcataccaaattctcaaggctcagaggaagacagctcttttgtctgaactaagagttgagaattatgttttattcagggggttttctgaggactcatgccccagaagacagtctttcagatatctctgagggattgctttgaagaagtaagagagtagccaagatatataggaatttttgccgcagaaaccaggtagtcggaacatcaaaagattaattgaaaggaaccagatatcccaaggaatttagtgcttttctcttttggagaagatgctagcgtctgggcccactgaaatcactcctttgatatgcacctcagctctctggggcctgcatcccacctgcttcctctacccggaacctcctcagggtgtagtcggcagtggctgcaggggctgttggattcattgtcatagcgtcctttgtttactgatacagtaggcaatattctttgtccccactttaaaaagagaacttagagggcttccctggtgggccagtggttaagaatccaccttgcaactcagggacactggtttgatccctcctctgggaagatcccacctgtctcagggcagctcagctgctgtgccacacctgctgagcctgtgctctagagcctgtgctccacagcaggagaagccacctcaatgagaagccctcacaccatgactagagaatagcctccactcgctacaactagagaaagcccatgcacagccacaaagacccagtgcagccaaaaataactaaagatagaaaattaaaaagagagaacataaaagggggcttttaacccagttcattcattgcaagagccatctgaagggattaaggatcagacttcgcagtcttggtcctggcctggagtgggataagggaaaaggcacctgcactgccgtcactgggaaaggcctgtctctgcgtacagggtaagccaattcctggtggcctctacaatcccagagtcgatgccggtaccttctctgggcttcatcacctagaaagactgcaccaaatgcagaagacccagtcacacccacagggatgcagctacctggacagttctacctcaggaaggaagctttggtcctgaatggttttgtggagagggacattgtataactgggtgtgttctcaggacttaaacattgtccataggaggaaggaactgcctgtggagtgatttctatttaataataaaattttcgcagcagctaatgtgcttttagtctgtcgtctgttttcattattgcattatgtcaaatgatgaaagaacaaggagaaaagtgttcttaaaatttacaaagaaacttttccacatgatgtgtattgctactgctggtttatgcactaccgtaaaagcaccaggctaggagaaggcaatggcaacccactccagtactcttgcctggagaatcccatggaccatctcaggtaggctgcagtccatggggtttcgaacagttggacatgactgagcgacttcactttcacttttcaccttcatgcattggagaaggcaatggcaacccactcctgtgttcttgcctggagaattccagggacgggggaacctggtgggctaccgtctatggggtcacacagagctggacacgactgaagcgacttagcagcagcagaagcagcattgtattaagtcattcactttattcaattggcctgtctgtgcagaagaggggaccatatcccaaagacaactataatagcaccataatatgcacagtgtaccaaggaggtgcttgtttaggtgtagtcttgctgggttgaaggctactcagggcaggttcctaggacttgccactcttccacttcctgtccctatgtctctgctggctcattggcaccaaacctagaatgcaaagaaattctatcatgcccagaaaatcctagacaaattcttctctcagggccatcacggaagggctgtggttgtctggccccagctggagcataaacacaactctgttaatccccttttcttttttgtttttgattcttttttcccctctattttttaattggagggtaattgctttacaatattgtgttggcctctgccatacattaacatgaatcagccgcaggtatatatatgtcccctccctccttaaaccctctgctatttcccaccccatcccacccctctagtttgtcatagagcactggttgtgtcacacagcaaattcccacttgcaatctattttatatatggtaagtggtgctagtggtaaggaatctgcctgccagtgcaggagatgtaagagacacaggttcgatccctgggtcagaaagatctcctggaggagggcatggcaacccactccagtatccttgcctggagaatcctatgagcagaggagcctggcaggctactgtccatagggttgcacagagttggacacgaccgaagtaacttagcacgcaaagtatatgcttctgtgctgctctttgaatttgtccctccctctccttctcccactgtgtccgcaagtctgttctctatgtttgcatctccactcttcccctgcagatacgttcgtcagtaccattttgtctagattccatatgaatgcattaacatacaatatttttcttcctctttctgacttacttcactctgtataatagacaagattcatccacctcattaggactgactcaaatgtgttcttttcttttctgtagctgagtaatattccattttatatatgtaccacagctactgtatccattaatctgtcaagggacatctaggttgcttctatttcctatctattgtaaaaagtgctgcaatgaacagtggggtacaggtgtctctttcaattatggctttctcagggtaaatacctagtagtggcatttgggtcatatgatagttctattcccagttttttttttttttttaaagaatctctatactgttctccatagtggctgtatcaatttacattcccaccaacagtacaagagggttcccttttctccacattctctccagcatttattgtttataggctttttaatgatggccattctaactggtgtgaggtgatacctctttgtagttttggtttgcatttctctaatgatgagtgatgttgagcatcatgtgtttgttggctatctgtatgtcttctttggagaaatgtctgtttgggtctttcatccattttttgattgggttgtttgtttttctgcttttgagctgcatgaaatgtttgtttgcagttgtcttctctgattctgagggttgtcttttaaccttgtttagtctctcatgcattggagaaggaaacggcaacccactccagtgttcttgcctggagaatcccagggacggcggagcctggtgggctgccatctatggggtcacaccgagtcgggcacgactgaagtgacttagcagcagcagcagtgtttcttttgctgtgcaaaatcttttaaggttaattaagtcccatctgtttacttttgtttttatttccattactctaggaagtaggtcaaagacgatcttgctgtgatgtatgtcaaagagaatatcacctatgtttttctctaagagctttatagcttctggccttacatttaaatctttaatccattttgagtttatttttgtgtgtggtgttaggaagtgttctagcttcgttcttttgcatgtagctgtccattttgtcccagcaccacttattgaagaggctatcttctccattgtattttcttgcctcctctgtcaagataaggtgcccatagatgcatgggtttatctctggactttctgtcttgttccattgatctatatttctgtttttgtgccaataccatactgtcttactgactgtagttttgtagtataatctgaagtcaggaaagttgattcctccaactcctatcttctttttcaagattacttggctatttgtgatcttttgtgttttcatacaaattgtgaaattttttgttctagtgctgtgaaaaataacattggtagtttgattgttgttgttcactcattcagtcatatcagactcattgcagccccttagactgcagtacagcaggcttccctgtccttcacaatctcccagagtttgctcaaactcatgtccattgaatcggggatgccatccaagcatctcactttctgtcatccctttctcttactgacctcaatctttcccagcatcagggtcttttccagtgagtcagctcttcacatcaggtggccaaagtattggagtttcagtttcagcatcagtccttccgatgaatattcaaggttgatttcctttagtatttactggtttgatttccttgtagtccaagggactcacaagagtcttctccagagccacaggtcaaaagcatcaatcctttggcgttcaacctttttttatgatccaactctcacatccatacaaaatgactactggaaaaaatcattgctttgactacaaggacttttgttggcaaagtgatgtctctgctttttaaaacgctgtctaggtttgtcatagcttttcttccaaggagcaggtgtcttttaatttcatggctacacccaccatctgcagtacttttgtagcccaagaaaataaagtctgttacagtatccatttcccccccatctatttgccatgatttcctaaaggaaatcagtcttgaatattcattggaaggactgttgttgaagctgaaactccaatactttggccacctgatgcaaagagctgactcatttgaaaagaccctgatgctgggaaagattgaaggcaggaggagaaggggatgacagaggatgagatggttggatggcattgccgactcaatggacatgagttcgagtaaactctgggagttggtgatggacagggaggcctggcatgctgcagtccatggagtcgcaaagagtcagacacgactgagtgactgaactgaactgaactaatttgccatgaagtgatgggactggatgccgtgatctcagttttttgatgttgagttttaagccagcttttttgctcttctctttcaccttcatcaggaggctctttagttcctctttgctttctgctatttgggtagtatcatctgcatatctgagatgattgaatttttcctgaaatcttgattccagcttgtgcttcattcggcctggcatttcacatgatgtactcagcatataaacaaataagcagggtgacagtgtacaaccttgacatactcctttcccaattttgaaacagtctgttgttccatatctggttctaactgttgcttcttgacctgcatccaggtttctcaggaggcaggtagtttgatagggatcgcattgaatctgtaggttactttgggtagtgtagccactccagcactcttgcctggaaaatcccatggacggaggagcctggtgggctgcagtccacggggtcgttaagagtcggatacgactgagcgacttccctttcacttttcactttcctgcattggagaaggaaatggcaacccactccagtgttcttgcctggagaaccccagggacgggggagcctggtgggctgccgtctgtggggccgcacagagtcggacatgacttaagtgacttagcagcagcagcagcagtcactttccaatattgattcttccaatccaagaacatggtatagctctccatctgtttgtatcatctttgatttccttcatcagtgtcttatagttttctgcatacaggtcttttgcatctttaggtaggtttatccctaggtattttattctttttgttgcaatggcaaatgggattgtttccttaacttttttttctgatttttttccaaactatgttgaataacagtggtgagagtgggcacctcttgttttgtccctcatcttagaggaaatgcttttggttcttcgccattgagaatgatgttttctgtgggtttgttgtatatggtgtttattatgttgaggtagttttcttccatgcctactttctggagagttttttttatcataaatgggtgtttaatttgttgaaaactttttctgcgtctgtagagatgatcatatggtttatatctttcagtttgttgatatgctgtatcacaatgattgatttgcataaattgaataatccttgcatccctcagataaatcccacttattgatcctcctttcttaatgccttcattgttgagcttcctctcaggcctggaacagtgaacaacagctgctggaccaggtcagaaaagacacaggggtagaacccactgccctccgagcagggcatgcccagtcatctcaccctgtgcactgtcccctggccgcccttgtacccagtgttgtcaactgatgggtccctcccatcagcctctggcacatcctctgggcaccgcaactaggctagtgggaaggagtcagagccagagggcagaacagatagcatagatggatgtatttaaggccaggtgtgactatgacattccactgtgtctgaaatgtcagccatgaccatcatttttttttttctttcctaaattggtggcaacttggttattttggtgtggaaatctgactgactggagggttcctgctccagatggtcagagtgccagggatggcacctctcctgctgactgcaggtttctgtcccagcccaagcttaccctcatattttgatcaggccctcttctgtggagttctcagggtgagcactagacatctttcagtagatctgttgcatggggttcagtgggatgagaccagactgaggctttgggttcagtggaagttcagccaggggcaggggtgctggagagtgttcccagtggacatgctgtgggctggggttctccagtcacgtgtgagaagtgcaagcaggaggatttgggatatgtttagaggaacaggatgaggaacataagagaaagagagggacgtctgggtgagcagagccttcagtcaccctgagaaaatgggctgagcaagaacagagtcactgggcagtgatgagcagggacgcagaggaggctgtggtgggagcctgaactcagggtaggttggaatgggagataaacatcttcagagtggcctgtgtctaaagccctgagactgagatctagggagggagggctcaagacaaaggctgggaagaggggaaggagtcagcaaaggagaatgagaagaagaaccagagggccagaagaagaacttgtgggaccagaaggaaaggtgcttgcacagtaggatgctgagaaccccagagagggacagagttgagagtttaccagtgaacttggcaaggttgtttttcatcaaactggggggatataagcttgggtgaagtgggttcaataaaggagaagtgaatatagtcttgagaagttgtgctatacagaacaggagaggaattgggcagtggctgaatgactctgggaagacagggagattcaattttttattttgaggcaattgtatatatacatgcaattgaaagaaataatagtgagatgccctgaaccctttacaaagtttcctccagtggcaaacctcatgcaaaactatagtacaacatgactgccaggatgtccaagatacagggcatcccatcaccaaagggccatcgtgttgcccttttacaacacttacattccatccaccccaccccacacttaaccagggggaaacagctaagctgttcccatttctataattttgtcatttcagtaatgttttacacacagaatcatatgatatgtaaccttttgtgaatagcttatctctgtgaaagtgcattcatgcaagttgttgcatgtttcaatagcttgtgagtataaatgttccatgataatatcatttgtttaaccactcacatgctttttctttcagttcttttttcaacttcattaaagtataattaacaaatagacaagtattatatatacttaaggcagaaaatgatgttttctttccttttttcctttccatttctttcctttttttcccagaaaatgtcatttattgttattaataatgtttttctttcttttatttattataattgacttatactatatttagtccaggtataaaacatagtgattcaatattttggtagattataccgatataaagttattctaaaatattggctatatcccctgtgctgtaaattatatacttgtattatagttatattttttaaattacaaaatttatgattttacacatttacaggagacttggaaaacacataacaaagttaaatatagttctattatatattaaaattatttttaaagtagataaattaagatttttagtttgagtttcaatgtcaaacattcaaaagttaatagaatgattatacagagaagcagaaggatatggtagacctgaaaaacaccatgagccaattcaacataattaagatttatacagttttcacacaacaataggatacaaattctacccaagttcccatagactattaactaggagacactggaatagatccagggacataaaacaaggtggaagaatttcatggtctaaaagtattgaagtcatacagagtctgttctcttttaattgtggaattatgttagaaatcaatgtcaaactatatttgaaaatagctcacatattttgaagtacaatgtgacatttaccaagagagatctttgacttagccattaaaagcctcaataaagttagaaggctgaaaaatcacagagagtggttgcagagaataaagttaaatttaaatgagaaattaatatacaagataactttaaaaaactacgtatttggaaattaaatgttcgcctttaaatgatggttatatctaagaagccatgacaagaaaaattagaaaatacttgtgatagaataaacatgaagagaatttaccagaatttgttgcgtgcagcttaagctgctcagtgcagttaaataaggtgtgaaaataaataatagacactagcacaaacttgtgagaaatttgaatgaaatctgcactttagttaataatactgtatcacatattaatttcttattgtttttaataacatagtatatctttatattctcagaattgaattaggattttcaagactcattcaaaaatttttttaatcactaaaataatctttctagactttagcagtaacactagatgtcagaataaatggaactatatcaaagttttgactgaatgtaaattagaaacataatgtaaattagaaacatagctttctagtcaaacaagtggaactaaaatgttataaatttgtttggctaggcaaaaattcataagtttttcaaaatatatattttatattatatttactatttatacatgactcccctggtggctcaggggtaaacagcctgcctgcattgcaggagcctcaggagatgcgggtttgatccctgggtcagaaagatcccctggaggagaaaatggcaatccactctactattcttgcctggagaattccgtggacaggggagcctgatgggccacagtccatggcatcgcaaagaggcggacatgactgagcgactttcacttactatttatatatgtatacataaaactttttctactatattgataaaggcttgaaaagaacagcaaaagagacatcctgtggctgggtaattattagctcccaacctaaagaaaaaccagttctagggcaagatacattgttgcacaagacttaaggaaagcatgagtgagaatagtcagttcaattcagttcagtcactcatttgtgtccgactctttgtgaccccatgaaccacagtacaccaggcctccctgtccatgaccaacccccaaagtccatccaaacccatgtccattgagtcagtgatgccatccaaccatctcatcctctgtcgtccccttctccttctgccctcaatctttcccagcatcagggtcttttccaatgagttagctcttcgcatcaggtagccaaagtattggagtttcagcttcaacatcagttcttccaatgaacacccaggactgatttcctttaggatggactggttggatctccttgcagtccaagggactcttaagagtcttcgccaacaccacagtccaaaagcatcaattcttcggcattcagctttcttcacagtccaactctcacatccatacatgaccactgcaaaatccatagccttagatggacctttgttggcaaagtaatgtctcagctttttaatacgctgtctaggttggtggtaactttccttccaagaagtaagcgtcttttagtttcatggctgcagtcaccatctgcagtgattttggagcccaaaagaataaagtcagccactgtttccactgtttccccatctatttgccatgaagtgatgggaccagatgccatgatcttcgttttctgaatgttgagctttaagacaactttttcactctcctctttcactttcatcaagaggctctttagttcttcactttctgccataagggtggtgtcatctgcatatctgagtttactgatacttctcccagcaatcttgattccagcttctgcttcctccagcccagcgtttctcatgatgtgctctgcatataagttaaataagcagggtgacaatatagagccttgatgtactccttttcctaattggaaccagtctgttgttccatgtccagttctaactgttgcttcctgacctgcatacagatttctcaagaggcaggttaggtggtctggtattcccgtctctttcagaattttccacagtttattgtgatccacacaaaggctttggcatagtcaataaaacagaaatagatgtttttctggaactctcttgccttttccatgatccagcagatgttggcaatttgatctctggttcctctgccttttctaaaaccagcttgaacatctggaagttcatggttcacgtattgctgaagcctggcttagagaattttgagtatgactttactagcatgtgagatgagtgcaattgtgtggtagtttgagcattctttggcattgcctttctttgggattggaatgaaaactgaccttttctagtcctgtggccactgctgagttttccaaatttgctgacatattgagtgcagcactttcacagcatcctcttccaggatttggaatagctccactggaattccatcacctccactagctttgcttgtagtgatgcttcctaaggcccacttgacttcacattctaagatgtctggctctaggtgagtgatcacaccatcgtgattatctgagtcatgaaaatcttttttgtacagttcttctgtgtattcttgtcacctcttaatatcttctatttctgttaggtccataccatttctgtcctttatcgagcccatctttgcatgaaatgttcccttggtatctctgatattcttgaagagatctctagtctttcccattctattgttttcctccatttctttgcattgatcactgaggaagtctttcatatctctccttgctagtctttggaactctgcattcaaatgggtataatctttccttgtcagcaaatttgcttttcacttaccttctattcacagctatttgtaaggcctcttcagaaagccattttgcttttttgcatttctttttcttgggcatggtcttgattcttgtctcctgtacagtgtcacgaacctccatacttagttcatccggcactctgtctgtcagatctagtcccttaaatctatttctcacttccactgaatagtcataagggatttgatttaggtcttacctgaatggtgtagtggtttttccactttcttctatttcagtctgaatttggtagtaagaagttcatgataggcaccacagtcagctcctggtcttgtttttgctgactgtatagagcttctccatctttggctgcaaagaatataatcaatcagtctgatttcggtgttgaccatctggtgatgtccatgtgtagagtcttctcttgtgttgttggaagagggtgtttgctatgaccagtgcattctcttggcagaactctattagtctttgccctgcttcattctgtactccagtgccaattttgcctgttactccaggtgttgtttgacttcctacttttgtattccagtcccctataatgaaaagaacatctgttttgggtgttctataagatcttgtaggtcttcatagaactgttctacttcagcttctctagcattactggacggggcatagacttgaattaccatgatattgaatggtttgccttggaaatgaacagagatcattctgtcattttttagattgcatccaagcactacatttcagactcttttgttgactatgatggctactccatttcttctaagggattcctgcccacagtagtagatgtaatggtaatctgaattaaatttacccattccagtccatcttagttctttgattcatagaatgttgatgttctctcttgccatctcctgcttgaccacttccaatttgccttgatcaatggaactaacattccaggttcctatgcaatattgctctttacagcattggaccttgcttctatcagcagtcacatgcacaactgggtgttatttttgctttggctgcatcccttcattctttctggagttatttctccactgatcaccagtagcatattgggcacctactgacctggggagttcctctttcagtatcctatcattttgacttttgatactgttcatggggttctcaaggcaggaaaactgaagtggtttgccattcccttctccagtggaccacattctgtcagacctctccaccatgaccctcccgtcttgggttgccccgtgggcatggcttagtttcattgagttagacaacgctgtggtcctagtgtgattagattgactagttttctgtgagtatggtttcagtgtgtctgccctctgatgccctcttgcaacacctaccatcttacttgggtttctcttaccttggacgtggggtatctcttcatggctgctccagcaaagtgcagctgctgcccctgaccttggacgtggggtagctcctctcagccgtgcttctgcgctgtccgtcgcagccgccacgcttctacggagaaggagaatgtttacctcctgtttaaatggccctggattccctacctaaattaactctctcacttccaacattcttctgttgatgattattcaacagctagtttcaattttgatgttctcacaggagtagatgagcacgtgccctttattttgccatcttgatttgatcctgtcttagttattttatagcttgtagtttatacctcctatccctcttcctcatcttgctcctccccccatacctctccttactgataactacaagtttgttctttgtatctgtgagtctgtttctattttgttatgtcatttgctgtaatttttagattctacataaaagtaaaatattacagtgtttgtctttctctgtctgacttattttactaagcgtaatacctttcaggtcatcatccatattgttgtaagtagcaatatttcattctttttttttaaaggctaatattccattacatatatgtaatatatatattattatgtataatgtaatatatattatatacagatatatatatgtgtgtgtatattatatatatatgtatatatgctggagagggtgtgaagagaagaaaactctcatacactgttgatgggaattgatacagccactatgagaaccatatagaagctccttaaaaacctaaaaattctatatgagcctgcaatcccattcctgggcatatatccagacaaaaacatgatccagtaggatacacgcaccctgatgttcattgcaacactgtttacaatagccaggatagggaagcaacctaaatgtccattgatggaggaatggataaagaagacgtagtgcatatatatgatggaatattactcagtcattaaaaaggatgaaataaggccatttccagcaacatggatggacctagagattgtcatactgagtgaagtaggacagcagagaaacagaaacattgtatgacatcccttatatgcagaatctaaaaaaacatgaaacaaatgaacttatttacaaaatagaaacatacttagagaaagactttatggttgccaagggaaagggatagttagggagtttgagatgaacaggtacacactgctatagttaaaatggataaccaacaaggacctattatatagaatggaagctctgctcagtgttacatggcagctgaatgggaggggagtttgggagagaatggatacatgtatatgtatagctgagtccctttgctgtctatctgaaactatcagaacattattaattagctatactcctatataaaagaaaaagtttaataaaagtcttggattagcaaaaaataaatcaggttttttgttttgatgttgagttgtatgagttctgtatgtgttttaccagatgtatcatttgcaaatatctttttccattcagtaggtttcctttttgtttgttgatagatttcttcactgtgcaaaaacgttttagtttgacatagtcccatttgttgattttacttttgttttctttccctgaagaggcaaatttaaaaaaaatgctaaaactgatggcaagcagcatactgccaatgtattttttttaaaagaagttttatgatatcaggtcttaagtttggtctttaatccattttgagtttatttctgtgtatggtgtgagaaaatgttctaagttaattttttacatgtaattgtccagttttcccagcaccaattattgaggagattgtcttttcttcattatatattcttgtcttctttctcatagactatttgaccataagtgcatgagttttttttctgacctctctgttctgtcccattgatctatatgtctgtttttttttttttttttggccagaccatactgttttgattactgtagctgtgtagtataggctgatgtcagggagcctgatacttccagctttgttcatttatctccaaattgcttttgctattcagggacttttatggtttcatacacattttgttataagattattttttataattttgtgagaaatgtcatgtgtggtttgatagggattgccttaaatctttagattgctagggattgtgttaaatctatggattgctttgggtagtatggacatgttaacagcattaattctttcaatccattctttcaatccatgaacatgggctatatttccatttatttgtatcatcttcagttacttttatcagtgtttcatagttttcagtatataagtcttttattatcttggttaagtttattcctaggtatcttattctttttgatgagattttaagtgatttattttcttgatttctttttctaataaaataataaatgtatcatgctcagtcctgtctaaatctttgcaaccccatggactatactgtagagtaagggagttagaggaggtgaggttcggaaaaagaacaagaccagcgctttacaggaacagatcacctttaatgaggcgagaaggggcagcagtcaggttagtgagctgctgcactaacccaagaaaagattaagtatatataggcatatatgtggaaatctactgtcttaagggagcctgttattctctaagattgttcgggttatctcttaaatggctggggcaaggaattctggagattggccagagggtgggactggctgggagctgggcataaccaaccttaatgtccttttttttttccttctggtgagagagtactttgttttgcatagaatggtggggaggacccagagaggagttttaactccaggctattttgagccatgtaactttccttcatatacagttcagttcagttcagttcatttcagtcgctcagtcgtgtccgactctttgtgaccccatgaatcgcagcacaccaggcctccctgttcatcaccatctcccggagttcacccacactcatgtccatcgagtccgtgatgccatccagccatctcatcctcggtcgtccccttctcctcctgcccccaatcccttccagcatcagagtcttttccaatgagtcaactcttcgcatgaggtggccaaagtactggagtttcagcttcagcatcattccttccaaagaaatcccagggttgatctccttcagaatggactggttggatctccttgcagtccaagggactctcaagagtcttctccaacaccacagttcaaaagcatcaattctttggcgctcagctttcttcacagtccaactctcacatccatacatgaccacaggaaaaaccatagccttgactagacggaccttagttggcaaagtaatgtctctgcttttgaatatgctatctaggttggtcataacttttcttccaaggagtaagcgtcttttaatttcatggctgcaatcaccatctgaagttatattggagccccccaaaataaagttagccactgtttctactgtttccgcgtctctttcccatgaaatgatgggaccggatgccatgatcttcgttttctgaatgttgagctttaagccaactttttcactctcctctttcactttcatcaagaggctttttagttcctcttcactttctgccataatggtggtgtcatctgcatatctgaggttattgatacttctcccggcaatcttgattccagcttgtgtttcttccagtccagccgtttctcatgatgtaacctgcatataagttaaataagcagggtgacaatatacagccttgacgtactccttttcctatttggaaccagtctgttgttccatgtccagttctaatgttgcttcctgacctgcatacaaatttctcaagaggcaggttaggtggtctggtattcccatctctttcagaattttccacagtttaatttctttaggtagatatattcctaagtatttcattctttttgttgcaatggtgaatggaattgattccttaatttctttttctactttctcattattactgtataggaatgcaagggatttctgtgtgttgattttatatcctgcgactttactatattcattgattagctctagtaattttctggtggagtctttagggttttcatgtcatctgcaaacagtgagttttacttcttgttttccaatttggattccttttatttctttttctgctctgattgctgtggccaaaacttccagaactatgttgaatagtagtagtgagactgggcacccttgtcttgttcttgactttaggggaaatgctttcaatttttcaccattgacgataatgtttgctgtaggtttgtcatatatagcttttattatgttgaggtatgttccttctattcctgcattctggagagtttttatcataaatggatgttgaattttgtcaaaggctttctctgcatctattgagataatcatatggcttttatttttcaatttgttaatgtggtgagtaacattgattgatttgcggatattgaagaatccttgcatccctgggataaagcccacttgggcatggtgtatgatctttttaatgtgttgttggattctgattgctagaattttgttaaggattttttcatctatgttcatccgtgatattggcctgtagttttctttttctgtggcatctttgtcaggttttggtattagggtgatggtggcctcatagaatgagtttggaagtttaccttcctctgcagttttccggaagagtttgagtaggataggtgttagctcttctctaactttttggtagaattcagctgtgaagccgtctgggcctgggcttttgtttgctggaagatttctgattacagtttcaatttccgtgcttgtgatgggtctggtaagactttctattccttcctggttcagttttggaaagttgtacttttctaagaatttgtccatttcgtccacgttgtccattttattggcatataatggctgatagtagtctcttatgatcctttgtatctgtgttgtctgttgtgatctctccattttcatttctaattttattgatttgatttttctccctttgtttcttgataaactggctaatggtttgtcaatttcatttatcctttcaaagaaccagcttttggctttgttgatttttgctatggcctcctttgtttcttttgcatttatttttgccctaatttttaagatttctttccttctcctaaacctggggttcttcatttcttccttttctagttgctttaggtgtggagttaggttatttatttgactattttcttgtttcttgaggtatgcctgtattgctatgaactttccccttagcactgcttttacagtgtcccacaggttttgggttgttttgttttcattttcattcgtttctatgcatattttgatttcctctgtaatttgttggttattcagcagcgtgttgttttcagcctccatgtgttggaattgttagtagtttttctcctgtaattgtgatctaatcttactgcattgtggtcagaaaagatgcttggaatgattttcatattttttgaatttaccaaggctagatttatggcccaggatgtgatctatcctggagaaggttccgtgtgcacttgagaaaaaggtgaaattcattgttttggggtgaaatgtcctatagatgtgaattaggtctaactggtctattgtatcatttaaagtttgtgtttccttgttaattttctgtttcattgatctatccataggtgtgagtggggtattaaagtctcccactattattgtgttatcattaatttcctctttcatgcttgttagcatttgtcttacatattgtggtgctcctatgttgggtgcatatataattataattgttatgtcttcttgcattgatcctttgatcattatgtagtgtccttctttgtctcttttcacagcctttgttttaaaatctattttatctgatatgagtattgctactcctgcttccttttggtctctatctgcatggaaaatgttttctggcccctcactttcagtctgtgtgtatcccctgtttttacatgggtctcttgtagacaacatatacaggggtcttgtttctatatccatccagctcagttcagttcagtcgctcagtcatgtctgactctttgcgaccccatgaatcccagcacgccaggcctccctgtccatcaccatctcccagagttcactcagactcacgtccattgagtccatgatgccatccagccatctcatcctcggtcgtccccttctcctcctgcccccaatccctcccagcatcagagtcttttccaatgaatcaactcttcgcatgaagtggccaaagtactggagcttcagctgtagcatcattccttccaaagaaatcccagggttgatcttcagaatggactggttggatctccttgcagtccaagggactctcaagagtcttctccaacaccaatcagccagtctttatcttttggttggggcattcaacccatttacttttaaggtaattattgataagtatgatcctgttaccatttactttattgttttacgtttgagtttatacaccctttttgtgtttcctgtccagagaatatcttttagcatttattggagagctggtttggtggtgctgaattctctcagcttttgcttgtctgtaaagcttttgatttctctttcatatttgaatgagatccttgctgggtacagtaatctgggctgtaggttattttctttcatcactgtaagtatgtcttgccattccctcctgacttgaagagtttctattgaaagatcagctgttatccttatgggaatccccttgtgtgttatttgttgtttttcccttgctgcttttaatatttgttctttgtgttttatctttgttaatttgattaatatgtgtcttggcgtgttttaccttgggtttatcctgtttgggactctctgggtttcttggacttgggtgattatttccttccccattttagggaatttttcaactattatctcttcaagtattttctcatggtctttctttttgtcttcttcttctaggactcctatgatttgaatgttcgggtgtttaacactgtcctggaggtctctgagattgtcctcatttcttttaattagtttttcttttctcctctctgattcatttatttataccattctatcttctaattcactaatactatcttctgcctctgttattctagtatttgttgccttcagagtgtttttgatctcatttattgcattattcattatctattgactcttttttatttcttctaggtccttgttaaacctttcttgcatcttctcaatccttgtctccaggctatttatctgtgattccatttgatttcaagattttgtatcattttcactatcattatttggaattctttttatcaggtagatttcctatctcttcctcttttgtttggtttggtgggcatttctcttgttcctttacctgctgggtattcctctgcctctttatcttgtttatatttctgagtttggggtgtcctttctgtattctggcagtttatggagctctctttattgtggagtttcctcactgtgggtggggttgtacaggtggcttgtcaaggtttcttggttagggaagcttgtgtaggtgttcttttgggtggagctggatttctcctctctggagtgcaatgaagtgtccagtaatgagttatgtgatgtcagtggttttggagtaactttgggcagcttgtatattggagctcagggctgtgttcctgtgttgctggagaattgacatggtatatgttgctccggaacttgttgggccttgggtgatgcttggttcagtgtaggtatggaggcatttgatgaactcctgtcaattaatgttccctggagacaggagttctctggtgttctcagggtttggacttaagcctcctgcttctggttttcaatcttatttttacagtagtttcaagacttctcctctatacagcaccattgataaaacatctaggttaaagatgaaaagtttctctacagtgagggacacccagagaggttcacagagttacatagagaaaagaagagggaggagagagtagagttgacctgagtgagatgaagtggtatcaatagatgagagagcaagctagccagtaatcacttccttatgtgcactccacagctggaccgctgagagatgttcatggagttatacagagaagagaagagggaggaaggagacagaggtggccaggaggataaaaagggggaatcaaaaggagagagacagatccggccagcaatcagttccctgtgttctccactgtctggaacacaacagaaattcacagagttagttagagaagagagggggtagggaggagacacaggctacctggtggagaaaaaggagagtgcaatgggggagagagcagtcaagccatcaatctcactcccaagtaaaaacggctactgaagactgggttcttaaacgtacaaaattgatagcaaataccagaaagcaaagattaaaaatctagagtagagtttggaattttaaaaatacagtattaatgaaaagaagaaaaaaaagaaagagcaaaaaagtcacaaatattataaaaaaatatacatatatatgaagtttgctttaaaaaataaggtttttttttttttgtaaagtaatagtaggttataaaagtgaaagttaaaggagtaagagaggacttaaaaattaaaaaaaaaagatcgtaaaaatagtaaaattatatctaggacgttctctggtgtttttgtgggtattgtggggtcagttcattttcggatagtttcttggtccaacttatatttctcaggatctataggctcttcctatgtagtcggtactaacgacagggttttaatctattgcacctgtcacttccaaggcaattccctctgttttagcttcttctgtttgctggtctcttcagtgtctgatttctgccctgacacaaagggggcggtggtggacacttatcttaggctcacttattcagtcgcgctgtggggagggagggacgctgcaaacaaataacactggtgtgtgctcgcagtgcctcagccacactgggcccgcccccgctcacagcatgtgtactctccctgcccacactgctcaggctctaggttgctccaccaggaaccgtccaaggccggccctgggctgcatgcacctccaaagtctaagccgctcaggttcaggcacttgggtagtccccagaggcgcagactcggttggacctgtgttttgtgcctttcccaggtctgagcagctcaggtgatgaggtgtttggcaagcgcggtcgctgtgacttatcgcctccgctgatcctgccgctcagttttctgtgtaaaaccggtgcaccttctcaggaggatgttgaccatccagaaccccaagaagtcttagttagcaaagaagcctgcttgcagttttgtagataatgtctctctggggctgcgactgccctcttccagctctggctgcctgtcactggaggggcatggtctgcagccgggtatctctgttcagtcctttgttctgtgcgtgggcctggcagtgtcttaggttagggctgggtttttgcatgatagttatcccacagtctggtttgctagcccaagttagttcactcagattgcactcggggcattcaggccagatccttactctaaacaatgcagcctgcgcctccctgcccagccccttctttctaatggggggtacaggtgtctgcgctgcttctccactgggggagttaccgttgggcttgtaatttgtggattttaattatttatttatttttcctccctgttatgttgccctctgtgcttccaaggctcagcagtgagagtgcttcctggtgtttggaaacttctttctttttaagattcccttcccaggatggagctctgtccctacctcttttgtcattttttttgacttttatatttttccctacctccttttgaagacaatgagctgcttttctggttgcctgatgtcctctgccagcattcagaagttgttttgtggaatttactcagcatttaaatgttcttttgacgaatttgtgggggagaaagtggtctccccgtcctattgctctgccattttagtaccgccctctctcattttagttttgatgttcatatctttaataatgtgcagggctgaacatgttatgtttgttggcgatttgtatgtcttctttggagagatgtctgtttaggtcatttgctcgttttttttttttttttttaaattgagttgcttgtgctacttgtatattttgcagattaatccctttgtaattgcctcatttgcaaacagtttctcccattctgagtgttgtctttttgtctcatttatggttttctttgctgtgcaagatgttttaagtttaattaggtcctatttgtttatttctatttttatttttattactctaggagagtgaagtgaaagtgctagtcactcagtcatatctgactttttgtggccccatgaactgtagcccaccaggatcctctgtccatgcctttctccaggcaagaatactggaatggatttccattccttctccaggagatcttcccaacccaggtattgaatccaggtctcctgcattgcaggcagattctttaccatctgagccagaatactgatggtatattactctagtagttaggtaacaatgatctttctgtggtttatgccaatgaatgttcttcctatgttttcctataagagtttttagtgtctgatcttacatttaggtctttattcgattttgaatctatttttgtgtctggtgttgtgtagtagtctaatttcattctttaacatgtagctgtcagttttcccagcaccatttattgaagccactgtttttttccattgtatagacttgtgcctggatccagccccggtggatccacggtgattcgaaggtggggggacggcgtcggcgtctttggaaaaatacatatttaattacagatatatagagagattagaaacggatagtgtagtaggagatagtgtagtggagaaaaggaggctgaatccagatgggaattcagccagagaaacgggagcaagaaagaagcaacatggtggaatcagtctttcccgaaactgatccgatttctttattttggggtttgcttatataccttttgttacatatagggatgaatacagagtcacgcgggggtcagcagtcctggcctttatcaatatcaggtgcttcacataaatgtaaaaaaaaaggtcttagggatattacatcatcttctggccatgagtgagacctgctgacattttatgatcctttctttctgataaccaaaaaaacttatttcttccaagggtgttttttcttaaaccaggcaccaccctccaaataaaattacattcctatagggtgagggtgtagtgagttacaatcaagaaaggaatttatttaacccaaggttaacatgattaatcttaaaggttaatgcttatttctcctatatgcttaaaggttaatacttatttctcctatatgttagttatattcattataagggcagggaatatgaagatttagcagcaaacatcagcccaacaaatgaaaatcctttcaccaatgttccccttaagatctatttagtcttaagatagtgataaagttacatttttacatagcaaggacacagtgatttataacaaagtacagtgatctattacaaaagagaaaattcattaactcaaaaagtctagtattgctaaccttaaaaactactatatttccttttctatattccaaatacgttgattaatatattcccaggtgcctaaggatatggaggcctggcggcaatcattgactcaacaagaagaaaaagccctatgctaattaagactctcaaaataactccaaaactctccatgctgtttatggttgagaagtagtaaacaatcatgtggtagtggcaggagtatggataatcctgtcacacaagctagtctgtcagcagagaggtttgacctgagacatccttgtcccacccaggggagggaattagcagcaattattgacacaacaaatgaaaaacccctcacaaatataattcctaaccaacccactatactaataattttgaactcccccaaagaatttgcctttagtaagtctaaaacatctcgtgcctctcaggttgggaggctgtaaacaatcacatgtggccggacgaacctatacagtgggctagataaacttcagaggagtccgtaagctgaaacagtcttgtcatgcccaggaatttttattgccttggagctgcatgtttactccttctccgagagaaatggttatgggggagagcataaaacagactctggttttggggtagatgctcgggaacagggggtttcctgaggcttgatcatgcctttgcatatgccaagcctccttcctcatgacctttgccatgggcggagctcctcacgctggcccctgcagacttgcccttttttttgtcatggattaaggggccataagtgtgtgggtttatctttgggctttctgtcctgtcccattgatctgtatttctgcttttgtgccatttccatactctcttgatatttgtagattcctttgggtagtattactattttcacaatattgattcttccaatccaaaaacatgtttttgtcatcttagatttctttcatccgtgtcttatagttttctgactacaagtgttttatctcctttgataggtttatttatagatactttattccttttgatatgatggtaaacgggctcatttcattaattttttatgatctttcatttttactgtataggaattgaggagatgtctacgcattacttttgtatcatgcaaccttagattcattgattgtatctagtagttttctggtgttatctttatgatttcctatgtatagtatcatataatctgcaaatagtgacagattacatcttctttttccagtttggattccattttatttttttattttctgatggctatggctaggacttctaaaactattgttgaatagtagtggtgagagtggtcatacttgttttaccccttatcttattgggaatgctatcagtttttcaccactgaaaaagatgttttctgtggatttgtcatatatgacccttattatattgaggtagattcttcctatacccactttctggagttttatatatatatatacacacacatacataaaacaaatgagttgaattttgtcaaaagctttttctgcatctattcagattatcacatggtttttattcttcagtttgttactgtggtgtatctcattgattgatttacatatattgaagaatccttgtattcttggaataaatcccattttgtcttggtgtatgaccctttcagtgtgttgttggattctgtttgctagtattttgttgagactttttgcatctatgttcattagtgaaattgacttgtaattttcttttttgtgatatctttgtctagttttgttaacttggtgatggtggccttgtaaaatgagcttgacagtattccttcctctgcaatttttttgaagagttagagaaggatgagtgttagctcttctctaaatgttacagaatttgcctgcaaagccatcatgtcctggtctttcattttttggaagatttttcatcatagttttgatttcattacttgtggttaatatgttcatattttctatttcctttggttcagtcttggaaggttgtacttttctaagaatttgtccattttttctaggtatccatcttattggcatatagttgcttatagtagtcttaaatgatactttgtatttctgtggagtcagttgtaatttctcctttttcatttctaattttattgatttgaatattctccttttttcttgatgagtctggttaaaggtttatcaatattgtttttgttcccacagaaccagctttttgtttcactgattttagttattgttttcttcatttctatttcatttatttttctctgatatttatgatatatttccttctactaactttgggttttgcttgttcttctttctctagttgctttatgtataaggctaaattgtttatttgagattttccttgtttcttgaggtaggattacattgtcacaaacttctctcttaagactgcttttgttgcatcccaaacgcagagctggaggaagcacagactggaattgagatttccaggagatatatcaataacctcagatatgcagaggacaccaccattatggcagagagtgaagaagaactaaagggcctcttgataaaagtgaaagaggagagtaaaaaagttgatttaaagctcaacattcagaaaactaagatcatggcatccggtcccatcacttcatggcaaatagatggggaaacagtggaaacagtggctgactttaattttggggggctcaaaaattactgcatatggagactgcagccatgaaattaaaagatgcttacctcttggaaggaaagttatgaccaacctagacagcatattaaaaagtagagacatcactttgtcaacaaaggtccatctagtcaaggctatggtttttccagtagtcatgtatggatgtgagagttggactgtaaagaaagctgagagctggagaattgatgcttttgaactgtggtgttggagaagactcttgagagtcccttggactgcaaggagatccaaccagtccatcctaaaggagatcagtcctgggtgttcattggaaggactgatgttgaggctgaaactccaaaactttggccacctgatgtgaagagctgactcctttgaaaagaccctgatgctgggaaagattgagggcaggaggagaaggggagaatagatgagatggttggatggcatcactgactcaatggacatgggtttgggtggactcaaggagttggtgatggacagggaggcctggtgtgctgcggttcatggggctgaaagagtcggacacgactgactgactgaactggtaggtttggggccgtgatgttttcactatcatgtttttgatagatttttaaaatttcttgtttgatttctttagtgatctcttggttacttaatagcatgttatttagcttccatgttttaaaaaataattttttttcctttaattgatttctaatctcatagcattgttgttggaaaaggtggttgatatgatttcagttttcttaaatttgccattgcttgatttgtggcccaagctgtgatctatcctggagaatgttccatgtgctcttgggaagaaaatgtattttgctgctttctggtggaatgtcctataaatatcaactaggtctatctggtctagaatgtcatttaaacctgtatttccttatttattttctgtctggatgatctatccattggtataaatggggtgttacagcccctcagtattatcatgttactgttaatttccccttttatagctattatcatttgccttatgtattaaggtgctcttatgttgggtgcataaatatttgtaattgttatatcttcttattggtttgatcccttgatcattactctcttttaatggtttttattttaaagtctcatttatttgatatcagtattactactccagttttcttttgatttccacagaatctttttctatcccctcactttcagtttgtatatgtctttgggtttcaagtgagtttcttgcagaaaacatatatgtgggccttgtttttgtgtacattaagccagtctgtgtcttttggttggaacatttaatccatttgcatttaaggtaattttgtttttcattttatttattgtgttgtttatcactgtttgctctttagtttttctaggtccttgttaaaatttcttgtattttctgcatctgtgcctccattctatttctgatattttggatcatctatactatcattattctgaatattttttcagataggttgcctatcgtctcctcacttattttattttgtaggtgttttaccttgctcttttttatgtaacatagtttttgctgtctcatttttcttgatggatgaggctgtgcttctgtcttgcaggttgttttgtctgaagtgtccagaactggactttgcaagcaggtgggtggaggcaggtcttggtgcctacatgaggatctccaggggacctcacactgataaatattcactggcacatgaagttctctgttagtccaacagcttgtacttggtgattcctccatagaactataggcctgacccctggcatggttaccaagagaactattcccagaagtttaattttgagtgggaattggttttcatccagatttactggggaatggcctcctgttctctactccttgtgtagacatctctgtatggccaaaaaaggaactttagaatggaatacatatcaagaacacctttctgctgttctaactcttatctatttccattttatgtgatattttcctcttctgagtttgtactctatttcctgtgccagtatttttaccaagagaccaggagcaaaaacatgtgagttcgactttagtagctttgaacctctggtgctgctttttttttttttcatttgcaagcccctccaatattaggaggtgaggtgatatccgtaaactctagactcttactacacagcaatttggcttcttaatggcaggaaattgtgattccctgtctctcttgcttcctcttcccctctaactacttctgcttctgtgactccttttttcttatttcattgagtctttcccaggcactggaacttaatcagtaggtcatttctaatttatggaccttgtttttcctctttctatttccctccttccctaccacatattttctcataatctatatcctgtgcttcctcactggtttcaggtatcttgctctgtcaatagtaatgatagcagctctcttctctggctttgccctgtgtattgtccttctgccaagaccatttgtgttaggccagagaaaggataggtggggtgcctacctttttctcgaaacagtttcagttttacaagttgtctgacagctttatatacagtatgttttaggataacaaatatacttctcttttttatttaggattttaacaaaatagggtttgattctggtgagcaagtttgtgtgtgtatgtgagcatttatgtgtatgtatacctatacaaatctacattatatatacaatttttatactaccatttaaaataaaaggatgtttcttaataaaatgtcaaactcttgccattaaaaaaatttcctggtacctcctcttgtcaatgtccttgcccctgtggtgagctgcagtctacccacaccttcccagtagtagaaactactctaagtagtttctgagcccactgtgtgagaccaacctcttgtgtgttcctctcaccagtgtctgttcctggagctggtccagatcacacatgtccatggagaccagcagggcataagccttcaaaaacatacccacagaggctggtgcaggtggaggaagacttggagggggatggccttcggcccaactggacccttggctagaggagccccttctggagtggcacttgggctgccaggacccacgaggccagaggaagctttacaggacccacatggctggaagaagccttgtcagcctttatttcttcaaatactttttcagctacatagtatttctcatttccttctggaattttgattacatgaagattataccttttgtcatagacccacaggtctgagggtctgtcaaaatttttttttctgttgtttgtattagataatttctattgttctaactcccagttcagttgttcttttctctttcctccactttgctcttgaacccatatactgaattttaaaattttgctattgtgctttttagttccatttggcttttctttgttgaggttttctatttctttgctgagattttctattttttcatttgttccaattgtgtctgttattgccttttgaaacattttcattttgcattttggttgtcttaaaaatctttgtcagataatttcaacatccctatcatcttggttcagttcagttcagttgcttaattgtgtccgactctttaggaccccatggactgcagcacaccaggtgtccctgttcatcatcttggtattatcatctattttctttcaagttgatattttcttggttgtcaccgtgacaggtgattttgacagaaacttgctcattttgagtattatgaagctccaattcctatttaaaccttctgtttagctggtttcctttgatatcacttcagcagaagggctggcactgcctcattcctgccaggtaagattagaaatccaagttccccagttagcctgccttgatatcaagctagggaaggatttcctgctatttctggatggtggtgtgggagctccctactgagcccctgctgataccttcttagctgggagggattaggccacctcattattgctccacatgtggcctccagggacacagttgtgaggtggcctcgttattgcagtggtgaaagttctgactctccacttggcctcctctcacactgcaataacaagggcaaagagtttcccttattgcaaggtgggactcaagttcaggttccccattcatggtctccacctacatgaggaggcatgtatatggaagaggttggacttcctagtacccaggacagatgaatgttccatctccctatgtgctttcttagacaccactccagtggggatgggagactggtccgcttattacagcctggtgagggtgggagtttaggtttaccacttggcctatgctgtctcattgaatgttggtttgcagtgtttggctgcagtagttattgtctaaaagctttctaacctactaggctgctgcatccatgtttctttggctagagaggacaggcttttcttagggctttttttgatctacatctgttggtatttctaggttgctgacttcttcagcaccttgcttgggatatatgagacatgataaaaatccaaggacacagtctcactgctgtgtcatttcctgggtccctaactaacctgtttgccttcttctgcccacctttcagagttttcttactgaaataaaaacaacttcttagcaaattgttttatataaaatgtcagatttttatttgtacttcataggaagaagagggaaaaatagttctactctgtgtttctggaagcacaaatcctcagatgtaattttttagtgctgacaatatgtttgcatgcttgcctgaatgattcaggagacaaggaatagaattgtaacaaagcaatcgaagcaggtgagagtgggaggtctccagggtacctggtagggctgcaggcaggcatgtccttggaaggctgggtactttattctaattgcttcattttgtcagtgtggaacttttttctcttggagacattccttgcccttgctgtgttcttctctgaatctcagtgtctggctctggctcaggttctgtggtcagcaactttttgctgagtttggccaataggagaatctactgagggattggggaagggaagaaaggacaggccagtactttgctttgcaccaccctgctttaggaggcatctcttctggggctccagctcctaccagaaagccccccctccatggttcctgcattcatcttctccctctgtctctcagccatggtggtggaggtctcctgctggtgctaatctctggcctctggttagcttttcagcatgtccacctcccatgaaaccagcttctgtgtttatgtacacagaacaggtttccttactggatcctggctgactccctcagtgaggaaagaatgaggcaaagtcagtggctgagactggaaaaatgggaagatatatatgggtttgaggaaggagacagaggagaacaggagtgaaaattgccttgggagatgcattaagattgctgggaagtgctgagcccattgagaatcctgcatgtagaggtcagatgagaccaacagcaggacccagggttctctatggccacattcagccatttaactggtggctcagggtgggtgagccaggtttgaggtcttgccatgggtggcagatagactctgggatgacctccatgatccccactgcctggtgttcacactcatgtgtgatgaccccttgcccttaacctgtaactggattccaagcagtggaatatggcagaggtgatggatgggctgttactccatagctgtaggaagcctgtgggaagtaagtgtggcctccagtcaatagccagcaagaagctaggtcctcagtcttatagctaccaggaagtgaattctgccaatactgagtgatcttggaagctgattcctaactgaatgactcttgagttccaaagcaaaagattgaactaagccttgtccctgattcactgagatgctgagattataaatgtgtgttgctttgagctactactattgtggtaatttattaagcagtaatagaaagctcatataacaggtgagcttgacagaatacaagagaaagcaagtaaaaggagggtgtttgctggaccacaaaatctcagtcgggaaaggggagtgagaacgtggaggtgttggctgatgtgggagcaggtaagtttcctgctgagagtccaggaagtggatagttaagccaaaaaatagcagcaagtgtagtcatggagggggcgtggtggaagagagagtgagagagagtgatcacagctaggtctcagatcttcaaaaaatgaagggacatgctgggaagacagtagccatgaggtaagggtggatgctgtattgcaatggcacctggagtactttagggaggaaagaagaaggcagtggagaactaagaggataattctctgaaggggagcgaatgagacccagtgtgtaatgaaatgtgggccccttgttcaaaaaatgggaaaaatgccattaatagtattaaaatataaagattttcttttcttccatagtctgtcaatttttcatggtgtattaaattgctatttggtattatgattctaaagaaaaattaaacataaatttttagcataaattgtattgttcatctttatattgtatagcatcagtttaaaatacaaatgtgagagtatttaacttgtagagggaatcacagaagttgcataatttgtgtttcctgacttaaatgtgcatatggagtttgttttgaccagacaaggaaacattgtgtcaaactaactctaatatttttattttgccttttgctacaagtacattctatcaacactctctgccttctgcttactgatgagtaagtcatcttttcaatgtaagtagtgggtgaaagcagggaaatcatagcaataagaagatactaaaacttccacggtcatttgggtttcttcaaaagttgttgcctttctgtacttgtaaatttttgttccaccagaatgtatggactcttgggctgtcaacactccacttactcagttttagacaaagcacacttactttatacttgcttggaactcccacacatcctgggtcccccagaatttgtgatcatagggcattgcaagcctctgtgaattcagtgacaaggagtggtggatccatgaattgctctcattccacctacaggtgtgtacattgcttcccagtgctgcaaatcctattcaacaatagctcacagtgattttggcttcaaagtgtcaattaaaaatatgcataatttgagagctgcaagttttatttggagcagaaagagaactacagcccaggagacagcaactcagagagctctgagagactgctccaaagaggcagtcagggaaagtcagtatataagattttggtgaagagaaaattcactttctcaaggggagcatgtatgccagtgttttctggccctctgtcagactagggaggtgggcactctgctcctttctctcagggaaccctgcaggcccccaggagtgttcctggtcattgctcacagtgaacttaatctgtgtagaaaacttcctgggtaccaagccttgtgttgagaactttaggagtctttgtctctcttgagcccctttatggcccagtgaggttgatgccagtaagctccatttattagagaaggaaatggcaatccactccagtattcttgcctggagaatcctatggacggagaagcctggcaggctattcatggggttgcaagagttggacatgacttagtgactaaaccaccaccaccaccaccaagtgcttactttacaaaaggtttctgttagtcccgagtataaggtgagtgtgcaggaaagagagcaagtgagctgggcagtcaggcaagaaaagggaggtttattagagggaaaagagcgggtaactggcccttaaggagagccagcattctcccttttgatggagtccttcttataccccaccaatgaaaaattctctgaagggatggtcacatagctggaggtctggaatctggtggtctcacagctttgagaagataggagccagtgagataacagcatgccatttgggcaatttggtcagtcttacagatcactgtgatttattctttctttgtgaggtctacataagaagccatcttatcagtgagaccccatgtgggccctgtcaacgaagagctgatgttccacgtgaagggatttagcgattttctagctatgaagagataaaaggattgggatcatgaaatcagttcctgaaaataaccaattgtctaaatacctgttctgccagatcccctggaacacagagtgcctcactccaccctgaactctctcagggggtgttgaaggtcaaaagctagagcagcacagggttcagtctctgcagaggcagatgacaaatgccttgttcagtctctggcaaatgttctcagcaagtgccaatttgtagttgacaggcaagtgccaatttgtagttgacaagagcaacctttgatagcaaaccattctgctgccaaccacaggtaattgtggggttgagggatgctgccaactattatataaacaagtagaatgataaaaggttaaaacataatccccaaagtaagacaccataaccttgcaagtatagtgatttttcgcatttttatagtaggtattattgattccagatgtgtgtagcagtaagcagcagcttgcagcaagaagcagcaagtagtagctggaagcagggtcttagtttcctagtatgggagtccttaccactggaccacaggagccagcagttagggctaaggtccatagtcttgcctgcccagtcaagaactaattcaggtgaggaggcagaagataaagagtaaagtaaaaagtttattgaaaagaaaagtacgtgaagaaatgtgcatgggcaaacttaagagagttacacctttgggaaatttgaatcctttataataaacaggcagttctctgggtctttgtcttcactcaggccaatcaccttgctttgttccccttggttaatttgtcgaaggactctcccctggggtgtgcatgcacaccctagccaagatgggtcttgaagtgaaggcttctgggaggagcaagactcattatggcctggaattaatcctctgacttttaactcctaggggccttttacatgtgtagtgtctcctttatcagacagggttgtttcctttctttgtccttgccatgattattccctttaggaaagactggctatttaccctgtttcttctgctggctctaacttccacaactggagacaatctatctcttatctcaagaaatgcaaagaggaggctggctgactgtaaattcttcaactgaagcccacctgtctcttaactcaagaatgcaagcagaagggtcgctataaatttctaacctggagaccttctatttcctacgtcattattgttttcttactgcaagagtattaatttgctagatgcgaaattgttaaagtcacatcctagataaagacaaagaagaaagcgctaatcatctgtatctctatcacacagaagtagccatgctttggaggctatgaccttctggttgttccatgtatattctgctgctgctgctgctaagtcacttcagtcatgtccgactctgtgtgaccccatagacggcagcccaccaggctcccccgtccctgggattctccaggcaagaacactgaagtgggttgccatttccttttccaatgcgtgaaagtgaaaagtgaaagggaggtctctcagtcgtgtctgaccctcagcaaccccatgaactgcagcctaccaggctcctccgtacatgggattttccaggcaagagtactggagcatatattctaggttttaccaagtccaagctccctctacttgccgcatgatgggccaataaatacaagcaagatgttaagacaaggaagacactttattcaggaagccagctgacttggaagatggcaggcttgtgccttaaaataaccaacttgttggggtctgggtgccaggttcttttgtagagtcagagagaaagaagcagagaggaagtaaagtgaaagggtattcaatcttacaaaacatttctaggggagaggagttcagttcaattcaattcagtcgctcagttgtgtccgactctttgcgaccccatgaatcgcagcagccaggcctccctgtccatcaccaactcctggagttcactcaaactcatgtccattgagtcagtgatgccatccagccatctcgtcctctgtggtccccttcttcccctgccctcaatccctcccagcatcagagtcttttctgatgagtcaactctttgcatgaggtggccaaagtactggagtttcagttttagcatcagtccttccaaagaaatcccagggttgatctccttcagaatgcactggttggaattccttgcagtccaagggactctcaagagtcttctccaacaccacagtgcaaaagcatcaattcttcggtgctcagccttcttcacagtccaactctcacatccatatatgaccacaggaaaaaccatagccttgcccggatggaccttagtcagcaaaataatgtctctgcttttgaatgctatctaggttgttcataacttttcttccaaggagtaagcgtcttttaatttcatggctgcagtcaccatctgcagtgattttggagctccccaaaataaagtctgacactgtttccactgtttccccatctatttcccatgaagtgatgggaccggataccatgatcttcattttctgaatgtttgagctttaagccaactttttcactctcctcttttatcaagaggcttcttagttcctcttcactttctaccataagggtggtgtcgtctgcatatctgaggttattgatatttctcctggcaatcttgattccagcttgtgcttcttccagtccagtgtttctcatgatgtactctgcatataagttaaataagcacggtgacaatatacagccttgatgcactccttttcctatttggaaccagtctgttgttccatgtccagttctaactgttgcttcctaacctgcatacagatttctcaagaggtaggtcaggtggtctggtattcccatcacttttagaattttccagtttattgtgatccacacagtcaaaggctatggcatagtcaataaagcagaagtagatgtttttctggaactctcttgctttttcgatgatccagtggatgttggcaatttgatttctggttcctctgccttttcaaaaaccagcttgaacatcatgaagttcacggttcatgtattgctgaagcctggcttggagaattttgagcattactttactagcatgtgagatgagtgcaattgtgtggtagtttgagcattctttggcattgcctttctttgggattgggatgaaaactgaccttttccagtcctgtggccactgctgagtttttccaaatttgctagcatattgagtgcagcactttcagagcatcatctttcaggatttgaagtagctccactggaattccatcacctccactagctttgtttgtagtgatgctttctaaggcccacttgacttcacattccaggatgactggctctagttgagtggtcacaccatcgtgattatctgggtcatgaagatcttttttgtatagttcttctgtgtattcttgacacgttttctttatatcttctgcttctgttaggtccatacaatttctgtcctttatcaagcccgtctttacatgaaatgttcccttggtgtctctaattttcttgaagagatctctatctagtcttacccattctgttcttttcctctatttctctgcattgatcgctgaagaaggcttttttatctcttcttgctattctttggaactctgcattcagatgcttatatatttccttttctcctttgtttttttgcctctcttctattcacagctatttgtaaggcctccccagacagccattttgcttttttgctgttgttgttgttgttgttgtttttactttttttttttttttttttactttattttgcttataatactgtattggttttgccatacattgacatgaatcagccactggtgtacatgagttgatccctgtctcctgtgcaatgtcacgaacctcattccatagttcatcaggcactctatctatcagatccaggcccttaaatctatttctcacttccactgtataatcataaatgatttgatttaggtcatacctgaatggtgtagcagttttccctactttcttcaatttcagtctgaatttggtaataaggagttcatgatctgagccacagtcagctcctggtcttgtttttgttgactgtatagagcttctccatctttggctgcaaagaatataatcaatctgattttggtgttgaccgtctggtgatgtccatgtgtagagtcttctcttgtgttgttggaagagggtgtttgctatgactagtgcattttcttggcaaaactctattagtctttgccctgcttcattccgtattccaaggccaaatttgcctgttactccaggtgtttcttgacttcctacttttgcattccagtcccctataatgaaaaggacatcttttttgggtgttagttctaaaaggtcttgtaggtcttcatagaaccattcaacttcagcttcttcagcattactggttggggcatagatttggattactgtgatattgaatggtttgccttggaaacgaacagagatcattctgtcgtttttgagattgcatccaagtactgcattttggactcttttgttgaccctgatggctactccatttcttctgagggattcttgcccgcagtagtagatataatggtcatctgagttaaattcacccattccagtccattttagtttgctgattcctagaatgttgacattcactctcgccatctcttgtttgaccatttccaaaatgccttggttcatgcacctgacactccaggttcctatgcaatattgctctttacagcatcagaccttgcttctatcaccagtcacatccacagctgggtattgtttttgctttggctccatcccttcgttctttctggagttatttctccgctgagctccagtagcatattgggcccctactgacctggggagttcctctttcagtatcctatcattttgactttacatactgttcatagggttctcaaggcaagaatactgaagtggtttgccattcccttctccagtagaccacattctgtcagacctctccaccatgactcccctgtcttgtgttgccctgcgggcatggcttagttttactgagttagacaaggctgtggtcctagtgtgattagattgactagtttctgtgagtgtggtttctgtgtatctgccctctgatgccctcttgcaacacctaccatcttacttgggtttctcttaccttgggcatggggtatctcttcatggctgctccagcaaagcacagctgttgctccttaccctggatgaagggtatctcctcactaccgcccttcctgaccttcaccgtgggatagctcctctaggccttcctgcacccacacggtcactgatccttggacgtggggttgctcctcctggccgccacccctgaccttgggcatggggtaactcctcttggccaccacccttcaggcatagggtcctcccggcttctgcccatgacctcggacgtggggtagctcctctcagctgcgctgagtgcgccggtcgcagccacccacgcttaggggagaggaaggggtgtgttaatctcctatgcacaggtgggctgggacagattgtctctcatgagctgaacaaaggcactgtagtttacagtcaggcagggttctttgaggcaaaccattatttatgattataatgacaaaagcaatgaaaagcaagtcaaagaaaatttccaatgtggagtcagaattggcttcctctctgcaacatatttattgcaagagatatatcccattgtaccagtggtgtttaccacattttaaacgtttcccattatcaatatttttagaggatatttatttttgaatagtgttttatactgtgaaagtctcacaatttaccctaattaatactttgttgttgaatagttaggtcactgctagtgtgaaatatgctacaatattcatcctaggagatgagcatacattggaatataatattagatattagaatgctgaaacatgataaaatccttgttataagaggtctttttactataccattcagtagtataaattccttaaggtgcaaatgatattcgcagtttgctttttatcaacagcagtttctttctgtttgaccccagtgagaagagtggcaacagaaacatgcacctagagaacaaagatggcaggctgacctctggcatgctggagatggagctacatcagacatctgctccctcgagtgctggcctgggagggtcagggttggtggaactcaacaccagcaaccacaggccacagcaaggagttggcaaggcagattccctgagcccctaccacaatggggctgctgggcagagctgctgggctcctgtggaccaggattttggctcattcctcaaggaacggtggtgagtttaaaacagttttaccttataaatgtggaattcacaaatactggatttccatgaacatagttcccttacattttttttgtgggaaaaatttccagatattctccaaggctctttccagcactagatcactttcctggcctgttttgaatgaatgctgtttctaaaatgtggctaatgtaaatccaaaaggtaataaagatagaaatcagattggcctcatcaactgtgtacaaactggttagtttttcttagagctattaaaattaggatatagatacacaggaaagaagagtgtgttagttgtctagtgtcagataacgtgttagtcactcagtcgtgtctgactctttgcaaccccatgaactatagcccgccaggctcctctgcccatggaattctccaggcaagaatattggagtgggttgccattcccttctcctgcggatgtccccgacccagggatcgaaactgggtctacatattccaaaattcagcatcttaaaatgacacatgtttgtttccttacagttttgtgagtcagaaatctgagcattgcttagctgggtcctccacctaagggtctttcacaggctgagaacaagctgtcagcagaggctgactgtcattcaagtgggtagggtctgcttccaaactcatcattgttggctgtacttagttcttcctgggcagatggtctaaggttctcagttccttgccaggtggcctgctccatcaaggctagcatgagagacagtcctttgtaacctaatcatagaagtaactccccatcactcttactgtgttctgtttgttagaatgagtcactaggttgtgcccacaatgtaggggatgggatcacacacggacgtgaacacctggagtagattattgagggcatggcagacaaaggttgcctgtcaaaaaagtggatgaatctgcttggcaacacagaagacacaagcgacatgagtttgatccctggatcaggaagatcccctgggataggaaatggcagcccactccagtactcttttctggaaaattccatggacagaggagcctggtgggatacagtccattggactgcagacagttggacacaactgagcacacacgcatatacacacacacacacacatttttagtttagtttaataaagcatattccatactgtttttcataatagctccatcattttacattcccaccaacagtgtatgagggttcccttttctccacatccttaccaacaattgatatttgtagacttttgatgacagccattctgacaagcctgagatgatatctcattttgtgattttgacttgcatttccccgatgatgagtgatgttgagcatcttttcacatgtctgttgggcatctgtatatcttctttggaaaattatctattcaggtactctgctcattttttaaccagattgtttggtttttttgatgttgagctgtgtgaattctttttatattttgaatattaactcctttttggatgtatcatttgcaaatatcttctcccattaagtaggtggcctttttgttttgttgatagattctttcactgtgcaaaagctttgatgtgtacatttatttttacttttgtttcccttgtctgagaagacatatcccccaaaatattgccaagacagatgtcaatgagcatactgcctatgttttcttctagaattttatgatttcaggccctgcatttagtctttaatccattttaaggtttttttttgttgttgttgtttttgttaggtatgaggaagtagtctagtttgattttttttttttttgcttgtagaggtacagttttcccactattatttattgaagaggttatcttttccccattgtatactcttgcctcttttataatagattaattgcccatttgagtgtgggtttatttctgagcttttcatttcttctgtttgattgagctatgtatcttttgtgtgtatgtgtgtgctagtaccatgctgttttgatttttgtaggtttgtagtatagtttgaagccaagaagtatgatacagcagttttgctctttttaaagtttgttttggctattgaggggtttttatgtttccatccaaattttatatgggattctatgggaaatactattgccattttgataggtcttacattgaatctgtagattgctttgggtaatattaacattaatacttgggtcattttagcaatattaattcttccaatccataagcacaatatatctttccattgtttgtgtcatcttgaatatctttcattaataagtgtgggtcttttaccttcttggctagagtcattcctaggtgttttattctttttaatgcaattgtaaatggtattgttttcttgttttctctttctgatagtttgttgtttgtcattgttcagtcgctaagttgtgtctgactctttgtgaccccgtgggctacagcacaccaggcttctctgtccttcactatttccctgagtttgctcaaactcttatccattgagttgatgatcaatggccatccaaccatctcatcttattccaccctcttctccttttgccttcagtctttcccagcataaggatcttttccagtgagtaggctcttcacattaggtagccaaagtattggagcttcagcttcagcatcattccttccaattaatattcagggttgatttcctttaggattgactgatttgatctccttgctgtccaagggactctcaagaggttctctagcaccacagttcagaagcataaattattcagcactctacctttatagtttgttgttactatatagaaatgaacagattcctatatattaattttatatcttgccactttatcaaattcattgataagttccagtagatttttgatgtcatatttaggattttctatttacagtatcatgtcttctgcagtgacagttttctttctacattttctatttgcattaaaaaattttttcttgcctggttgctgtagctatgaatttcaacattgtgttgaataatagaggttcaagagggcatccttgtcttgttcctgaagttagaagtaatgctctcagcttttaccattgagaaagatgttagctgtggacttttcatatatggccttttctatatttatgtatgtttcctccatacccactttgttcagagtttttatcatgaatagatgttgaattttgtcgaaagcttttccctgcatctattgatgtggtcatataatttttattcttcagtttgttttttgtgatgtataatcttggttgatttttccatccttgcattcctgggatactcacttgattatcatgcatgatcttgttaatgtatttttgaatttggtttgttaatagatttttgaggattttgtatctctgttcactggtgaaattggcttgtaattttcttattttaattttaaaagctatcattgcctagttttggtatcagagtgatgttggctttgtagaaagagtccagaagtttttttcctctgcagttttaaagaatagtttgaaggatagatgttaatgcttccttaaatgtttggtagaattagcctgtgaagccatctggtcatggggttttgttttttgggagttgtaaaaaattactaaatcagtttcatatactgataatttatctgttcatatttcttattcactcagtatttggagattgtgcacttataggaatttgtccatttcttctaggttgttcatttcattgtttgtagtaatctcttatgatctgtatttctatcacttctccttttctcatttctgattttattgactttggccctctctttgttttcttgataagtttggctaaaggtttgtcaattttgtttatcttttcaaagaagtggttcttaatttcattgatctttttattggcttattttggttttatttcatttatttctgcattgatttttattatttccttccttttactaacattgggttttgttcatattttttctagttccattaagcataagcttatattgtttatttgggacttttctgctatactgaagtaggcatctctctttataaacttcactcttagaatggcttttgctgcatctcatggatattggatcattgtgtttctgttttcatttgtctccaggtattttttttatttgctctttgatgttttcagtgatccattgcttatttagtaacatattggttagtttctatgtgttttatttcttgcaggttttttgttctttttctccttgtagttgatttctagtctcatagagttgtggttggcaaagatgatttcagtcttcttacatttattgaaattgttttgtgacctagcatatgagctatcctggagaaagtcccatgtgcacttgaaaagaatgtatatcctggtgctttgggatggaatgtcctatggatatctattaagtccatttggtttaatacgttatttaaggccagcatttctttattgataatctgtctggatggtctgtccattgatctaagtggggtgttaatgttctctagtattattgtgttactgtcagtatcttcctttatatctgttaatatttgatgtatgtatttaggcaaccttatgttgaatgcatatatatttacaattgctgcattttcttcttgggttaattccttgatcattatgtaatatcattctttgtcttttatgacagctctttgttttaaagtttattttgtttaagttttcctaccttggttttctttttgtttccatttgcataagatacttttttcctgttccctttcagtctgtgtgtgtctttagaaatgagtctctggtaggcagaatatatatgggtcttgttttaatatacattcaggctctttacattcttagattagaacatttaatgcatttatcttttaagtagttattgataggcatgtacttattacacttttatgatattaattgttttggggtcatttttgtggttctttttgttcttttctttttttaaactctctttacttttgatctgatgactatctttggtgttcatggtttttctcttttttgtgtatctattgtagatttttcgttagaacttgagttttatatggagcaatctatctatatatacatggttactttaagttattaatctcttaagcttgaatgtttttaacaacactgcagttttattcccccctaaacttttacattttgacatcatattttatatcctttagctttgtgtatcctttaactaattttggacattgatgattttactactttttcttttaaactattactatctttataagtagttgatctcttacattgtgtatatttgcctttgccaatgagatttatccttcaataattttcatatttctagttgtggcctttccttttttgtttagagaagtcccttaaataattcttgtaaagctggtttgatggtgctgaactcttctagattttgcttgtctgtaaattttttgatctctccatcagatctgaatgaaagccttgccaggtagagtattcttggttgtggtttttcacttttatcactttgaatatataaagtcattcacttttgggccacatagcttctgctaaaaaatcagctggtggccttgtgtaagtttcctcatacattactagttgtttttcctttgttattaaaaaatatatataaacatttattttatttggaggttaattactttacaatattgtattggttttcccatatatcaacatgaatccaccacaggtatacacgtgttccccatcctgagcccccctccctcctccctccccatacaatccctctgggtcatcccagtgcagcagccccaagcatgcagtatcatgcatcgaacctggactggcgattcatttcatatatgatattatacatgtttcaatgtcattctcccaaatcatcccacactctccctctcccacagagtccaaaagactgttttatacatcagtatctcttttgctgtctcacatctgggttatcgttaccatctttctaaattccacatatatgcgttagtatactatattggtatttttctttctggcttacttcactctgtataataggctccagtttcatccacttcattagaactgattcaaatgtattctttttagtggcttagtaatactccattgtgtgtatgtaccatagctttcttatccatttgtctgctgatggacatctaggttgtttccatgtcctggctattataaacagtgctgcgatgaacattgggatacaggtgcctctttcaattctggtttcctcgatgtgtatgcccagcagtgaggttgctgggtcataaggcagttctacttccaggtttttaaggaatctccacactgttctccatagtggctgtactagtttgcattcccaccaacagtgtaagagggttaccttttctctataccctctccagcatttattgcttgtagacttttggattgcagccatcctgactggcgtgaaatggtacctcattgtggttttgatttgcatttctctgataatgagtaatgttgagcatcttttcatgtgtttgttagccacctgtatgtcttttttggagaaatgtctatttagttctttggccaattttttgattgggtcgtttatttttctggaattgagctgcaggggttgcttgtatatttttgagattagttgtttgtcagttgcttcatttgctattattttctcccattcggaaggctgtcttttcaccttgcttatagtttcctttgttgtgcagaagcttttaagttcaattaggtcccatttgttttttttttttttttgcttttatttccaatattctgggcagtgggtcatagaggatcctgctgtgatttatatcggagagtgttttgcctatgttttcctctaggagttttatagtttctggtcataggtttatatctttaatccattttgagtttatttttgtgtatggtgttaaaaagtgttctagtttcattcttttacaagtggttgaccagttttcccagcaccacttgttaaagagattgtctttaatccattgtatattctggcctcctttgtcaaagataagatgtccaataggtgcgtggatttatctctgggctttctattttgttccattgatctatatttctgtctttgtgccagtaccatactgtcttgatgactgtggctttgtagtagaacctgaagtccggcagcttgattcctccagttccattcttctttctcaagattgctttgactattcaaggttttttgtattttatacaaattgtgaaattatttgttctagctctgtgaaaaatactgctgcgtgatagggattacattgaatctataaattgttttgggtagtatactcattttcactatattgattcttccgatccatgaacatggtatatttctccatctattagtgtcctctttgatttctttaatcagtgttttataattttctatatataggtctttagtttctttaggtagatatagtcctaagtattttattcttttcattgcaatggtgaatggaattgtttccttaatttttctttctattttctcgttattagtgtataggaatgcaagggatttctgtgtgttgactttatatcctgcaactttactatagttattgattagctctagtaattttctggtggagtctttagggttttctatgtagaggatcatgtcatctgcaaacagtgagagttttacttcttcttttccaatttggattccttttatttcttttcctgctctgattgctgtggccaaaacttccaaaactatgttgaatagtaatggtgaaagtgggcacccttgtctttaggggaaatgctttcaatttttcaccattgaggatattatttgctgtaggtttgtcatatatagcttttattatgttgaggtatgttccttctattcctgctttctggagttttttttttttttgtcataaatgaatgttgaattttgtcaaaggctttctctgcatctattgagataatcatatggcttttgtttttcaatttgttaatgtggtgaattacattgattggtttgcagatattgaagaatccttgcatccctgggataaagcccacttgggcatggtgtatgatctttttaatgtgttgttggattctgattgctagaattttgttgaggattttttcatctatgttcatcagtgatattggcctgtagttttctttttctgtggcatctttgtcaggttttggtattagggtgatggtgggctcatagaatgagtttggaagtttaccttcctctgcaattttccggaagagtttgagtaggataggtgttagctcttctcaaaatttttggtagaattcagctgtgaaggcgtctggacctgggcttttgtttgctggaagatttctgattacagtttcaatttctgtgcttgtgatgggtctgttaagattttctattccttcctggttcagttttggaaagttgtacttttctaagaatttgtccatttcgtccacgttgtccattttattggcatataatggctgatagtagtctcttatgatcctttgtatttctgtgttgtctgttgtgatctctcctttttcatttctaattttattgattagattttcctccctatgtttcttgatgagtctggctaatggtttgtcaattttatttatcctttcaaagaaccagcttttggctttgttgatttttgctatggcctcctttgtttcttttgcttttatttctgccctactttttaagatttctttccttctcctaaccctggggttcttcatttcttccttttctagttgctttaagtgtagagttaggttatttatttgactattgtttcttgaggtatgcctgtattgctgtgatctttccccttagcactgcttttacagtgtcccacaggttttgggttgttttgttttcattttcattcgtttctatgcatattttgatttcttctgtgatttgttggttattcagcagcgtgttgttttcagcctccatgtgttagaattgttagtagtttttctcctgtaattgagatctaatcttactgcattgtggacagaaaagatgcttggaatgatttcattttttttttgaatttaccaaggctagatttatggcccaggatgtgatctatcctggagaaggttccgtgtgcatttgaggaaaaggtgaaattcattgttttggggtgaaatgtcctatagatatgaattaggtctaactggtctattgtattgtttaaagtttgtgtttccttgttaattttctgtttcattgatctatcataggtgtgagtggggtattaaagtctcccactattattgtgttattgttaatttcccctttcatacttgttagcatttgtcttacatattgcggtgctcctatgttgggtgctaatatatttataattgttatatcttcttcttggattgatcctttgatcattatgtagtggccttctttgtctcttttcacagactttcttttatctgatacgagttttatctgatacaagtattgctactcctgcattcttttggtctctattttcgtggaatatctttttccagcccttcactttcagtctgtatgtgtcccttgtttttaggtgggtctcttgtagacaacatatataggggtcttgtttttgtatccattcagccagtctttgtcttttggttggggcattcaacccatttacttttaaggtaattattgatacgtatgatcccattgccatttactttattgttttgggttcgagtttatacaccctttttgttttctgtctagagaatatcttttagcatttgttggagagccggtttggtggtgctgaattctctcagcttttgcttgtctgtaaagtttttgatttctccttcatatttgaatgagatccttgctgggtacagcaatctgggctgtaggttattttctttcatcactgtaagtatgtcttgccattccctcctgacttgaagagtttctattgaaagatcagctgttatccttatgggcatctccttgcatgttatttgttgtttttcccttgctgcttttaatatttgttctttgtgttttatctttgttaatttgattaatatgtgtcttggggtgtttcaccttgggactctcttggtttcttggacttggatgattatttccttccccattttaggtaatttttcaactattatctcttcaagtattttctcatggtctttctttttgtcttcttcttctaggactcctatgattcgaatgttggggtgtttaactctgtcctggaggtctctgagattgtcctcatttcttttaattagtttttcttttctcctctctgattcatttatttataccattctatcttctaattcactaatcctatcttctgcctctgttattctagtatttgttgcctccagagtgtttttgatctcatttattgcattattcattatctattgactcttttttatttcttctaggtctttgttaaacctttcttgcatcttctcaatccttgtctccaggctatttatctgtgattccattttgatttcaagattttggatcattttcactatcattatttggacttctttttatcaggtagatttcctatctcttcctgttttttttttggtttggtgggcatttctcttgttcctttacctgctgggtattcctctgtctcttcatcttgtttatatttctgagtttggggtgtcttttctgtattctggcagtttgtggagctctctttattgtggagtttcctcactgtgtgtggggttgtacaggtggcttgtcaaggtttcttggttagggaagcttgtgtaggtgttcttttgggtggagctggatttctcctctctggagtgcaatgaagtgtccagtaatgagttatgagatgtcaatggttttggagtaactttgggcagcttgtatattggagctcagggctgtgttcctgtgtggctggagaatttacatggtatgtcttgctctggaacttgttgggccttgggtggtgcttggtttcagtgtaggtatggaggcatttgatgagctcctgtcaattaatgttccctggagacaggagttctctggtgttctcagggtttggacttaagccttctgcttctggttttcaatcttatttttacagtagtttcaagagttctccttctatacagcaccattgataaaacatctaggttaaagatgaagagtttctccacaatgagggacacccagagaggttcacagagatacatggaaaagagaagagggaagagggagttagaggtgacctgaatgagatgaggtggaatcaatagatgagagagcaagctagccagtaatcacttccttatgtgcactccacagctggaccactgagagatgttcacagagttatacagagaagagaagagggaggaaggagacagaagtggccaggagaataaaaggggggaatcaaaaggagagagatctagccagcaatcagttccttaagtgttctccaccatctggaacacacagaaattcagagttggttagagaagagagggggtagggaggagacacaggcgaccgggtggagaaaaaggagagtgcaaagggggagagagcagtcaagccagtaatcttgctcccaagtaaaaatgggtagtgaagactgggttcttaaaggtacaaagttgataacaaataccaaaaagcaaagattaaaaatctagagtagggtttggaatttcaagaatacaatatgaaagaaaagaagaaaaaaagagaaaaaagtcacaaacattataatatatatatgtatatatataaagcttgcttttaaaaattagggtctttttttttgcaaagtaatagtaggttataaaagtgaaaattaaaggaataatagaggacttaaaaattaaaaaaaattaaaaaaaagaatgatcataaaaatagtaaaaatatatctaggactttctctggtgtttttgtgggtattgtggggtcagttcattttcagatagtttctcagtctgacatatttctcaggatctataggctcttcttatgtagtcggtactaacgacagggttttaatctgttgcacctgtcacttccaaggcagttccctctgttttagcttcttctgtttgctggtctcttcagtgtctgatttctgccctgacacaaagggggcggtgatggacacttatcttaggctcacttattcagtcgcgctgtggggagggagggacgctgcaaacaaataacactggtgtgtgctcgcagtgcctcagccacactgggcctgcccccgctcacagcatgtgtaccctccctgcccacactgctcaggctctaggttgctccactgggaaccatccgaggccggccctgggctgcatgcacctcccaggtataagccgctcaggttcaggcacttgggtagtccccagaggcacagacttggttggacctgcgttttgtgcccttcccaggtccaagcagctcaggtgatgaggtgtttggcaagtgtggtcgctgcaacttatcacctcccctggtcttgccacttggctttctgtgtacaactagtgcaccttctcaggaggatgttgaccatccagaaccccaagaagtcttagttagcaaagaagcctgcttgcagttttgtagataatgtctctctggtgctacgattgcctgcttccagctctggctgcctgtcactggaggggcatggtctgcagccgggtatctctgttcagtcctttgttctgtgcgtgggcctggtggtgtcttaggttagggctggcttttcgcgtggtagttatcccacagtctggtttgctagcccaagctagttcactcagattgcgcttggggcattcatgccagatccttactctaagcaatgcagcccatgcctccctgcccaggctccgcttgctagtggcaggtgcaggtgtctgcgctgcttctccactgggggagttactgttgggctcatagtctgtgggtttaaattatttatttatttttcctccctgttatgttgccctctgtgcttccaaggctcgccacagactcagcagtgacagtttcctgatgtttggaaacttctctcttttttaagacttccttcccaggatggagctccatccctacctcttttctctctctctctctcttttttttttttgtcttttatattttttcctacctcctttcaaaaacaatggttcacttttctgggtgcctgatgtcctctgccagcattcagaagttgttttgtggaatttactcagagtttaaatgttcttttgataactttgtgagggagaaagtggtctccctgtcctatatctctgccatcttaggaccatctctcctttgctatttttaatattctctactcatctttaatttttgtcattttaattacaatgtgtcttggtgtggatctctttgggttgatcctatttggaactttctgtgcttcttggacttgaatgtctgtttccttttccaggttagaaatgttttcaattactatgtcttcaaataagttctctgccactttctctctccttcttcttcgaatcctttaatgtgtaagttagtatgttgatgctgtcccagaagtctctccattttaataattcttttttcttttttctattcagcttgcatgattctcactactctttcagttcactgatctgcccctctgtatcacctaatatactctaaatttcttttggtgtatttttgtttacattatccttcaattctggttttttttttttttaataatttctgtttttcttaaacttctcgctgtgttcatccattcttctaaatttgttgagtgtgtttatggtcattttcatggaaactatattaggtagattggttatctccactttgctttgttcttctggtgttttatcttgttccatcattttggagtatgttcctctgttatttcatttttcttaattctatattttcatttcaaaacattaagtagaatacttatacttttgtatcttagagaagtagctttatgtaggagatatgcttatgtgtcccagaagtctactctttctggtctccagagccaaatgcactaggatgctcccggtgtgggctgtgtgggtccttctgttgtgatgagatgagtaccatggttggtctggtaggtgtgattggcctctggtctgctgatttccaggccctgccctgggagttgatgggtgtagctgggtcacaaggtagatgactgaagagctccaaagtgtcacagggctggtgctgcaaccactgctgcttctgctgttgccaaagccacagagttgagccaaagaaagagttggagtatttggatgaagatatgggatttggtctctttaactaatcatcaaaaagcaatcaatttagccagtttatttgtgaaacaagaaattaaagactaacttctcttttagaaaaagatgaaagatcctggatctttgatggctggtctgggctaatggggctagtggagctagtgttattttgctggtgggtggcacttatgtctagggagtcccagggctagtgctggactgctagtaggtagaccagggtgctggaatctttggttctaggagcctgggggtcccagagttggtgtcagtccactggtgggccaagctgaatcctgcggtctctggctagagtctagagtttttcagagctggtgctagctctctgttatgtgcatgtgaagtgtgtgcatgctcagttatgtccaactctttgcaaccctgtggactataacctgccaggttcctctgcccttgaaattttccaggcaagaatgctggagtgggttgccatttcctactctagagaatcttcttgacccagagattgagctcatgcctatgtctaccacacacttgctgtgaccaagcgagtaccccatgatgtgaggtacataaacgatctcaactattacatagtcagttcacttcagtctctcagtggtgtctgactctttgtgaccccatgaactgcagcatgccagggctccctgtccatcaccagctcctggagtccacccaaacccatgtccatcgagtcagtgatgccatccaaccatctcatcctctgtcgtccccttctcctcctgccctcaatctttcccagcatcagggtcttttccaatgaatcagcatagtcaccatttacaaaacatggggtgaaagcctgaacaagccatcttggccaatttgctctcgcctcacattctatgtgcagtccatctcctgtgatgtcccctaggcaagtaacactgacccttggatttataacttgctactgcagtaactacaacaacaatcagttacacccccaatacaaaacaaaacacaatgccaggtatcacctggaacttatgttgatgtccttgccctcatggggctagaaaagccagtcaccacatgtggagcacctttatgttgcatggccaggtccagtccaccatctttccttgtgaaattgcaggaaagcctctacaggggcaactccactcctgcagaattttattaaggactcatacaaccccctacaggtgccataccaactgcttcaaggaggagatttttgtggcattcacagcccacccaaagattccaaatactttcacactgttataaatctgcaagagaatcagagggtagtagcacatcacagcacacagcctttacagtacacagtcctactaaacctatatcacaggacacagcattgacagcacactgttctactaaaccttcatcacaggacacagcctttacagcacactgttctacataagacacagactttatagtacaatgttttactaaacctacatcacagcacacagcctttacagcacattgttctactaagcctacatcacaggacacagcctgtacagtacactgatctattaaacatacatcacagcacacagcctttacagcacactgttctcctaaccttacatcacaggacaaagcttttacagcacagtgttctgctaaacctacatcacagcacacagcttttacagtacactgttctacgaaacctacatcacaggacagcctgtacagcacagggttctactaaacttacatcacagcacacagcctgtacactacaccattctatgaaacctatatcacaggatacagcctttacaatacactgttctaccaaacctacatcacagcacacagcctttattgcacactgttctcctaaccctacacgacaggacacagcctttatagtacactgttccactaaatctacatcacaggacacagactttatagcacattgttctactaaacctacatcatagcacacagcctttacagcacactgttctaataaacctacatcacaggactcaatttgtacagcacagcgttctactaaacccacatcacagcacacagcctgtacagtacactgttctccttaaacttacatcacaggacacagtctttacagcacactgttctactaaacctacatcacagggcacagtggttacggtacgctgttctactaaacctacatcacaagacatagcctgtacagcacagggtttctactaaacctacagcacacagcctgtacagtacactgttctattaaacctatcacaggtcacagccattagagcacatggtttactaaatttacctcacaagacacagccattacagtacactgttctactaaatgtatattacaggacacagcctttacaatacactgttctactaaacctacatcacaggacacagctgttatggtacactgttctactaaacctacctcacaggacacaggctttacagtacactgttctagtaaacctaccttacaggacacaggctttacagtacactgttctagtaaacctacatcacaggacacagcctttagagtacactgttctagtaaacctaccttacaggacacagcggttacagcacagtgttctactaaacctacttcacatctaacagccgttagagtacactgtcgtacaaacctacatcacagcacacaacccttatagtacactgttctactaaatctacatcacaggacatgcacagtacactgttctagtaagcctacatcacaggacacagcctttacagtacactgttgtactaaacctacaatacaggacacaggctttacagtacactgttctcctaaacctacatcacaggacacagcctttacactacaatatctaaacctacatcacaggacacagccttgacagaatgctcttctactaaacctacatgacaacacacagcctttacagtacactgttctaccaacctacatcacaggatacagcctgtacagtacactgatttactaaacctacatcacagcacagagcctttattgcacagtgttctcctaaccctacatgacaggacacagcctttatcgtacactgttccactaaacctccatcacaggagacagccttgaccgtatacttttctacataagacacagcctttacagtatacctctgtacttttgcatcctcataaactggatgggactcctgccagctcgggcctcctttgggagtcttttgactttcaaaatggcatcttgtatgccatccctctacttctctcaataaggacccacaaaaccccaacagatgctgggcccatccctgtgtcccaaagtcacaaaagccatgttgccaagtgttcctgatgcatttgccaaaactgtttactcaaatcggccaactctgcctgagtatatggttgaactcccatctgccgaacaaggcggcatggactgtcactggcaccgtggggtggattttcctgactgtcctgaaggcgaatatgaattgtgccctatgtgatgctgcgccagtgctcaatgtgcaaagacacttgtaagaactagagcaatgtatattggcactacagcaagaaccccctggctctgaagaacccagcatctctgacagagaggcagtaagtgacagagatgatgaacgttatgagactttggacctctgcttggcagtgagacccattatgcagcagaaagtgaagcacagcagtgttctctcatggctggtgcagcagccgtagcaggagacatgctatattctcttctcttgtgcctgacataatgcacagagccatgacacagcactagtatgttactgccttctaggtggagctcatgtatatgcacactgctgtggtctggcggtcatcatcaaggggcccccagtgtgactggttcatgacatatcgaccatatactctggcagagttggtcaacttggctaagcagttttggcaaatatgctgggaacccttggcaacatggcttttgtgaggaaaaactgcacagaatggcaaacatgactggactctattataacactaaactgagcctgaaagtattgaccccacagcatctagtctgtgtgaatttctgtttgtacttctagtgtggtttagcctggggtggaaaattgtgtctaattatcttaagctccaactttttacaattcagatataacatgtgaagtttaccactgattctcggggcacattcttggatctagctgtaaccaccagtgaacacatccttcagtttttgttaatgatcccttccttcactgtgtctttcaggtctcaccctcctttctcccaagtcttcagttccaggtctaaagacccctgctttacagaaaacactcctttgctgaggaatttctcacaagaaaaagggtgaggtttttttttttttgttttctttcttataaaattaagaaatctctgagcattacccttatgctcattacactcatgctggagaataagattagcttttacctgacatgtttggtctttgctagatccttgtcaattcaatgtgtgttcatggttctagtagttgtattctgtggcttatgaatttccaaataaccttgagcataaccctgccatgagtgcatagcatatatacactcatccatgcacataactctgacaggctgtcttgagaggtcagggcttctcaactggggctgaggttggcgctgtcaggagagatttctgttgtcacaaatggggaagcagtactactagcatttatggtagaaggcaggaatgctgctaaacactgcaatgcacagaacacctccccacaataaagaattatctaactcaaatgtcaataattattaagttgaaaatgtatgatttgaaagaaaactctacttcttataaattccttttgaggataaacctgcctggttctgaaaccaataagcagagttgctctgtaggatgagttacagactgtctcccttagggtgaagaaccctaactcagacctccaattcatctcctcttccttctgcaggcaaacttccagaaacctgagtcacctcgttggtgttctctgattgctcacacattacaatcttgggacattgtcctggaccttcttttcttgcccactgacccttgcactcagcctccctcccacagcctctgaagaacttcccaccttcttcctagctctttctataactgtttggtagccttcaccatttagggtgcatcagaatttgagggtgctcatatgccatgtgggttcttggtctcaccgtccaaagattcaagttcatgggaacttgatagggtgtaggaatcttgactgtcaccttccaatgcagagccaatctggcttcttccaggaaactcttgatgactagttgtgtttccctgaaaatgttcccactgagtccattttatgagagggaactcctctcttccttggttctccagaccaggcccactcaagtttaagggggctcaaatgtcccctcctttgtaaaactttggttcctccacagctcattcaagagtcaatgctccttctttgctctcaaacaccaaattcatgtcctgactttggaacttgtccttgtgttatccatgattatgcctgccaggctgagtccttttcatcctatcccagcacctagcaaggcctctgtcaccggggagataacaactctcatctctcctaatgagtaactttgaaaacgaacacttcacccatctattccctttaaggctttcctttgaattacctggtaaactgttaaggcctgagacattttcaactcatgattctctagaaaaccaagaactcaagaacatgaaagcttttatcctgggcttggaacacagaggccttgggatgctgagctctgtctcacatcacagttcagaagcacaatatggatattacatatgggtttcacatagcctagtttgcatctttgagcttcttcttatgaataaaacttttgttgttgttgttgttgtgaacaagtcctaaagcagtgataagggttcaggagaatcacaatgcccaattgagctaactgggtttgagaggcataacataatagattgtggctattgtgtcaatattgccatcccacaagtattccatgcaatacaggaaattctgagctttggagcagccttactagagacaagtgctgactgagaatctgtgctgaaggaattgttcaaaaactcaaggattcaataaaagtaaacaatgcatccacatgtaattttgataaaaatttatgatcccccttgatccatgcttctagataaaggtcttgttcttgggtccctctaatccagcactgatgttcctcattcctgctcgtgtagatgttgggcaggaaaacaacacaatcttctctacagctccattacagaaagatgcctagtacagaggagggaaggcttacatcattcattgtgcttcaggatgagtataacagaaccaggtgttgagaactccagcacagtcaaagagaaagcaaaaactgaaatgtactagaggtggtctgagccagaaaaaggtttactggaaaattccaaaatcagaacaagctgatgtttcttgaagggccacagtattttgaagattgtgtgaccccagaagatttccctgaagtcaagggtctgtgatgtcaagaaagatatattcccaccagtttgacagtattacagtgtttatggcccttttaaaaaccagggttgatttcacattttaggctcacctttgagatgaattgttttggagatgctactgttgctgtgaaaataaccacaaagcctcaatttccaggtcatggtgcactcccgtttgccacccagagttcattactggtgaagaatcttgggaggacagctcaactgagtgggagggaagatccctgctaagcagagaattggcaggttcctctgaatctgcctccttagagaagggggagcttctggacagtgctcacatcaggttccgtcttgccaagctgaggtatgatgacttggagcgccaccactggcatgggggtggtggtcacacagtgcatgccctgggactgggctgggacagggaagtgggtcttgccctcaggacgtccttcccaaggacacggtggaggtgaggaagaaggctaagtggtactttcctggaaagtagtctgcttttccttcaggccttggaagacagataagggcacatttgagccagcatggagcttttaagaatgcaggaaaacctaattatggaccttgatgactaacatcccatactcctttctgttgtgtggctggggtcttcacgtccatgagggtttgcagatgagaacagtccccgtggtgttctagaagctgatattatcatttataatcagtgactaaggtttctgcacatgcagcagagtgtttttagggctgtctccctgatcctgtttgtgacaccaattgtcttgctgaatctcactgtgtgtactgttcactgaacccatagtaggcaaggcacgagctaagaggctggaagaaaatgtgaagagctgtaggaaaggcgtctcctggctggcacagcagccatagcagcagacattacataactgcacacaaccattcagggcttttccaggtgaagcttatacatatttccagaacaaaagtagcccatagccaagcgagtaccatgtgaggctttgggcagtgctctaagtgatctcagctgttacatacccatgcaaagccattgtttacagaacatggggtgagagggtgtgagagcatgggacgagagactggtgccatcttgtgaatttcctcacaaggggcaaggaattgggtgggtctgagagaggccaagccctccatgcatatgtaggagggcacagcgcacacatgcatgggggatgtgagggcatttcgcaggaccacccgcaggggtcagaggagcggtactctccttgctttgtgtgctggggcttctgcatgagccttcacttgaaagaagtgttctattgaaaaccatgtgtttgaaagtggcatttttagagacagaatgaggcttctggaccaggaccaccaaggtccccattctgtatctgcgcagaggtagctgaggaaccaccaggggccaggcatgtgcatgcaactgtctccttactgcctggcattccctttgctccacagccttctgtggcttccactaagatgatctctgcagaaacccatggataggtgagaggacaccatgaagctgtcaaatattagtgtgattacttctctacataagggggcccatcttttctgaagctgttagaagggctgattagaagtgtacctgcctgcatcccaaagtatatctgtctttagccagagaggcccactctgagttgtcctgttgatgttacaggcaatcctgagaggtagataaaggaaggtacctcggagagagtaagaattttgcttgaggtcatgcatgggcttcccttgtggcccagttggtaaagaatccacccgcaatgtgggagacctgggtttgatccctgggttgggaagatacccttcttgcctggagaattccatggactgtatagtccatggggtcacaaagagtcaaacacgactgagtgtctttcactttcactttcatgcaggtttttgagagaagcagaggggtaggggcaggaatgtgaccccaggtcccccaccagtgcttgaccatagagatgttttttcgaccatgcctcctgataaggatagagtgaagggacaatgtaggtaattaaatcctacttggggaatttaagtattgacagtattacagtgtttaatagtggaaaaagtgtgagagactcttgtactttaatgattactcaagaaagcatgtttgcttaaccacaaaaccaatacctagcagacctttttagcaacaaaccatgcaacagaagcacaagacatgcctcaaaacaataaaacaatggtggcatgagacaccatcctgcctagtgagttcaataacatgctctctgcacacataaaaaaataataatttgtgaacttagcttgatcatatagggaaaagaaaaaatcccttgctcaacctggaggaggatggtggaagcttgacatttactcaagaaaggcaaagatgtcttctccccttccccactttatctttgattataaaactgtggcccactgagttttcaggatgtgacactgcctcacccactcacctataagcctcacaaatgtcctattccaataaatcacttctatctattactttatctctcgctgaattctttctgcactgagacataaaggaccaggagctctttggagccccctgaaaagacacctaatggtttcacttctagccatgtgtagtttctttaccatgactggtcttagctataggtgtggtaaatattcagccagtttaatctgctttaaagtcatttgaattatgtgaaagcatgtgaacaggttcctggtcctcgttgttcaccatgatggtaagccctgatactgtttacacccttctccagcatgctggctcacaactccagaggatgcgaggttcttcaaatatcctgtggcatagaaaataagatcagtacatttaagcctttacattcagtagttgttttattttctatgattgatagagtagttgcctcaaactttccacttaactaaagatttagtgacattctttttaacatgcctagaaagtactatacattattgttgaaacttgtaaaagctattttggatggtcagctctgctgtatgtgtcagttatgtagaaagacatttgtgtttaggatagttcaattaatgctttatgctttaaaaagaaatattttttattcccatttgaataggaactattgatgataatttggaagcatgatatgattattcatcagattcattaaatctataagaatgaagaacaaggttttactcttttgaaaggatcagaaagattttgagaaagatgtcccaatatagactttcttctttcattctacaaacatatgtcaagcacaggctgtataccagcaccctatctttggcaggggcggagcacaaataccccagtgcctgccctggggaagcaaccaagggaaagcaccctccagcaactgggcagtgataatatcttcaagagatggggtctggtgggccctgaggaggtgaaaggagtagagataagcctggagtggctgccaggaccataattgcccaaaggcctgagggtcacaattaagaagtgtgtaatgatgactatcaggggtccagagagggctggattgtctgttaaattatctcttaaggaattcttaaaggattctgctggtacaaccagttacaacactgcaaattctttcttgaattgtttgtttatgtctcagtcaatgtttattcaatgatcaaatccatattcttaccttccagaaaacttaagggaaaataattgataaatatgaatctgagagccaagataaagcttgtttccagaaaaccagagcctttaaaaagctagtgaagaggcctaaatcttgaacttcagcatctctgacaagaagatgtgttcagacattcaggtttaatgttgtctcctcctgtaacctcctctgaactgcttctcatgaagctgtatgtttacaacaggtcagagatgttctcagcagtatcctccttcatatcatgttatagaaagaattctcaaaggattctatgtggaattcttttagctggacattaccccagccttcagcagacatctgaggtttgacctttgtgggtgcatgcaaataggactgccattaacgtgacttgggacctgtcttttctcttgcaggtgctgtgtacggtggctaaaagtcgcaggcttatttgtctttgtggtgctgtgctctgtgagtaccatggcatgctgagccttgctgtctgtttagcagagtccctgggtgcttcgggctgggtagcagggtgcctgaggtatgggacacacacacatttcttaggaggagatgctgagggaatgtgagatggcagtcgaggtggctagggagtcctgtccctagcaatgttcctctacttttgtcctactttgtacagtggaaaccatgagaatctggctgtggtctgtagagggcagcttgccctggggtcttaatccctactttaagtggcttgccaaattctcttttcaaacacatgcaacaagcactctttatttgtgttgggacatgtccagcaatcattgttgcccctaggaatgtctcagtgcccatttggagtggcgcccagctgtttgggagagagtgaagttctgtgtctgcctcttccctggagactgctctgattttacttgccctacatccccagggatggttgcagagctagaaccctgggggcaacctgggtgctcctctcatttaaggtgtcatgagtgtcattgccagcatctgtgtggtatgtgccttgatgtggccctagccaagaccacattataggcacttaaaatacatttgctaaatgagcaactgtgagcctcccccgacccaatctgtgtgtgtgcatgtggatgtgaggatccatgtctgcctgtgtgtttgtgtctgcagtcctctgtgggacaagtaggtcttttgtggtctgtaaccattttgatcttgtgtgtgtgcctagggagttatttttgcagttaataattattatctaattttagcattggcataggacactttgtatgggccatttttgagagaccccaatatgtgacagggtatgagattgtgagcaaggaaggggtgggtgagtagtgtttccatacttgtgccctgtggactccaggactggtgtggttatggctcttctcagcaggcagcctgtggtgacagctgtgctgggtgccctttgtgattggaagctgtgtgtgtgtgtgaccatgtgtagctgtaaatacatggtcttcattatctgtgtgtgtgggcatgaggactggggttctatgcatgtgcaggatagtgcatgacaagactcttctcagtgtgacgtgtagagaacaatgttgcatctcagacagcaagcgtgcatgaagtcaatattggttgaattgaattgaatataggcaacactttaataacccacaaggggggagaggaggggtccacagaaaggaaatctaggctaaagacaattacaatgaactgaaaacttcatgagtttacttttttggttaccaatttgcctctctacttcctattcaaacaattgtgtgtttctgaagacccagttgcttaacacagcctggtgagtgggtgtactgggattttcaagggtgtactgggaggtatggttgggctaagtctcccctgatccctgtgagctcacctgagctctgtgtctggtcttcactcttctggtaattgaaattttggtgttttgtggacacaaccaaagcagaatttgaggaattagttttgaacctctgtaatctgttatctcatcatcactataatttagtttctgagggtgtataagttgctctgaaaattccacagcgtgagctctcaccatcatataggttgtattccctactctcccatataggaaaaccatgtttaccctcctctgacaatttaattttagggctgggtagtcaatccttaaaactgtcaaatatcaataatcaaggcccattgcagcaaaaaaaaaaaaatagtttaatggatcagaattttaacttttaatatctcagaaaagctattcagagtaagcaagtaaattttggatacatcaagcagcacaattatcataaccctattttcagctcatcaaagttacttaaatcctattgctgtcacaccacaaatctatcattaaatgtttctgattgttgcagattttatttagcctgtatccagatcaaggaaagctctggcaattgctggctgtgtcaccgctggaaagctactgtatctgaaccttttttgagatggacagtcacccgtggttgagtcacaaagtgaaaagactattatgatggttgcccaaggtcacagcataagcaatcatgattactccccatgtgtgttttgttcctccaggatatttgaaagataacgcttcagaacataaagggagggggctttagtgagattgcagtgggtgggtggtagggagattccccacggaaaggtgacagcaaacagtgtatttcagttaaggcccagctttctgtggctgttggatgctctttctgtcctcccaaccaaacccccagcccctgacctcttatgttttagcttaaatcgttcctgtttacctagctttaagttcattggttctttccttggcagtgtcatctgagtttgatgattgcttggtttcttatcctctgggatcttttgccattttgtaggtctcagctgctacaacagaataccacaacctggatgacttaagcaacagacatttatttctcacaggtctagaggctggacatccaaggtcaggatgggctgatttggtttctagtgagcactctcattttggctttcagatggccaccttcttgctatgtctcctgtgtttgtgtatatgtgtgagtgtgagtgtgtgtgtgtgtgtgtgtgtgtaaagagtgagagctctctggtgtctcttcttacaagaacactgatactatcaaatctgggcctcaacctatgatctcatttactttcagttatttccttagagacccaggcttcctaggtgcctcagtggtaaagaatctgcctgtagctgcaggagacgcagaagacatggattccattcctgggtcaggaagatcccttggaggaggacatgaacattcagtccataggcagagatgaaattttaagcttgaaggtgaacacaccttaaattctatgggccagggggagttatgtaaatccaattgagtgttggctatgctatggtctatggttgccatggtaaccatcagtgccccagacacctggaatttctcagctttctttcatttctttctttcaggccctgcactattcctacccatccttcaggggtagggctgctttctcatcttacctgcccccagctcttagggctctgttgtactcttgggctccagatttgatgtgcttccctattaaattcaagctttcttagggatctccccattccactcattgtccctgtgagaactttctggagttcatggaagaagagcctagaagatgttagcatccctattcggtggcttaccaggccaaggtcaaggcctagtcgagaagagggctcagaggatcctgactccagtttggtcaaggaggaggttcttgccggtgcttctgagcccagcattagataagctctgaagcaaactgaaggagaagcctgagagactccacagttcaggtgaacctcacagatttgttccgtgcactgcagtagcacattgccagcagttcagaagtactttgctcgtgtgtctttctttccatcatgcatggccctttaggacatagttctctgttctgagaacaccagaacagagtagatagtcatgcttgttagaagaacagtatggagactgtgagccaggaactcccaggagagtggccctggtgctcacagtggggttgggtcaagtcaagctcgaaagacagcttaaatttgagtcatggatttgagtaatgggaaaagcaagaggaccatggttggatacaacagaggaagaagatgatttctttgtcttctctcttccatgacctggtctggctgggactctggtataggttcaaaggacttgaaggatgatactgaaaacaaatatttattagttagaccaagatgttttggggacataaaatgtggtgagaatcatgttggtctccagagaagtagagaaatgaatagcatgtagtttctttacttgaggagctagatcaggggggagaaaaatctaaaacagacaatagtatgttgtgagtgagcactttaacagaataagcctgatctacagaggactcaggaaggagtgaggatcctctcatgctgtggatgacaagaaagggtttaaggagaggagagcttgagcaagatcttaaaagatagtggggttctctaggtttgggggaggcctctgaggcaaaggcaaaatatgaccttagcagagcagacctttcagaatggctggaaggcaaggatcaaagctgtctgcagggtaggcttgaccacaggtccaagttgctgggatccttaagtcactgctgacaccagaacattgcagtgggctttgactcccaggcacaatgtgggcatctggaaaggcagagggaaaggagggcggaggtacatgtggtccagtgtcccttggattttgtgtgcactccatttgagtggtggttaatcatagtgtgttttaatcttccagctagggcgtgacacccccgcaaggacaaaggccttgttccattctccttgctttttgtttgcaatgtgctgtgctctgattagtcattcagtctgactctttgcaaccccaaagattgtaccccaccaggcttctctgttcatggggattctccaggcaaggatattggagtaggttgccatgccctcctccaggggatcttccccacccaggaactgaactggggtctcctgcattgcaggcagatcctttaccagctgagctaccagggaagccccataaacattcattacattattagaagaagcctctgcttttctgatattagccttcaagggtgctgatccatctcctgggtttttgcaaggtctctaaagtttcttctgtgctgaaatatcttttcccactccatacatatcatatgtctgccttgggaaaagaccaagacaggaataatttcagtgtggcagaatcatcagtgtctctttgggcctttccctactatatcctgcctcatgtgtgacttctgtttgccttttgtcctttttggaagccatgtagcagcatagctatgggtagatgctttctagccaagagctggctgcccattctcagctctaatataggaaacagtgctgataaaaacacttcctttttaaaaaatattaaaaattaattttaaaattaattttaattaaaaatttattttaatggggggcagattacttttgtattgtagtggtttttgccataccttgacattaatcagccatgggtatacatgtgtcccccattctgaacccccctcctacctccctccccatcccatccctcagggtcatcccagtacaccagccctgagctccctgtctgatgcattgaacctggactggtggtctgtctcacatatggtaacatacatgtttcagtgctattctctcaaatcatccctccctcgccttctcccacagagtccaacagtctcttctttacatctgtgtctcttttgctgtcttgcatagagggttatcattaccatctttctaaattccatatatatgcgttagtatactgtattggtgtttttctttctggcttacttcactctgtataataggctccagtttcatccacctcgttagaactgattcaaatgtattcttttcaatggctgagtaatactccattgtgtatatgtaccacagctttcttatccatttgtctgctgatggacatctaggttgcttccatgtcctagctattttaaacagtgctgtaatgaacattggggtacacgtttctctttcacttctgttttcctcagtgtgtatgcccagcagtgggattgctgggtcgtatggcagttctagttccagttttttaaggaatcttcacactgttctccattgtgattgtactagttttcattcccaccagcagtgtaagagggttcccttttctctaaaccctctccagcatttattgtttgtagactttttgatagctttcctgatagcagccattctgactggcgtgagatggtacctcattgtggttctgacttgcatttctctgataatgagtaatgttgagcatcttttcatgtgtttgttagccatctgtatgtcttctttggagaaatgtctgtttagttctttgtcccattttttgattgggtcatttatttttctgcaattgagctacatgaactgcttatatatttttgagattaattctttgtcagttgctttgtttgctatgattttctcccattttgaaggctgtcttttcaccttgcttatagtttcctttgttgtgcagaagcttttaagtttaattaggtcccatttgtttatttttgcttttatttccattactctgggaggtgggtcatagaggatcctgctgtgatttatgtcagagagtgaaaaacactttatttatcaggatatttttgtatttaaaaaacaaacaaacaaaccaagtgcatcttgttgggggaatttttaaaagggtttactattcactggcactccccaacaatctgtttaaatcctgtaaacaccctggcaacagtgaagttctgccttcgcccaagtcagccccataaaccacctgtttctttaagggttttaaggaagagtaaaggaattggtcactgaatcgtcctgcaatcagtgagctgctgttaagacttttgagaccttacacaaaacatagatcattttgagaatcattttttttttgcacctacagcagctttctctcctggagcaagatagctgggctagctgctgtttagaatccctggggtggcccccagaccttgcagcagaggtgagagtcagctggcacagagagaggtagcttgagagcacagacccttccgtgcagcacaccagcacggggtgtaggagtgaaggggccagattgtggtggggatgcaagggcatgagggttacatgttgagaggaagtagcatcttttccctatatcttccctgatttagtccttcacaagctttgaagggatttccctcttctcactgcaatggacttcactggtttagccaatttcggatttcttgttcagttctccctgtgatttctcaccagccaccttaggatttgggcattgctgtggattagttcatctgttcattcaggaggccatcctgcctgctgctcaccatgagtccaggaactgggacaggtgttttattctggctgccaaagtggtagcagagatgatcgtaggatgtgagacaccagctagatgttaaagcagatgattcaaaacacaattaaagaaaacaaaaccaactgtgtgtgtcaggagtgaggggctgaagaaacaggagcaggcagggaagatggaagggatggcctggacattcctttccttgtgtgcctcccgagatgggtgttccctgggagggtgggggcggaggggggtgcagtccaggcctctccctcttgtgccgtagtttgccttgacactcccccagctgtgaacctcagcagccatgcagactccatgctgctccaggtgggcctggcaggggccctggtggccggcagccccagtcgtctcgggagagaagaacacgtgctggtggaggtgacccaggccaacactccaggctccaggtggcggcagccacagcaggttacacctaaaagttacttgaaaagaattgtaaaaaatcattttatttctttataaattgaatttcttcttgaatggatttgatgggagccaccattattaggcaagccattatcttttactttgtcatggaaattctcttttctctaaggtggttataaaactctcaccatttcagtaaagtcaggcttttgaggtttcttttttttttttttccaatttagagtgttttttttttttttttttttgacaattcagggaaacatatttttgaaagtgcagttaaatctgagccttaccttatggtacagaagatagttcaacaccatggttcccttgagtttgtggactcttagctaagactgtgtctttccccgagcttcttcttctgtaccaatatgaccttgtgctcagcatctaaggcaaggactttagttcacatcctgcaaaggttaggagagccagcagtcctagccaccatgtcccagagcccagacaagtctctctctcgtccccaagatcctggcctcagggactcccctggatttccatgatgacttccatatgaagtcatatccctagttcacagattttccctgttataactaatagaaggaaacgctgctggtatatgaggctgtgtcatccaaaatggagtataactgcagtaatggtgggtacagcacccgtcacatttttctgccatacagagcagtgtccccagagccagagtctcattatgaagaaggctgcggtttcatggacaatggctgatgcagcactgatgttctaaactggttgctctggccatggtcttaggacataaacttggcttccctgtatgcattgcctatttcgctggcaagggttcctcagtaaagatgagatgggcacacttaatctgctgatggttccctctgtgaccttgtgtggaggagggcatgaccttttgtagcctgctgacacatcagcagttgcctacccttgggtctgtattgagcttcctggctccagaaacacaacacaggagatttttactgaaggttttttttttttttcttttttctgatacactctttccaaacatgaaagttttaagataagttgtgatctctcattcaggctttgaccagtttcagagttcctgttttttattttctttatgatttgtgggtggcaagacttctgtcctcccactgaaatttccccagcagccacagccaggcctcccacctttgccccaccagcacctccatctctgcacacatctggcccctttcatctggcttttccactctcctgcccttgacaagggcacctcagcctgtgaaactgaagctcatcctcagaccctcctcccacaggcttctgggacctgggtgtggagagtttcctgcctccagtttgcaaacagaaagcagtctttctggtcagttgcctcagtgggttcagaagactgtctccaatagcatgcagtgattttcttttctctaaataggttatatttacttctctatttttgtgtctttgtacatgaattctgtatttgtatttctatattctttttcttaagcacagctctccaaattatggatgtttccagctgcacatcacctggctgtctctaacatctctatgtgaaaaggacttgtgctcttttctttcttcttattctagacaagcacctgccctgaacactgctggaccccagctgatagcccagattcaaagccttaccaggatttcatgcttcgacttttgcaggtcactcataactggactatatttttaaatccaagcagaagtgagcacgtggtggtgagcaggacctttgaggttcttagcaggtaggtcttggtgactgaagtctcaggaaagctcctctgggacatgttccctggagaagtgtgacccttgggactccagttatgaatagctaggcaagttatgggcttggagttgctccttttgtgtagccagtgagcatgagtctgtggcaggcgtcaaaaccacaggtgtcagcaagtaagactgcagaacccattttgaagcaaactatgttttacagctgatactttaaattcattaatatcatgaagctacacagtggggaattctggtataccttagaattcttttttctgtaacgtcactccattgttaagtctgtacttttggttactatataagttttctaggcctgcttatataaataccacagagaggtggcttaaacagtagacatctatttcctcaagctgtcagcagggtatgtccctcctgaggcccctctccttggtgtgtggatgctgtcttctccctgtgtcctcacgtgctcatcactctgcatctctgtgtgccaaattccttttcttacaaggacaccagtcatgttggtgacactgtttttcacttaatcacctttgtgaagaccttatctccaaatacagtcacatcctgaagtatggagaactaagatgtccagatatgaattttgaggggacataattcagctcagagcagttactgaaattttagagtctttattttcaccaggccacatactattgatctgcatgcttcttgttcttggtgttttcccaccattagtgacaacctgactacctgttctcaggttgcacatgacccttttccaaatttctcacatgtgagaatcactggatctgctatttgttagcatgggcttctcaggtggtactagtggtaaagaacccacctgccaataccagagtcataagagacacaggttcgacccctaggtcgggaagatcccctggaggaaggcatggcaacccactccagtattcttgcctggagaatcccatggacatagaagcctggctggctatagtccatagggttgcacagagtcagacatgactgaagtgacttagcatgtgcacaaagcaatcagatgtgtggtgaggaggaagatggagaattaaacggtttgaaccactgtgaacatccttgctcctgttcattgccgtactggtggcactgtggtgaggcaggcaatgcctgatggaggctgaggagctatgtcagaggggcctggctatggggaggctgtgtatatattcacgtggcttgcctgtgctcagggctccttatttggcaggttaggcactctgagatcggttcaggctctggttatagccatgggcgactggtgttgggaagaaagctgagggagcaagtactgatggttgatgtcaggtctgtttcctttatcagtggtaagatatttgcttcattcttcagagagcctgtttccatcagcgtccacgtctccctccagcagacccagactgttcctcttctgatgactcatcagtacctccgagcaagtgttgaagaacaagtgaccattgctgcggtcatcctcgctggggtctacgtgctaattatatttgaggtaacttgcatgcctgctctcctgggtttatctgtgcccacaggtaagtgtattttaacatgttgggtgctagggatgggctcagtcttgcattttaattgaattgaaatagtgtctttcctaaaaagtgacatttccctcattctaggtagaaaattgctctgtactggaatatttgctgaatcttggcagttgccatatgcgagatgagttttgccaggcactagaaaaattttattgagaaaactgaatgtgcacatgattttctcaccctcaatttgatgctcacacagaatgcccctgaagggacaagtgttgaaactttctgagaatcagggtcttcgtctgtaaaatgggcatgttaaaataccccctatctgcttcataggattgtgtgcacaatgaggaccttggagaccttgggctatgtgtggggaaggattattatctgttatgtttatcaactcagctaatgagccgaatcatttcatgtcccatcaattcagtgtttctgggaaattttaagtgtggctataccttcaatagcatgaaacaaagtacagacactgcctgactgggcaggtccattgttgttttagttgtgaaaccagatttacagcaacacacagatgggactcttggctccactgggctgagcctggaggatcaggaggtgaaggtgaaggtaaaagagtgttttttctcaaaatatgaaaagtgccctggagcttcaaggaggtgatctgagggggggagtggccaggaaaattctcagaattccttgaggctgtctgatctgtctgtgaggaatgttggcttcagcaggttgagcccctagttgtccaacaaggtccatccatggatttagttgctctgtctcatttattctggggcagctctattctgtacccccccatcaatattattattgtttctgggttcctatgatcacacacacactctgtgatcaggcagagtctggaggaatccaggagcaagtttctgagcagttttctcctcaaggagccacagaaaacatattacttcctccagtggcattgtttaagggcaggctgcttgagacatagagcgcaaggtttttgttgaggtgattttataatcataaaattaatacacagaaatcccctgcattccaatacactaacaatgaaaactccaaaagagaaattaaagaaaaaaacccattcaccatcacaacaaatagtataaaatatctaagaatcagttcagttcagttcagttcagtcactcagtcatgtccaactctttgtgaccccatgaactgtagcacgccaggcctccctttccatcaccaactcctggagttcactcaaactcatgaataaacttacttaaagagacaaaagacctgtatgcaaaaagctataagacactgataaaagaaatcaaagaacatggacagatgaagagatacaccatgttcttgcattggaagaatctgtattgtgaaaatgaccataccacccaaagcaatctaaagattcaatgcaatccctatcaaattaccaatggcatttttcacagaactggaacaaaaagttttacaatttgtatggaaatacaaaagaccccaaataaccaaagcaaccttgagaaagaaaaatggagctggagaaaccagctttcctgatttcagagtatactacaaagctacagtcatcaagacagtatggtacaggcacaaaaacaaaaatatagaccaatggaacaagatagaaagcccagagataaacccatgtacctatgggaatcttatctttggcagtggaggcaagaatatacaatggaagaaagactgtctctttaataagtagcgtgcaaaaactggacaactacatgtaaaagcatgaaactagaatacttcctaacacagaacacaaaaataaactcaaaattgattaaagactaaaatataaggccagaaactataaagttcttagaggaaaacataggcagtacactctggcataaatcacagcaatgtcctccaacacctaccacctagagtagtcaaaataaaaacaaatggaacctaattaaacttaaaagcttttacacagcaaaggaaactgttcagttcagttcagttgttcagtcatgtctgactctttgcaacctcatgaaccacagcatgccaggcctccctgtccatcaccaattcccagagtccacccaaacccatgaccattgagttgatgatgccatccaaccatctcatcctctgttgtccccttctcctcctgccctcaatctttcccagcatcagggtcttttccaatgagtcagctcttcgcatcaggtggccagagtattggagtttcagcttcaacatcagtccttccaatgaacatccaggactgatctcctttaggatggactggttggattatttacaggaaactgtaaacaaggtgaaaagacagctcccagaatgggagacaataatttcaaatgaagcaatggccaaggattaatctccaaaacatataagcagctcatatagctcaatgtcagaaaaacaagcaactcaataaaaaaattagcagaaggcctaaacagatatttctccaaagaagacatagagatggcaaataaacacaggaaaagatgctcaacatcactcattattagagaaatgcaaatcagaactacaacgaagtatcacctcacaccaatcagagtggctatcatcaaaaaatatacgaacaaaaaatgctggacaggatgggaagaaaagggaatcctgcgctgttggtgggaatgtaaactgatacagccattatggagaacagcatggagattccttaaagactagaaataaatctaccacatgacccaggactcccactaccgggcatatactctgagaaaaccacaattcaaaaagacacatctacctcaatgctcattgcagcactatttccattagccaggtcatggaagcaaccttgttgtccatcaacagagaaatggataaagaagatgtggtatattactcagctgaatataaaggaacggatgtgaatctgttgtaataagtcagaaagagaaagacaaatatcatatattaatgtatataaatgggatctagaaaaatgatactgatgaatctatttgtagggaaggaatggagttgcagacatggagaatggacttgtgcacagagtaggggaatgagtgggtgggatgcattgaggaagtagcattgacacatacacactataatgtgttaaatagatagctagtgggaagctgctatatatcacagtgagcccagcctctgtaatgacctagaatggtgtgatggggaagagaagggaagctcaagaggcagaggatacacacacacacacacacacacacacacacacacacacacacacacacagacatatgctgctaagtcacttcagtcgtgtccgactctgtgcgaccccatagccggcagcacaccaggctcccctgtccctgggattctccaggcaagaacactggagtgggttgccatttccttctccaatgcatgaaagtgaaaagtgaaagtgaagtcgctcaatcgtgtctgactcttagtgaccccgtggactgcagcccaccaggctcctccatccatgggattctccaggcaagagtactggagtgggttgccattgccttctcctatataacgactaatttgtgttattgtacagcagaagccaacacaacattgtaaagcaattttcctccaattaaaaaagaaaagaaaaaaataagaaaatatcacattatgcatgactgtttctcctaactctcaaagaatccagatgtacacaggtggtctcagctgttcctaccctccctctcctgataccttgcctttgcaggtggcacttgtggtaaagaacatgcctgccaatacaagagacataagagacgtgggttcaatccctgggtcaagaagatcccctggaggagggcatggcaagtcactccagtattcttgcctggagaatcctatggacagaggagcctggcaggctacagtccatggggtcgtacagagtgggacacgactgagtgacttagcacacacagaggaaagacagcactgtgggttagtctgggatcagaaacgccaacacagcctagcttgggtgctatccccaaaccacccttccctcacagacacattaatgcacccatgctgaggcgatttgtttggtaacatacagaccctgccaaaccatcacaggtagaaacacacagatgagtttctctcaacattacagatgagagaagaaagtgggtgtgctggctcttatgtgaagtgcctttgacactcagacctcaaagacagtgatgagacaatgaggtggcacctggcccacccctcagacgtggcccctgcttctcctacacacagaagaccctgggcaagaggaacagtcacaagagcagtaggggttgggggagaaagagcagagacctttgttgccaggccctcccaaaccactggccagtaggtgaaccctctttcattccttatgaagcttcttaggcaaactggactccttgatggaaggagatggttcatggcaacattctcagaggagactccagaatagcaatgggtgccataagttccctccagtggcagtgcagtgagaagtgcagcagtcggtgctcccccaaggtaggtccccaactcagcaagagtctctccagctatttaagaaccaggctcagcgggctctggcaccagaaagagaaggcaccatccctccctgtaggggtatggccacctcctgcatccagccagcctctcagcatctgcacatgtggtcaccaggcctctgctcactgtaatctataagagacccaggctgcttctcacctgggcaccactgaggcaagaagaagggggagtctctcttctcatatcccaacaagcagaacacagttcacaaccaaatctgacttcagagggaagggtgggcagttcaccatgcacaaggacaagaatgcattcacatggaagaacaagcaggcaaggtccaccactttcaaagaggccaaagcacactcttcctaggagataagggagggtagaaagaggatccacctggaaggtagcgcagtaagcagagcactgttactacctcgtagccagacaagacccagcccaggaaaataggagctggcccaggtcttccaccagggcacagagaggtagggtgtcacctcaagggacagccagttcatgccctacaaaccaaaaagttctctaagttttgcagatgaagaaagtgaaatgtggggaatttacttagcatcaaaaagcccataatcatcctactacatcatggcagtaagaaacaattggcaaacacggccttcaattggacgcacattgtaagtgctaaaatgcctatgaaacacagaatggtactgaattcaaggcccagaactgtaccacttgtacactgtcctgggaatttttagaaacacaggattcagaaccgaggaatgtctaggaaacccatcaccatgtttcacctatcactatggatcagttggctcctgccattgccctcacgtactgggagggaaggggctcaagaaggcacaggtacctccttaaacaggggtgctcctgctgcccaatgctccccagtccaggagaatttatatgagatgacacaaagcaaaggcccccagagctcatgtgggatccctagagagcaaggcacacatgcagtggcatacagttgcttggggacagtgtacagcagccagcacactacatgggcagaaatggcagccatgggagttccacatatctgcagatatttaggtatctcattctcctgatgagtctccctgcactttatttatccttacatttaccaaagtagcccaaggaagaagattagtcaaccatctcacgttttgaacgtttaaatgtaaactgggagatgatgtcagcatcatggcagcatgagctagccctccttttcgtcccccgtttctgatagctaactaggcatccatccacaaagaaaaagtacctctgcaggagcagtgagattcaaaggacctaggaagagcctctcctgcctgtgcatccgttaataagcaaacacactagcctaagctgtgaaaccagcaggagccagcaatggcaacctcatctctcttggctgctatcagggaaaacctagacagtgctgacctgagcagatagccaggaacaggagaaagtttgtagaagcccagcctttctgagaggaaattacagcatatcactgaaggaaaacaatacaagttaggacacactagagagggtaataggaccatggtcagcactgcccgtctcctaaggccacactccatcgggctgaactagctgacaggaagtaagtgcttggcttccccagctgtgcaggatgcaggaagagaaccaacttctctctgccagaaccagagtactcaggcagggcatccatgcctgcagggagggaggtcaggaaagagtcaagtgaaactatcaaagggcgttaaaggaaggcatttcctgctgactgcactcagcacttcagcaggaaatctgatttttgacctggagaagctcatcctaggatccccccaaggcctgcagccatccctaactccaacctctccctgttttcccctactgcctttgtagtggctcctagcacatgctctctgtgtggtggtgagagcactgttggtcaacagtagatggaatgctgccagaaaacagaccgaccatgggcaaaggagaactgcagctatagcaccacctactgccaataaaagaggcttttccagtgctagcctggtgagctgcagagccggagaacacataaaagcatacaaattttgttacaagaaggagcaagaagagtgcagcaggtgtgtccacaggagatcagggaaagtatcaggtgtaacagaacaaacgaacagtatatcccacctgaatacaactaataaagatttgaggagatgtctgctactttgccgacaaaggtccatgtagttaaagctatagtttttccagcagtcatgtacaaatgtgagaactggaccataaagaaggctgaatgccgaagaattgatgcttttgaactgtagtgtcagagaagactcttgagagtcccttagactgcaaggagatctaaccagtctatcctaagggaaatcagtcctgaatattcattggaaggacagatgctaaagctgaaactccaatactttggccacctgatgcaaagaactgactcattggaaaagaccttgatgctgggaaagactgaaggcaggaggagaaggggacaacaaaggatgagatggttagatggcatcactgactcgatggacatgagtttgaacaagctccgggagttggtgatggacagggaagcctggcgtgctgcattccatggggtcacaaagagttggacatgattgagcaactgaactaactgactaactgactgctacttcaaatgagaaagcatcaatgtaaagctacaaggaatatgaaaaatcaaggaaatatatcatcaccaaagataacaacagtcattcaataagttaactcaaaggcacagaatattgctatctagctgataaagcatcaaaagtagctatactaattcagagaacaaagtactggttacctgcagggagggagtagaggcaaaatataagggtgggagagtgggaggtacaaattattgggtgttaagataagctacaagaatgtattgtataatatgaggactattgcaaacattttgtaataactgtaaatggagtgtaacttttaaaattgtaaagtaattagcctccaattaaaataaataaataaattaaaaatagttatactgaggatactcaatgagctacaaggaaagataaaaagataattcagtgaaaccaggaaaacaacacacgaacaaaatgaggaaattaacaaatgaatagaaatcatgaaacagaaacaaacagaaattctggagctaaagaactcagtgaggaagatggaaaatgcaatagaacatcaacagcagagcagaccaaatggaagataaaataataagtgatcaagaggaaaggaactttgaataacccaatcagaggagaccaaagaagaaaatgaaaaagagcaaagaaaaccttcattgtctgtcagatgttcatgtaggataactggattccagaaggagacaagtgagagaaggaggaagaaagttaatttaaagaagtgattgctgagcttccagttcagaatggcagagtagaagggtgggcactcatctcctcctgcaagagcaccacatcacaaccagctgttgaataaccatccacagaagggcactggaacctaccaaaggaaaaaaaaaagatgccccacatccaaaaacaaaggagaaactgctgcaagacagtaagagggacacagtcacagtaaaatcaaatcccatacctgctgggtgcgtgacccacaaactggagaacattaataccaaagaggttttcccactgttgtgaaggttctgaaccccacgtcaggctttccagcttgaggatctgacaaagggactgggaattcccaagaaatttaccttgaagtccagccggatttgattacaagacttccacaggactgggggaaccagagattccggtcttggagggcacaaacaaaaccttgtgctcatcaagactcagagcaaaggagcagtgactccacaggtgactgaaccaaaacgacctgctagatttggcgggcctcctatggaggcgtgcgtcagaaggggctcaccacagtgatgggggtattggcagcggcagtctgggaaggtcccctaaggtctaatggtgaccctcttggaggtcaccattaactggaccatagagtccatagacttgagggctgggtcttctcaggtcaaaaaactaccagggagggagggcaaccccactcatcagcagataactggattaaagctttacggagcaaggccctgcccaccagagcaagacccagtttttcccaccaccagtcccttccatcaggaagtttacacaagcctcttagcctcctccatcacggggcagacaaaagaagcaagaactacagtcttacagtgactaaaactaaaaccacattacagaaaggtaatgaacatgaaaaagcagaaggttatgtcccagatgaagggacaagatgaaaccccagataaacaactaaatgaagtgcagattggcaaccttccagaaaaagaattcagaatattgatagtgaagatgattcaggaccctgaggaaaaaaatagaggcaaagactgagaagaggcaagaaatgtttaccaaagacctagcagaactaaagaacaaacaaacataaataaataatacactagaagcagggatcaagaccatccccatggaaaagaaatgcaaaaaagcaaaatgtctgaggaggccttacaaatagctatgaaaagaagagaagcgaaaagcaaaggaaaaaaggaaagatactcccatttgaatgcagagttccaaagaatagcaagaagagataagaaagccttcctcagtgatcaatgcaaagaaatagaggaaaacaacagaataggaaagactagagatctcttcaagaaaattagggataccaaggggacattccatgcaaagatgggctcaataaaggacagaaatggtatggacctaacagaagcagaagatattaagaagaggtggcaagaatacacggaagaactgtacaaaaaagatcgtcactacccagataatcacgatggtgtgatcactcacctagagccagacatcctggaatgtgaagtcaagtgggccttagaaagcatcactacaaacaaagctaatagaggtgatggaattccagttgagctatttcaaatcctggaagatgatgctgtgaaagtgctgcactcaatatgccagcaaatttggaaaactcagcagtggccagaagactggaaaaggtcagttttcattccaatcccaaagaaaggaaatgccaaagaatgctcaaactaccacacaatctcacatgctagtaaagtaatgctcaaaattctccaagccaggcttcagcaatatgtgaaccgtgaacttccagatgttcaagctggttttagaaaaggcagaggaaccagagatcaaattgccaacatccgctggatcatggaaaaagctagagagttccagaaaaacatttatttctgctttattggctatgccaaaccctttgactgtgtggatcacaataaactgtggaaaattctgaaagagatggcaataccagaccacctgacctgccgcctgagaaatccgtacgcaggttcagaagcagcagttagaactggacatggaacaacagactggttccaaataggaaaaggattacgtcaaggctgtatattgtcaccctgcttatttaacttctatgcagagtacatcatgagaaacgctgggctggaagaagcacaagctggaatcaagattgccgggagaaatatcaataacctcagatatgcagatgacaccacccttatggcagaaagtgaagaggagctaaaaagcctcttgatgaaagtgaaagaggagagtgaaacagttggcttaaagttcaacattcagaaaacgaagatcatggcatctggtcccatcacttcatgggaaatagatggggaaacagtggaaacagtgtcagactttatttttgggggctccaaaatcactgcagatggtgattgcagccatgaaattaaaagacgctcactccttggaaggaaagttatgaccaacctagatagcatattgaaaagcagagacattgctttgccaacaaaggtccgtctagtcaaggctatggtttttccagtggtcatgtatggatgtgagagttggactgtgaagaaagctgagcactgaagaattgatgcttttgaactgtggtgttttagaagactcttgagagtcccttggactgcaaggaggtccaactagtccatccttaaagagatcagtcctgggtgtttattggaaggactgatgctaaagctgaaactccagtactttggccacctcatgcaaagcgctgactcattggaaaagaccctgatgctgggagggattaggggcaggaggagaaggggacgacagagaatgagatggctggatgacatcaccgacttgatggacatgagtttgagtaaactcctggagttggtgatggacagggaggcctggtgtgctgtcattcatggggtcacaaagagttggacacgactgagtgactgaattcaactgagaagcaatcaatagcagaataactgaagcagaatggataaaggacagaatggtagaaatcactggcacagacagaatatagaaaaaataatgaaaagaaatgaagacagcctaagagacctctgagacaacattaaatgtaccaacatttgcattataggggtcccagagggagaagagagaaagagagaaaggacctgagaaaatatttgaagagataagacctgaaaaattcacagacatgagataggaaatagtcaaccaagtccaggaatcacagagagtcccaggcaggataaacccaaggaggaacacactgagacacatagtaatcaaactgacaaaaattaaagacagagataaaatattaaaagcaacaaagagaaaaacgacaagtagcatacaagggaactcccatcaaggtattagctgatcaatggcaacccactcccgtactcttgcctggaaaatcccatggacggaggagcctggtgggctgcagtccatggggtcgcaaagggtcggacatgactgagagacttcactttcacttttcactttcatgcattggagaaggaaatggcaacccactccaatgttcttgcctggagaatcccagggatggcggagcctggtgggttgctgtctctggggtcgcacagagtcagacacgactgaagtgacttagcagcagcagcaacacaaattctacaagccagatatatttaaaattatgaaaaggaagagcctacaaccaagaatactctacccagcaagactcttcttcagacttgatggagaaatcaaaagctttccagataagcaaaagttaagagaattcaacaccattaaaccagctttacaacaaatactaaaggaacttctctaggcaggaaacacaagaaaaggaataagacctgccaacagaaaataaacccaaaacaattaaaaaaatttttaatacatatagataaccaccttaaatcacctttctttagaaagcagactggtgatagttgtgggcatccagactttgaaaaccatgatttatctattgtcctaaattccctggtggttcagcttgtaaagaatccacctgtaatgtgggagacctgggtttgatctctgggtttggaaaatcccctggagaagggcatggctaccactctactattctggcccagagaattctgtggattgtgcagtccatgggatcgcaaagagttggacacaactttcactttcactttcaataggtatggtatagaatggccaatcttcacatatacttataccaatacagtcttctgtgtgttttaaaatcctgtggattagagtgaagtaatgttctatgcttctttccagattgttcacagaacactagcagccatgttggggtccctttcagcattagcagcactggctgtgattggtgatgtaagttgtaacattttgagtcaaaggcttagcatttgatagaatgttagcttcaaagacagtccaataattaggtgttagatggttagtttttaatatactatttcacatttcctgttaaaggcatgaactaatgaactttatagcattgatgagcaattaacatttgactttatcacacacaccccatcctagctgaggaaaagctcatgatggtcaagtattcatccaggccatgcacctgagcaatgttagagccagccatatgcactgtcagcccttggagaccaggggaggccatcctggctggagcagagaggtgggagacagtgaggttggggacagacatcaggaggtccctggaagtgcatgtcccctcaggatctgagcatgttccatcctgcagggacattggaatgaatgtagagaagcaagagaggccaaatactctggagatggaggcctggggttgtttgaggagcagtgctgaactgaccaaggtggccacacatggaacttgggattgaaaaaaaaaactctgtagaatttcagagattgctctgaaaaatgtttctaaaggccaatcagtcaaccaaagagtaaaaataatatgtgagactttgttatttatttatttttcttttttatggctagaattggtataaacaaacactaactctcagggtaaaatgtcccagaatcctaaaacttacacataaacctctgttattttgattaattgttaaggagtagtgtagtagtagttatttaattttggaaataattgatgtggcacatgccttgtgctgcaggaaaatctctggaccactgtaaagtcctttttcaacaaccagactctccaagtgtcctcacttcccagtcagggctcccagttccccatgatcctaccttcccttagggacagggacagggcttaagaagtctgcctttctcattgacaagtgcatagttttgatgtgacgatgctttggatcatgactgtttttcagtaatgatataataggatttcaaaggcaagtggacggtgcgatttttgtgatttttaactctggccatgagtgggttttctgtaaagtgcacatgtttacagcttaacaccaggaggatgatgcccaggactaattagctaatttgtggtttgattgcagagacccagcctgacccatgtggtggagtggattgattttgagactctggccctgctgttcggcatggtaatgacagtcctcccggtgggcctgggccccaagtttgctataacctgggactttctcttttactgctgtcactgctaattcttaaggacaccatgctgcttgactgttagggcttgactgagaagtgtttgcaggtctagctaatttctcctgatgaggaatggagtgattggtgctctggttggttagctggaaaattttagcctaaagcctctaacagagaaataatcttgccattgagaaaatttggcagttttttgagttactgtcctaaaatataaaatgatatatcttaaaaaaatgaaccatataaatttttcagtgattgaaaatgtacctttaattatatggataagggaagaaaggaagaaattgcccctaagtaatagtttgttaatttaccatattttcaagtgaccactctactgcatgctatgaagagtgtcaccaaatcaatctgtaggaagggaattttaagacaccctagtgagttagagtggaacatgagtcataaacagatttaactggaataaggggaatttgacaagggtctggacagcagtgggaaaggctcatgtgtttttgaacagaccccacagtggctgcgtgatctgaaggagggctgtgctgctctaggcttcaatttgatccaaagtaactgtctcctttgtggatgcagtgtgggattcaggtcagtgctctgaatccaggctttatagagaaactaatgtttgtattgggttctgaaaagtatatagggtttggatatatggaaggaaaaaggaaggcataccagatatctcataaggttttgttataagaaaagcttaaatgattggtgtattagtttgctgggattgccataataaagtaccatagactgggtgacttaaacaacagaaatgtatttcctcatagttctggaggctaatgtccgagatcaagatgtctgcagtgttggtttcttctgaggcttataggtgatcatctgctcgagtcctcacatgattgtccctctgggcatgtctgtgtcctcctctcttcttataaggtcaacagtcatattggattagggcttcactttaattatcctcagtacagttatattggattttaacaatgaatggcttaattttttctcagttggaatcagttcaacaaggttctatatagaacttcggggtgtgtgtgtatacaaagacagtctgtataactagaaccccatcttttttaccctgtttcttgccagtcatccacccatgggaccactcacccagtccctgagttccagtctctcttgggtggttctggcagcagacatgtgtaacagtttcaccacaacaatggaagaccacacaggacctacccattcacattcatgtgtagcttccattggtgtgaagcgccatgctctataaatggcctcacagtggccatttggataggatgaacaatgatggtcattataggcaaggtagagatttgtactgttttgcactgtttttgtgaaacacagttttgggcccactattttgtaaagtactttagtttacataattctattgaattatcacaacaaccttacaagggaataagacatacagaagtaaggtgagaaaaccaaagtacagagaattaaataaatttttttgctcaaggctctgtttgactgtttgcaactccatggacagcagcatgccaggcttccctgtccaccaccaaatcctggagtttgctcaaattcacatcgagtcagtgatgccatccaaccatctcatctggttttgccccattctcctcattccttcaatctttcccagcatcagggtcttttccagtgagtcagttcttcgcatcaggtggccaaagtattggagctttagcttcagcatcagtccttccaatggatattcagggttgatttccatcaggattgactgattcgatctccttgcagtccaagggattctgaagagtcttctccagcactacagttagaaagcatcaattcttcagcactcagccttctttatggtccggttcttacatctatacatgactactggaaaaactatagctttgactatatggacttttgttggtaaagtaatgtctctgctttttaatatgctgtctaggttgatcatagcttttcttccaaggagcaaaagtcttttaattttgtagctgaagtcactgtcctctgtgattttgaagcccaagaaaataaaatctgccactatttccactttttccctatctatttgccatgacgtgatgggactggatgccatgatcttagttttttggatgttgtattttaagccagtttttttcactctcctctttcactctcatcaagaagctctttagttcctcttcactttctgccattagagtggtgtcatgtgcatttttgaggttgttaatatttctcccagcagtcttcatttcattgtaactactcttataaattttaagccagttaaaaaaatatataatttaagtcagtttaaaagtcttaaaacttttaattgttgcttgtgtgaacacctaggtgcaaaaggccacattttattctatttcctgccctatttctagctttgtgactgtgagcaagtcacttttcctctctgcctgacagtttcctggtctataagtcagagagtaattataacgcagatgtttactgtgaagttcagatggaatgataatgtactttgggcacatactcttggacaaatgtaaaggtgcaaatcttctagtaaggggcttgattcagagagttagtaagtggaccacactcaacaaaagagtgagacgtttgatgaggtggtagctttcatatggaggcgagagctcagatgtgtaaatggtcactgatgtcatttcaggatggtgctctgaaacattctctgtctcttttttctcttttccctatagatgatcttagtagccatattttcagaaactggattttttgattattgtgctgtaaaggtatgtatgatgtggcatttaattgttatgtatcaattgatactttttttctatcattacatatttatagtgaataaaactatgtttcaaagcaaatattttaaaattctgtcctccttttcaaaatcactgctgcaaacctgagtataattgctatgctaaataaagtgtctttgagtatcactttcagattctcaacaaataaccaaagaagaggatccaggagactagtattcaagttgactatttgtgtgatggtgttcaaattggcaggttgagagctatgcaccaaaactgttttgcacttcagagtaaatattttaagtcatcagtttctgattactctgcttttaagtgaaataatttcaatgattactttatgacattgaacatataagcattcatttttataactgggaccctggggaatccttcaccattttctgactggtagaatttgtgttgatcctatcatcaggattgggaggaaaagactaatgcaaactagggtgaggcttgaattttttttttgaaactgaaaagttcttttaaaaaattagttatttatgaagccctttccaaactttgaatgatagaacgatgttgtgatttttgccaattttgtgcactatcttgcacctcccaggtagctatctggcctcttcctcccaataccttgaaatgagaattggagggaagaagtgtaggcctgcatggatttaaaagttcaggtccagtcattactgcctcatctcagcaggtttaggagtttgtaggtctaagttttaatccaccatgtagtgtttatttagacccttagttcttagagtccctaatgaaaagttgcatctgttttctggccccattggtcctagcttcttctttattgcattccaggcataccaattgtctcgaggaagagtgtggaccatgatcttcatgctgtgtctcgttgctgctgtcctttctgccttcctggacaatgtcacaacagtgctcctcttcactcccgtgaccataaggtatgcaaagtggccttgtgtggacatcaggccagctgatggcagtgtgtgctggctgccctcctcccacatgatggggtctgacctgcacatccactgggactgtggctctgactgcacagctgtgatggcagtagcagtggttgcagaaatgcctacaggaatcaggacacacaaatgtttatgtcctgtgggacagagcatcacgggccaggagttctactccatgggctctatggagttctcagccagagagcaggaggtggggctactgtcttgctctggcaggatccttgtgggattattggagggttgcaagacctggcctggcaaggcgttgcaaggtaactttgggaaagagaaattcagtttgattccattttgctccttttaattccacccatttcattagtgggactgattgcatggggcctcctggggcttgggcttcagcctgtgattgtgcagccccttccaaggtcatggacctacacttttatctagacgttatgtcctttattttaaagatggttcttagcatatcctggtcttcccctgcttcgactcaacatgtgctggtgctggctggttctagagagaccgaggggttacaggtatgcctggtggcttctgggaagctaggtagtaaggacatttttctaaatgtcctcacttcagctgaggacaactctcttcagctgcactgatctgggttgttccatcaaaggaattaaaacaagccagcgttctgaggattctaccagataagagattctcctgcttatgaggcatgagactcagcaagttcaatgtcaccaacaaggggctacttccagagtgcaggactaattctgggtgatgcctttggtgtttgggagagtagtgactctcagaggaggagcaagttagaatgtggagtaggaagaggagaaggaagggtagagaggaacagagagttagcagcagcccatggataggcctgcagtgttatgagttaatctgttgcccaggcttctgcaagcctggctgcattgtcatggtccatgtgcaagtatggatttgaggggcaaaacgctacatttagtcttcctgcacagggcgtgtagcacctcccaatatccagaggtataattcttctgagggtaaatggtggataaagcatatgctaaaaccaaccctgcccctggacacttcagtgggaaagaggcagttcacacctaccaccctccaaccagggcaactctgctgctgacagtggtttgaaaccatctcacaatgtgccagattccagcaagtcactacacactctgatgatggcaccctgattctcaacatcgctgtacagcttgcacgactgagggttgtctcagccttgctgggatttgtttacatcctcactctgctaggaattggctttgtaattttatgtgagaatcagttcagttcagttgcacagtcatgtctgattctttgctatcacgtggactgtagcatgccaggctttcctgtccatcaccaactcctggagcttgctcaaactcatgtccatcaagtcggtgatgccatccaaccatcttatcttctgttgtccccttctcctcccaccttgagtctagacaccgggattcatagtctctggagaagaattcaatctggggtcaataacaaggcttgatctctcagagcttatgtgtatttaataaagttttattaaagtataaaagagatagagaaagcttttgacatagacatcagaagggggtagaaagagtacctgcttgctagtctatacctatcagtgagttcttaattagagaaaggagatgattcaaaactcagagtagcaccaggtccctcaaccacaacatacagtttgagataacattggcaccaggtgaatcatcccaggccataaaacgatcgacatgaatcttgaagaaaggcaggtttccaagtaaatatatagtttcattaacatagattaggagaacaatgtatcagtaaaacatacaggtttgttgagccccttataggttctgagtcttaagcagaacctatttgaagagaatctagggtaaatacatagttcattaacatagcttaagaaaagcgtttccataagaaaaacgcattggttagctcaaggtttgagaagttaggttcaggtggagccaggtgttttcatggcaacacagaattttaagataaaccttttaattttgtatagagaaggggaaaaaatctgacacttgtagtttgtttcctcctgccgcttaagagagaaataaaaaacatgtgacccttgcagcctatttccttcatttggagaccccctagccttcctgtctgttaccctctcaccagcatcagggtcttttccaatgagtcagttctttgcatcaggtggccaaagtattggagcttcaactttagcatcagcccttccaacgtatattcaggactgatctcctttaggattgactggtttgatctccttgcagtccaagggactctcaagagtcttctccaacaccacagttcaaaagcatcaattctttggtgcccagctttctttatggtccatccatacatgactactggaaaaaccatagcttcgactagatggaccttgtcagcaaattaatgtctctgctttttaatatgctgcctaggtttgtcatagcttttcttccaaggagaaagcatcttttaatttcatgactgcagtcaccatctgcagtgattttggaggccaagaaaataaagtctgtcactctttcccttgtttccccatctatttgccatgacatgatgggaccaaatgccatgatcttagttttttgaatgctgagttctaagccagttttcactctcctcttgcactttcatcaagagtctctttagttcctctttgctttctgccataagggtggtgtcatctgcatatctgatgttattgatatttctcttgataatcttgattctggcttgtgctttatccaaccccacatttcacatgatgtactctgcatataaattattttttttaatatttatttatttatttatttttaatttttcctttacaattctgtattggttttggcatagattgacatgaatccaccacaggtgtacatgcgttcccaaacatgaacccccctcccacccccctccccacaacatctctctgggtcatccccgcgcgtcagccccaagcgtgtcatatcctgcatcagacatagactggcatttcgattcttacatgatattatacatgtttcaatgccattctcccaaatcatcacaccctctccctctccctctgagtccaaaagtccgctatacacatctgtgtctcttttgctgtcctgcatatagggtcatcattgccatcttcctaaattccatatatatgtgttagtatactgtattggtgtttttctttctggctcacttcactctgtataatcggctccagtttcatccatctcatcagaactgattcaaatgtattctttttaatggctgagtaatactccattgtgtatatgtaccacagctttcttatccattcatctactgatggacatctaggttgtttccatgtcctggctattataaacagtgctgcaatgaacattggggtacatgtgtctctttcaattctggtttcctctgtgtgtatgcccaacagtgggattgctgggtcataaggcagttctatttgcaatttttaaaggaatctccacactgttctccatagtggctgtactagtttgcattcccaccaacagtgtaggagggttcccttctctccacaccctctccagcatttattgcttgcagattttaggatcgcagccattctgactggtgtgaagtggtacctcattgtggttttgatttgcatttctctaataatgagtgatgttgagcatcttttcatgtgtttgttagccatccgtatgtcttctttggagaaatgtctatttagttctttggcccattttttgattgggtcgtttatttttctggaattgagctgcaggagttgcttgtatatttttgagattagttgtttgtcagttgcttcatttgctattgttttctcccattcggaaggctgtcttttcactttgcttatgttttcctttgttgtgcagaagcttttaattttaattagatcccatttgtttatttttgcttttatttccagaattctgggaggtggatcatagaggatcctgctgtggtttatgtcggagagtgttttgcctatgttctcctctaagagttttatagtttctggtcttacatttagatctttaatccattttgagtttatctttgtgtgcggtgttagaaagtgatctagtttcattcttttacaagtggttgaccagttttcccagcaccacttgttaaagagattgtctttactccattgtatattcttgcctcctttgtcaaagataaggtgtccatatgtatgcggatttatctctgggctttctattttgttccattgatctatatgtctgtctttgtgccaataccatactgtcttgatgactgtggctttgtagtagagcctgaagtcaggccaaattgattcctccagttccattcttctttctcaagattgctttggctattcgtggttttttgtatttccatacaaatcttgaaattatttgttctagttctgtgaaaaatattgccggtatcttgatagggattgcattgaatttgtaaattgctttgggtaatatactcattttcactatattgattcttccgatccatgaacatggtatatttctccatctattagtgtcctctttgatttctttcatcagtgttttatagttttctgtatataggtctttagtttctttaggtagatatattcctaagtattttattctttttgttgcaatggtgaatggaattgtttccttaatttcttcttctactttctcattattagtgtataggaatgcaagggatttctgtgtgttgattttatatcctgcaactttactatattcattaattagctctagtaattttctggtagagtctttagtgttttctatgtagaggatcatgtcatctgcaaacagtgagcgttttacttcttcttttccaatttggattccttttatttctttttctgctctgattgctgtggctaaaacttccagaactatgttgaatagtagtggtgaaagtgggcacccttgtcttgttcctgacttaaggggaaatgctttcaatttttcaccattgaggataatgtttgctgtgggtttgtcatatatagcttttattatgttgaggtatgttccttctattcctgctttctggagagtttttatcataaatggatgttgaattttgtcaaaggccttctctgcatctattgagataatcatatggtttttatttttcaatttgttaatgtggtgaattacattgattgatttgcggatgttgaagaatccttgcatccctgggataaagcccacttggtcatggtgtatgatctttttaatgtgttgttggattctgattgctagaattttgttgaggattttttcatctatgttcatcagtgatattggcctgtagttttctttttttgtagtatctttgtcaggttttggtattagggtgatggtggcctcatagaatgagtttggaagtttcccttcctctgcaattttctggaagagtttgagtaggataggtgttaactcttctcgaaatttttggtagaattcagctgtgaagccgtctggacctgggcttttgtttgctggaagatttctgattacagtttcaatttccgtgcttgtgatgggtctgttaagattgtctatttcttcctggtttagttttggaaaattgtatttttctaagaatttgtccatttcttccaggttgtccattttattggcatataattgctgatagtagtctcttatgatcctttgtatttctgtgttgtctgttgtgatctctccattttcatttctaattttattgatttgatttttctctctttgcttcttgatgagtctggctaatggtctgtcaattttatttatcctttcaaagaaccagcttttggctttgttgatttttgctatggtctcttttgtttcttttgcatttatttctgccctaatttttaagatttctttccttctgctaactctggggttctctaattcttccttttctagttgctttaggtgtagagttaggttatttatttgacttttttcttgtttcttgaggtatgcctgtattgctatgaactttcctcttagcactgcttttatagtgtcccacaggttttgggttgttgtgttttcattttcattagtttctatgcatattttgatttcttttttgatttcttctgtgatttgttggttattcagaagcgtgttgttcagcctccatatgttggagtttttaataggtttcctcctgtaattgagatctaaccttagtgcattatggtcagaaaagatgcttgtaatgatttcgatttttttgaatttatcaaggttatatttatggcccaggatgtgatctatcctggagaaggttccatgagcacttgagaaaaaggtgaaattcattgttttggggtgaaatgtcctatagatatcaattaggtctaactggtctaatgtatcatttaaagtttgtgtttctttgttaattttctgtttagttgatctgtccatatgtgtgagtggggtattaaagtctcccactattattgtgttgttgttaatttcccctttcatacttgttagcatttgtcctacatattgcggtgctcctatattgggtgcatatatatttataattgttatatcttcttcttggattgatcctttgatcattatgtagtggccttctttgtctcttttcacagcctttgttttaaagtctattttatcggatatgagtattgccactcctgctttcttttggtctctatttgcatggaatatctttttccaacccttcactttcagtctgtatgtgtcccttgttttgaggtgggtctcttgtaagcagcatatagagggttcttgtttttgtatccaatcggccagtctttgccttttggttggggcattcaatccatttacgtttaaggtaattattgataagtatgatcccattgccatttgttttattattttgggttctggtttatactccctttttgtgtttcctgtctagagaatatcctttagaatttgttggagagctggtttggtggtgctgaattctctcagcttttgcttgtctgtaaagcttttgatttctccttcgtatttgaatgagatccttgctgggtatagtaatctgggctgtaggttattttctttcatcactttaagtatgtcttgccattccctcctggcctgaagagtttttattgagagatcagctgttatccttatgggaatccccttgtgtgttcgttgtttttcccttgctgcttttaatagttgttctttgtgtttgatctttgttaatttgattaatatgtgtcttggggtgtttcgccttgggtttatcctatttgggactctctgggtttcttggacttgggtgattatttccttccccattttagggaagttttcaactattatctcctcaaggattttctcatggtctttctttttgtcttcttcttcagggactcctataattcgaatgttggagcgtttcatattgtcctggaggtctctgagattgtcctcatttcttttaattcgtttttcttttttcctctctgtttcatttatttctaccattctatcttctatttcactaatcctatcttctgcctccgttattctattatttgttgcctccagagtgtttctgatctcatttattgcgttattcattgtatattgactcttttttatttcttctaggtccttgttgaacctttcttgcatcttctcaatccttgtctctagggtatttatctgtgattccattttgacttcaagattttggatcattttcactatcaatattcggaattctttctcaggtagattccctatctcttcctcttttgtctggtttggtgggcatttctcctgctcctttacctgttgggtattcctctgtctctttatcttggttatattgctgcgtttggaatggcctttttataatctggtaatttgtggagttctctttattgtggagcttcctcactgtgggtggggttgtatcagtggcttgtcaaggtttcctggttagggaggcttgtgttggaggtctggtgggtggagctgggtttcttctctctggagtgcagtggagtgaccagtaatgggttatgagacgtctaaagttttggagtaactttgaactgcctgtatattgaagctcagggctgtgttcctgtgttgctggagaatttgtgtgatatgtcttgctctggaacttgttggcccttgggtggagctttgtttcagtgtaggtttggaggcatttgatgagctcctattgcttaatgttccctgaattcaggagttctctgatgttctcaagctttggacttaagcctcctgcttctggttttcggttttatttttacggtggtctctagacttctccatctatacagcaccaatgatatagcatctaggctaaagatgaaaggtttctccacattgaggggcacccagagaggttcactgggttacatggagaagagaagagggagggggtagttagaggtgactggaatgagatgcggtgagatcaaaagaggagagagcaagctagtcaatagtcacttccttatgtgcgctccatagtctggacctctcagaggtattcacggagttatacagggaagaggagagagaggaagtagacagaggtggccaggagagtaagggagaggaatgaaaaggagagagacaggtccagccagtaatcagttccttaggtgctctccaccgtctagaacacacagagaatcacagagttggatatagaagagatggggggggggggagagacagaggccacctggtggagaaaaaggagagtccacaaggaggagagagtggtcaggccagtaatctcgctgtcgggtaagattgggttatgaaatgtacaagattgacaacaaaaaccgaaaagcaaagattaaaaacctagagtagaggttagattttcaaaaatacaatgttaaagagacgaagcagaaggaagaaagaaaataagagaaaagataaaaaaataataatattaaaaaaaaataaggaaaaaaaaataaggaaaaaaatatatataagaaaaaaaaaaaaaaaacccaaggttaaaaaagagataccaacaacaaccacgcgaagactatgtatggtgtttgccttaaaaaagtagagtctttttttttttgaaaagtaatagttatagaaatataaaatagagaaatagaagacttaacagttaaaaaaaaagtttgagaaaaaaaaaaaaaaagaaagcaaaaaaaaaaaaaaaaaggaatgattgtaaaaattgtgaagatatatctggcccttctctgatgttgtgggccgtgtggggtcactttcaaggcgtttccctctgtttaacttctgtttgctggtctcttcagggtctgaattccgtcctgacacatgggggcggtggtggacactttttttttttttttcttttttaggctcactagttcagtcgcgctgtggggagggggggatgctgtttttgaagacaatgatctgcttttctggttgcctgatgtcctctgcctgaattcagaggttgttttgtggagtttgctctgcgttgagatgatcttttgaggattttctgagggagaaagtggtcttcccttcctattcctccgccatcttaggaccgccccctctgcatataaattaaataagcagagtgacaatacagccttgacgtactcctgtcccaatctggaagcagtctgttgttccatgtccagttctatctgttgcttcttgacctacgtacagatttctcaggaggtaggtaaggtggtttgatattcctatctcttgaagaattttccacagtttgttctgacacagtcaaaggctttggcatagtcaataaagcagaagtagatgtttttctgggattctcttgctttttctatgatatagcagatattgacaatttgatctctggttccattgcttttttctgaatccagcttgaatatctggaagttctcagttcacatactattgaatcctaacttggaaaattttgagcagtactttactagtgtgtgagttgagtgcaattgcgtgatagtttgagcattctttggcattgcctttctttgggattagaatgaaaactgactttttctagtcctttggccactgcggagttttccaaatttgctagcttattgagtgcagcactttaacagcatcatcttttaggatttgaactagctcagctggtattccatcacttcatctagctttgtttgtagtaatgcttcctaaggcccacttgacctcacactccaagatatctggctctaggtgagtgagcacgctataattgctatgtgggaatagcaattccattacttgacctcacactccaagatgtctggctctaggtgagtgagcacactataattgctatgtgggaatagcaattccatttattagtatacaaattgcatttttcatgattaaagtattggtgtgctcagattcactgtttatattatactattatattctttatgactctctaagcttaatcacatttcttctgcctctgtctggaatgagtaacattagtctttagagttgggcttccctggtagtttagatggtaaagaatcctcctgcaatgcaggagacctgggttcgatcactgcgttaagaagaacccttggagaagatactcattccagtattcttgcctggagaatccccatggacagaggagcctggtgggctacagtccatgggcaaagagtcggacatgactgagcgactaagtacagcacagcacaccatctttacagttagacatccaaatctggcattgttgattagcacacactaatccttttcttattaaaagcagagcctgtggcttccttagttgaaagctgctgctgatgattggagtctgatcctcttttctgaactcccttctcaacttctatacagctctgtaggccaatcctactcagaagagctactggctatactctgagcctgaagatagtagaaaggacccttgaggcacttccctggtggtctggtagttaagactctgagcttccattgcagagggtatggaatcactccctggtaaggaaccaagatccctcatgccacagggcacccccaccaaaaaaggtccttgagtgcagcaggggctccccttgctgccaacatcgagactcaggcctagcttctgtaagaaagtaggaatgtagtgggtgggtggagaagacaccatgaggttttccctgaactttctttagagcatcctttctcaactgtgtgctcagtggaccacttggggagctgtaaatgctgctgcttaggctcatctcccagggttgttctatcatgagctgggtagcaagactgttaacatccccagacaaatctaatgtttagctaaggtggaaagccactgctatagaatgtgtactccttgttagaattaagcacagtgcctcagcatttgaaaaggtaaggtgggtaaggagctaggttggcaggtgtggtgtgagccacagagtggcagtgctttgtgctccagccccaccttgactcagaggggtctggtggcaaagatgcattcatctgtgccacttcctgccctggaagggagcctgtacaccgagtgcttcctccagacctgcgggggtgaggcaggaatgtattttcacatggatggttcagatgggttgtgtgttaactttcagagaagtctagtgctgagagtcaactttatcctgtagctctatagcactgttgtcattgtttacccctcagcattgtctttctcatagatatgtgtgtgtgtgtgtgtgtgtgtgtgtgtgtgtgagtgtgtgtgcatgcttcttatacctgcaagtgctttgaaaatatttaggtcacacatgtgcctttcacaatatggatagtgggactgttttcattttccttcatttatgacagattgtgtgaggtgctcaaccttgatccaagacaagtcctgattgcagaagtgatcttcacaaacattggcggagctgccactgccattggggacccaccaaatgtcattattgtttccaaccaggagttgaggaagatggtatgtatcactataatcagattgtttccaataaatataggccccagcttacttgcacatttagtaatactttaccaacacggatatcacttcttcttatggagtgttcttggtcctcttgagagtgggaggttaggtgacttatcctctaacgtaggggtctgaattgacttcattctcattctgataaaattttaagaaaatgattacattttctatttagccatagtatgctataatatattaatgggaattgaggtttcttccaacaatattaagaattaaatgatctgctccctctcatttttcaactgaggtagatgaataagttcttcatggatgaagaacttaagttttttaaaataagggtgagaaaatgaaagtctttctggatttttggtaagctcttattaatatataatttcttgtaaacaaaaataaaagcaaagtattaaagagagtgcaaatggtattttacatatcttagagttaaagttaaattatacaattaattttcatttgtcattctttgatcactagaattttctcaatatctcttctttgaagtatcaataaaaatgctttcaaattggtgtcacttattataggtgatacatttatgcctgtgtgtctctgaagtatgttagtatgtttgtgtatatttgctgtctttcataaaaatatttaagcctttgagagttcatggctctaaggtgttgaagggcattttgtgggcctactgtgttctagagattcagggtacaacttagatactttggctaaatttaatactccctggttgctctgaaagccaactgtggtacttcaccagtcttgctgcatgagttgaggggcaggcccctccttaccatgtcacataagcataccagaaagtgtgtgaaccctgtaatttgctttgtaatctgtcacccaggataggttgcatacacatgagagagagacctattttcacaggaaaataatgttttattatttttattttatagtaatacatttattttagagaatgtcagtcacattcacacacacagtcatacacacacatatcagaaataaaaaattttcataatcccaccatctagaaataaatcctctcaatattttgcttagttgcttggtggtagtttagtcactaagtcgtgtctgactcttgaaaccccatggactgtagcctggcaggatcctccgtccctgcaattctctaggcaagaatactggagtgggttgtagtttctttctccagaggatcttcctgacccagagattgaacccgggtttcctgcactgcaggcatattctttaccagctgagctacaagggaaaccacttattttggtgcatgtagtctgcatgaacgtttgtatgtggctatacatcagaaaaaaaaaaaaaagcttctctgaccaagatggagtaacagggactgtctttaccctcttgcttgagacatcccaaaagaaaataaaccaaaatccaaaaaacaaacccagaaacaaaccaaaaccagacagtggtaatcaaggtactagatatcagtaaaaaagggcagtgatccctgagaaatgggaaacaaatgaaatgaacttatggttgccccagctcactgccttgagagattttccaggatgcagttcagggaaacagaacccatgtggagcctaccatatttctagagttggggaggtagaacttactttggagggaacaagacagagaaccagagaggggagagttggagacagagagaacctctgagtacttgcagagggaaactacctgtgtccagggaaagaataacccaaaaagattagagggaagagtgcttaatacactgagggccaagaataatgtctatttctgccaggaagactgtaaacctcttaattcatgaggtattggccctgattccacctaataaatctaataaacttcaaataatcaaattgtttttaaatagtttaactacatccaaaaacaaacatcaagaatatttataggaatgcaaaaatattcaacaacacacaaggtaaaaatcacaatgtctgacatccaatcaaagattaccaggcatgcaaagaaacaagaaaatttgatctatcatgaggagagcatgaaccatttcgaatcaacccagaatagacacaggtgttataattaacagacaagtgcgttaaaactttttctttctttctttctttctttctttctttctttctttctttctttcttttctttctttctttctttcttttttttttttttttttttttttttactgtattccagatgttcattaagttgaaaagaaacatggtgcactgagatgacccagagggatggtacggggagggagaagggaggggggttcaggatggggaacacgtgtatacccatggtggattcatgttgatgtatggcaaaaccagtacaatattgtaaagtaattaacctccaattaaaataaataaatttaaattaaaaaaaataaaaagaaacatgaaagatattttttttaaaggcccaaatcaaacttctaaaaatgaaaactgtaatgtatgagattaaaatcttttgttaggattaaaacagcaaattaagaatttcataagaaaagattagtgaaattaaggacataggtccaaaatagaatgaaaagtaatgaaagacattcacgagctaaagggaaactccaagtggcctaatatatttataattcttatctctgaaagagagaggaacagagaaagacagttgaagaaaacatggtctaaaatttcaaattttatgaaagatataatctcagagattcagaaagtccagtgaattcagagcacaagaaacatgaagaaactacactaagccatgtcataattgttatacacgtgaaacttaaataattttataaactgatgatactttgattaaaaaaaagcataatgggttatttactgtttcaagacctatactttgacttggatatttcgttttggaaattataagaaatagttattttaaaagtagatatttaaaagatctatatgaaacagctatttttaacagcataaattgaaaaacctatgtaaaatattccaagaatcaaagaaggaagtgaaattgtaaaatatttttaattgaattatgaaaacaaaattcttagggttcctctcaagcaggagtcagcaaacttcttaaaaggccatatacttactattacaggcatatgggccttatggtccctgatgcaatctctcaactctgccactgttgcaggaaggcagccccagacaacacacaaatgaatgtgcatgtctatattctagactgcaagtgtagttttctggtccttgctctaaaacagtatttagaagggattatataccattaaataccaattggaaaagaagaattgtctcaaattagtgacctcagcttcaatctgaagaaactagataaggaagagcaaattaaactgaaagtaagctgaagaaacacaggccagcatggagaacaggaaaaacaatagagaaaatcaatgaaagaaaaaaagctagttctttgataggataaatgattctgacaaacttctgaccaaactgatgaagaaaataagagagaagacataaattaccagtatcaggaataagagaattatatcactacagagtgcacagacattaaagacattgttagggagtattgtgaacaactttatgtcaataacattcacaatttagattaaatggacaattcccttgaaagacatactctaccaaacctcactcaagaggaactaggtaacctgagtagccctatatctattaaagaaattgaatttgtaatgaaaaatcttcccagaaagaacaaagcaaagcaaacaaaaacaggctaagatagcttttgtgaactctaccaagtgtttaaggaagcaataatactacaataccaattccacacaaaattttatagcaaattgaagagagaatacttctcaacttactttataagggcctgatgcctgaagcagataaatccaagataagaaaactgttgacaaatactttttatgagcacaaataatatatttaaaaattagctaatccaatttgatgacttataaaatgaataatacataataagtggaatttatcctagaaatggaagattggtgctatatttgaaaatatcaaccaatgcagtttactagcaaactaagtgaaaaaatccatatgattatctcaatagttatagaaaaatatttggcaaattcaacatccattactgatcaaatcactcaataaagtagggaaaaagtgagcttcatcagcctgataaagagcatctatgaaaatattatgaccagcatcatagttaaaagaggaaaactgaatattttcctcagatcagaaacaagacaaagatgtctgttcttaccacttaaatgcattttactggaggctcttggtacaataagtcaagaaaagaaatacaaggcatccacattggcaaggaagaattaagtctatttgcatattacatgattgttcatgtgaaaaatctgaaggaatctacaaaagaaaaaaaacaaaacaaaacgtgaaaaatcataactaaaattaacaagtgtacaatacaggatcaatatagaaaaattaatggttttctgtattctaacaacaaataattggaagtggaaataaaaatgccatttacaatagcatcaatatataaaataggtgaaatctgaccaaacatatgcaagaaaaaaccaaaatattgcagataataattaaagaagataaaaatagatggggcgatatattttggtcatggatcagaaaactcaacatcattaaagtattagttctccctagattgatctatagagtcatgcaattcctataaaaaaacagcaaatttttctttttgtagaaattgacaaactgattttaaaatttatatggaaattcaaagtatccagaatggtcaaaaacaagtcttaaagtgcagaacaaattggaagggccagtactacctaatttcacaacttattataaagccacaaaaaacaaaaacagtgtgattagcatcaagataggtggaaggtaaatagaaaaaaggatataaatatcagatgcaaatttcagatataaatcctcacatacatgacttttgacaaagtgatttttgacaaaggtgtaaagccaattaagtggagaaaggataattttttcacaaatagtcctggaatgaatgaacatacatacgcaggagaaatgagtttcagtccacactttctactttatcaaaagattaactgaaatgtggattatagacataaatataaaggccaaaactttaaaattcttaatagaaaagataatttacagtagaatagatatagaagtagttcaagtgagatcatggttactgtaatttattagactaattttataacttggctttctgtttctgttgtctcttcttttaatggcaatatattaatgaatgctgcaacagcttagcttcctctggctggcatcacattagtatttatttacttatttattcaaggataattgctttatagaattttgttgtttttgttaaagcacaacatgaatcagccataagtatatatataccccctcccttttgaaactccctcccatctctctccccatcccacccctctaggttgatacagagcccctgtttgggtttcctgagccatacagcaaattctgctggctatctgttttatgtatggtaatgtaagtttccatattactcttttcatacatctcccctgtcctcccctctccccatgtccataagtctattctctatgtctgtttctccattgctgtcctgcaaataaattcttcagtaccattttttctagattccgtatatatgtgttgctgctgctgcaaagtagcctcagtcgtgtccgactctgtgtgaccccacagacggcagcccacgaggctcccccatccctgggattctccaggcaagaacactggagtgggttgccatttccttctccaatgcaagaaagtgaaagtgaagtctctcagtcgtgtctgaccctcagcgaccccatggactgcagccttccaggctcctccgtccatgggattttccaggcaagagtactggagtggggtgccattgccttctcagtgttagagaatgtgatatttatctttctgtttctgacttcaactctgtataataggctctaggttcatccaccccattagaactgactcaaatgcattcctttttatggcagagtaatattccattgtgtatatataccacaacttctttatccattttgtcggtggacatctaggttgttctagctgttgtaaatagtgccgcaatgaacaatgtgtttaggtacatgtttctttttcaattttggtttcctcagggtatatgcctaggagtgggattgctgggtcatatgctggttttattcttagttttttgaggagtctccatactgtcctccataggggctgtatcaatttacattcccaccaacagtgtaagagcattctcttttctccacactctctccagcttttattgtttgtagactttttgataatggccattccaactggcgtgaagtggtatcttgttgtagttttgatttgcatttctctaataatgagagatgttgagcctcttttcaatgtgtttgttagccatctgtatgtcttccttggaggaatgtctgtttaggtctttttctaactttttgattcagttgtttgtttttctggtattgagttgtatgaactgcttgtgtattttggaaattaatcttttgtcagttgtttaatttgctattattttctcccattatgagggttgtcttttcatattgcttatagtttcctttgccgtgcaaaagtttttaagtttaatcaggtcccacttgtttatttttatttctgtaagtctaagaggtggttgcagccatgaaattaagagacgcttactccttggaagaaaagttatgaccaacctacatggtatattcaaaagtagagacattactttgccaactaaggtccgtctagtcaaggctatggtttttcctgtggtcatgtatggatgtgagagttggactgtgaagaaggctgagcaccgaagaattgatgcttttgcactgtggtgttggagaagactcttgagagtcccttggactgcaaggagatccaagcagtccattctgaaggagatcagccctgggtgttctttgaaaggaataatgctgaagctgaagctccagtactttggccacctcatgcgaagagttgactcattggaaaagactctgatgctgggagggattgggggcaggaggagaaggggacgacagaggatgagatggctggatggcatcacggactcgatgggcgtgagtctgagtgaactctgggagatggtgatggtcagggaggcctggcgtgctgcgattcatggggtcacaaactcagacacgactgagtgactgaactgaactgaactgaagaggtgggtcatagagcatcttgctttgatttatgtcatcaagtgttctgtctctgttttcctctaagagttttatagtttctggtcttacatttaggtccattttgagttaatctttgtgtatggtgttaggaagtgttctcttttcattcttttacatgtagctgtccagttttcccaacatcatttattgaagaggctgtttttccccattgtatattcttgcctcttttgttaaaaataaggtacccataggtgcatgggtttatttctgggctttctctcttattctattggtctatatttctgttgactgcagctttgtagtataatctgaagccaggaaggttgattcctccagctctattctttctcaagactgctttggctattcagggtcttttgtgtttccatatgaattgtgaaattttttgttctggttctgtgaaaaatgccattggtaatttgatagggattgcactgaatgtgtagattgcttttggtagtatagtcattttcacactattgattcttcctattcttcctacccaggaacatggaatatctctccatctgtttatgtcatatttgatttctttcatcagtgtcttataattttctgtgtagagttattttgtctccttaggtaagtttattcccagatatttaattctttttgttgtaatggtggatgggattgattccttaatttctctttctgatttttcattgttagtataaggaaatgcaagtgatttctgtatattgatttcatatcctgcaactttgctaaattcactgattagctctagtaattttctgatactatctttcaggttttctatgtacaatatcataacatctgcaaacagtgagaccttcacttcttttctgacctggattccttttgtttctttttcttctctgattgctctagctagaacttccagaactatgttgaataataagggtgaaagtggacatccttgtcttgttcctgatctttagggggaatgctttcagtttttcaccattgagaataatgtttgccgtaggcctatcatatatggtctttcctatgttgaggtaggttccttctatgcccatattttgaagagttgtaatcataaatgggtgctgaaatttgtcaaaggctttttatgcatcgattgagattatcgtatggtttttatctttcaatttgttaatatggtgtaccacattgattgatatttgtttttatttatttatttatttatttatttattttaaatttatttattttaatttttactttacaattctgtattggttttggcataggttgatatttgtatattgaagaatccttgcattcctggaataaacgcaacttgattatggtgtatgaactttttgatgtgttgctgaattctgtctgctaaaattttgttgaggatttttgcatctatgttcatcagtgatattggcctgtagttttcttcttttgtgttgtctttgtctggtgttgatatcagggtgatggtggcctcatagaatgagtttggaagtgttctttcctctgaaattttttgaaaaagttttaggataggcattaactcttctctaaaagcttgatagaattctcctgtgaagccatctggtcctgggtttttgttttttgaccacaacttcaatttcagagcttttaattgggttgttaatagtttctatttcttcccagttcagtcttggaagattgagcttttctaagaatgtgtccatttttttccaggttatccaatttattaccatatagtttttcataatagtctcttacaatcctttttatttctgcattgtctgtcgtaatctctcctttttcatttctaattttgttgatttgattcttctctctttttttcttgatgaatctggctaaaggtttgtcaattttgtttatcttctcaaagaatcagcttttagttttattaatctttactattgtttctttcatttctttttcatttatttctgctcggattcttatgatttctttcctcttactaattttggggtttttttttgttcttctttttccagttgttttatgtgtaagttaggttgtctattcgatgtttctcttgtttcttgaggtaggattgtattgctataaactttctccttagaactgcttttgctgcatctcataggttttgagttgttgttttttcattgtcagtcatttctagaaatttttaatttcccttttgagttctttagtaacctgttggttatttagaaacatgttttttaatctccatgtgtttgtgtttcttacagttttttcttgtaattggtatctagcctcatagtgttgtggttggagaagatgactgatatgatctcaattttcttaaatttgttaggtttgatttatgacccaagatgtggtctgtcctggagaatgttccatgcacacttaagaaggtatattctccatttggatggaatgtcctgaagatatcaacgagatctatctcatctaatgtatcatttaagattgtgtttccttattaattttctgttttgatgatctgtccattggtgtgagtggggtgttaaagtctcctactattattgtgttactgtctccatttagtctgttagtgtttgtcttatgtattgggttttcctatgttgggtgcatatatatttacaactgttatgtcttcctcttggactgatcccttgatcattatgtagtgtcctttcttatctcttgtaatattctcattttaaggtctgttttgtctgatacgaggattgctactccagttttcttttgcttcccatttgcatggaatatatttttccagcctctcacattcagtctatgtgtgtctttaggactgaagtgggtttcttgtggacagcatatatatggatcttgtttttgtatccattcagccagtctgtgtcttttggttggagcatttaatatatttacatttaaagtaattattgatatatatgttcctattgccattttcttaattgttaggtttgattttgtagatctttttcttctcttgtatttcttgactattaagtccctttaacatttattgtaaagctggtttggtggtactgaattctcttaacttttgcttgtctgaaaacttttttatttctccatcaatttttaatgagatccttgctgggtacagtcaaaacataaaaacaagtcaaaacagaaggataataaatgtttttcttgagtcactgctgtcagagtcctttcccttgctgggaatcacagtccacctcaccttcccagaatgccctccaacactgttctgatctctggaccagctctgggggcagctcagattctaatctgatactactgctgtgtgttctctcctccaatgtccatagctatcagaactagtgcgttttcttttatgggaactctcagtgacattttatatattccatatgcacagagtcttcctagttgatcatgtggatttagtctgctgcttgtacagatggtgggaatgttttgggtcttcttccttagccagcttgcccctggatttcaactgtggttttatttctacctctacatgtgggtcctccactagggtttgctcccgaggctgccctggaggacttaggtttgcccctgtgagggtcaggtgtggaggtggtacagctgcttgggttgcaggagttctgacagtgcggtactcaggggagttgtcagctagggtggcaggaaatatagttctctagaagggtatggcaaccagtcttggccaatagcttcagtattcttgcctgaagaaccccttctctgacagggaaacctgacaggtcacagtctacagggtcacaaagagtctggacacgactgaagtaaccctgtgtacatagatgcaaggctttttttttttttttttgctgtgacagctctgccccagtgagttttgaacgtgaaggtgttgcaacttcttggcttgtggggaccctggcagtgccaagtgtgcagggacatggactgtctctgatgcagaagttatggtcctgtcagagtctttttttgaccctcttttagctggtgatcagaagacctctttggtcaatctttctccacagctccgcatgttcaggcacttagagggctcccttgcctggggttcttctctgttgtttggcatatcaggcacatagaggggccccctgggtagggtcctactctgtagatcaatgtgtcatgcacttaaaggggcaccctgggtggggtcctaatctgtagttcagtgcatcaggcatttgatgagccagtctctctattgttcagctagtgatgctggcgtgtggggagagagaggctatggtgatggctccataatgtaagacacgtgactgagcagtatcgccttgcttccatggctgcctggctttcctccacagacatttcccaccacagtctcctccctcacatcccctcgatctgtctctccatagtcaacagcagcccttgccctaagattgctccccaacccctaaactccagtcccagccactgtgccttccagggttctgggtccctgtccagggtatgtgtggccgtggcagggactgtctgattctcattccatttagactgccacagatcagctgtttccctctcagccttaaatgtttctcctgaccagacaattgccctgatgtggagattgaacccctgcttcagttcccccacctgctgagggcaggtccagttctattgaatactcctgtttttcccccaggtccttcatcctactgagttttgcatggttctatatattcttttccactggtcaggtactcctgtctggtctcagctggtgttctgcatgcacttctgtgtctgaaggtgtgttcctgatgtatccgtggagagagatgtaccccacattcacctactcctctgccattttgttcccctacattagttttaatgtaagactctagacataattcagcattcaaaaaactataatcatggcatctggtcccatcacttcatggcaaatagatggggaaacaatagaaacagagacagactttattttcttgggctccaaaatcacagaggacagtgactgcagccacaaacttaaaagacacttgctccttggaagaaaagctatgacaaacctggacagttttttaaaaagtagagacattactttgctgacaaagatccatctagtcaaaactatgattgttctagtagtcatgtatggatgtgagtgttggaccataaagaagtctgagcaccaaagaattgatgtgtttgaactgtggtgttggagaagactcttgagagtcccttggactgcaagaagatcaaacaagtcaatctgattctaacagaaattaaccctgaatattcatttgattgactgatgctgaagctgagtctccaatactttgacctcctcatgcaaagagctgattcactggaaaagaccctgatgcagggaaagattgaaggcaggaggagaaagatatggcagaggatgagatggttggttgacatcaccgactcaatggacatgagcaaactctgggatatggtgaaggacatggaagcttggtgtgctggacacaactgagcaacagaacaacaagaactaggcataatgtctctcttggacacaaattgagctaactctacattcttttaaacctcttcttggagtcctagatctgaattctctgacatctgtgggatgttacccaagatagggcctgggtcctgggctttaccaagtcacctagaaagatgaagggaaagagcagtctgttagactattcccatattcgtccatggcatcctgacatggtgttgtgaatatccagagtttaaacctgacagtaagggagaaaggtaaggttttgtaaaaacatctaaagggccctggaggtgagcaacctctctgattgcactaaagctaagccttggccccttacccagctttgtgccaaaatgacatcccctggggacgtggatttagggctgtcttgttttattaaagatgacattccttgtcttcccctccttttttgggttaaactatatttttcagaaaaggtatctaattaatgtctttttgtggataaccaagagtggttgtaattcattttatagtagttcagagataagggaatatttatttacatggtgtgagctttgctgagcttccctggtggctcagatggtaaagaatctgcctgcaatgcaggagacccagttcaacccctgagtcatggaagattccctagagaaaagaatggctaccctctccatgattcttgcctggagaattccatgaacagtggaacctggaaagggtcagattcctctgaccctactctacatggggtcataaagagttgaacatgactgagcaactaacatttttcactacttatttatgtgtaaccacaaatgaaaacatagttccagggacagtgtctttataagagattaacataaattctcattatcaataatgacagcacagctatacatttgaatcacatgatgggcagagttatttggtattaatatgttcatatatatataactgagtcactttgttgtacagcagagattggcacagcattgtaatcaactgtatttcaataaaaaataaaaataaaaaagtaaacatacccttgacatggccctagagggacaagacccagctccatctgtcagtgggcaggaaccagtcccttccaccaggaagtctgcacaagcctatcaagtcagtcttacacaccaagaagggaggaaccaaaagaaagaggagctgcaaccctgcagcctttggaatagaaagtgcaatcacagaaagttacacaaaatgagatagcaaaggagtatatttcaagtgaacaagaaaaccccagaagaataactaagtgaagtagagataagcaatctacccctcaaagtattcagaataatgatagtaaagatgatccagtgcattttcttggcaaaacgctattagtctttgccctgcttcaatctgcattccaaggccaaatttgcctgttactccaggtgtttcttgacttcctacttttgcattccagtcccccataatgaaaaggacatctgttttgggtgttagttctaaaaggccttgtaggtcttcataaaaccattcaacttcagcttcttcagcgttaccggttggggcatagacttggattactgtgatattgaatggtttgccttggagacgaacagagatcattctgtcgtttttgagattgcatccaagtactgcatttcggactcttttgttgactatgatggctactctatttcttctaagggattcctgcctgcagtagtagatataatggtcatcttagttaaattcacccattccagtccattttagtttgctgattcctagaatgtcaatgttcacccttgccatctcttgtttgaccacttccaatttgccttgattcatggacctgacattccaggttcctatgcaatattgctctttacagcatcggatcttgcttctatcaccagtcacatccacagctgggtattgtttttgctttggctccatcccttcattctttctggagttatttctccactgatctccagtagcatattgggcacctactgacctggggagttcctctttcagtatcctatcattttgccttttcatactgttcatggggttctcaaggcaagaatactgaagtggcttgccattcccttctctagtggaccacgctctgtcagacttctccacagtgatcctcccatcgtgggttgccccgcaggcatggcttgttttcattgagttaggcaaggctgtggtcctagtgtgattagattgactagttttctgtgagtatggtttcatgtgtcttccctcttgcaacacctaccatctgacttgggtttctcttaccttgggcgtggggtatctcttcacagctgctccagcaaagcacagccgctgctccttaccttggatgaggggtatctccttaccgccagttcactggtcatagcaaacaccctcttccaacaacacaagagaagactctacacatggacatcaccagatggtcaacaccaaaattagactgattatattctttgcagccaaagatggagaagctctatacagtcaactaaaacgagaccaggagttgactgtggctcagatcatgaactccttattgccaagttcagacttaaattgaagaaagtagggaaaaccgctagaccattcaggtatctttatcttatctttatacagtagacgtgagaaatacatttaagggcctagatctgatagatagagtgcctgatgaactatggaatgaggttcatgtcattgtacaggagacagggatcaagaccatccacatggaaaagaaatgcaaaaaagcaaaatggctctctggggaagccttacaaatagctatgaaaagaagagaagtgaaaagcaaaggagaaaaggaaagatataaacatctgaatgcagagttccaaagaagagcaagaagagataagaaagccttcttcagtgatcaatacaaagaaatacaggaaaacaacagaatgggaagactagagatctcttcaagaaaattagagataccaaggaaacatttcatgcaaagatgggctcgataaaggacagaaatggtctggacataacagaagcagaagatattaagaagaggtggcaagaatacacagaactgtacaaaaaagatcttcacgacctggataatcatgacgatgtgatcactaatctagagccagacatcttggaatgtgaagtcaagggggccttagaaagcatcactacgaacaaacctagtggaggtgatggaattcctgttgagctgtttcaaatgctgaaagatgatgcagtgaaagtgctgcactcaaaatgccagcaatttggaaaactcatcagtggccataggactggaaaaggtcagttttccttccaattccaaagaaaggcaatgcaaaagaatgctcaaactaccacacaattgcactcatctcacatgctagtaaagtaatgctcaaaattctccaagccaggctcagcaatacgtgaaccgtgaactccctgatattcaagctggttttagaaaaggcagaggaaccagagatcaaattgccaacatctgctggatcatggaaaaaggaagagagttccagaaaaacatctatttctgctttattgactttgccaaagcctttgactgtgtggatcacattaaactgtggaaaattctgaaagagatgggaataccagactacctgacctgcctcttgagaaatctatatgcaggtcaggaggcaccagttagaactggacatggaacaacagactggttccaaataggaaaaggagtacatcaaggctgtttattgtcaccctgcttatttaacttatatgcagagtacatcatgagaaacactggactggaagaaacacaagctggaatcaagatttccgggagaaatatcaataacctcagatatgtagatgacaccacccttatggcagaaagtgaagaggaactaaaaagcctcatgatgaaagtgaaagaggagagtgaaacagttggcttaaagctcaacattcagaaaacgaagatcatggcatctggtcccatcacttcatgggaaatagatggggaaacagtggaaacagtgtcagaatttattttggggggctccaaaatcactgcagatggtgactgcagccatgaaattaaaagacgcttactccttggaagaaaagttatgaccaacctagatagtatattcaaaagcagagacattactttgctgactaaggtctgtctagtcaaggctatggtttttcctgtggtcatgtatggatgtgaggcttggactgtgaagaaggctgagcactgaagaattgatgcttttgcactgtggtgtttgagaagactcttgagagtcccttggactgcaaggagatccaaccagtccattctgaaggagatcaaccctgggatttctttggaaagaatgatgctaaagctgaagctccagtactttggccacctcatgagaagagttgactcattggaaaagactgatgctgggagggattggtggcaggaggagaaggggacgactgaggataagatggctggatggcatcactgactcgatggacgtgtctgagtgaactctgggagatggtgatggacagggaggcctggcatgttggaattcatggggtcgcaaagagtcggacatgactgagcgactcaactgaactgaaagatgatccagaattttagaaaaagaatggaggtatggattgagaagatacaagaaatgtttaacaaagagctaggagatataaagaacagacaaacagacatgaacaatgcaataactgaagtgagaaatacactataaggaatccttagcataataaatgaaacagaagaagaaataagtgagctagaagacagaatggttgaaatactgccacagactagaataaagaagacagaatgaaaacaaatgagaacagtttaagagacctctggggcagtattaaatgttgcattacagtgggtcccagaaggggaagagagagagagagagagagaaaggaattgaggaaatatttgaaaagatattgataatagctggaaatgtccctaacatgggaaaggaaatagtcacccaagatcaggcactcggagaatcccaggcaggataaacccaaggaggaacatgacgagatgcatattactcaaactgacaaaaattaaagacaagagaaaatactaaaagcaacaaaggaaaagcaacaaataacatacaaaggaatccccataaggtaatcaagtgatttttcagcagaaactcttgaggccagaagggagaggcatgttatattaatattttaagtgatgaaagggaaaagcctacaatcaagaatatgcagtaatgctctctttcagatttgacagagaaattaaaaactttacagacaagaaaatgctaagagaatttaaagtcaccaaatcagctttgcaccaaatcagctttacaacaaatgtgaaagaagtctctaagaagaaaaggaaaagctacaactagaaacaagaaaattatgaatggaaaagttcaccagtaaaggccaacaatcagcaaaggtaggatatcatccacacacaaatatatccaaaccagccactgcgagaagagagtacaaatgcaggatataggaaatgcatttgaaatgaaaagaccagcaacttaaaataatcttgaatatatatatatactgtgatatcaaaacctcataactacaaaccaaatatacacaatagatatatgcacaaaaaagaaaagagaatccaaacacaacactaaagttagtcattaggtcataagagaagagagcaaaagaggaagggaagaaaaaatacttataaaaacaaatccaaaacaattaaaatgacaataaaaatatatattgataattgcttcatttaaaatagattaaatgcttcaaccagaagacatccatccatagaatggatgcaaaaataagacccatatataggcccatatatatgctgtctacaagaggcccacttcagaaccagggaggcataaaaaatgaaagtgaggggatggaaaatgtataccatgtaaattaaataaaaagaaacctcaagtaaatattcatatgagacaaaatacctgttaccagagacaaaaagggcactacataataatcaaaggatcaatccaagaagatagtgtaacagttgtaactatgtatacacctagcataggtatataaggcaaattttgttgttcagttgctaagtcttgtttgactctttgcaacaccatggacgtcaggcttcactggccttcactatctcctggagtttcatgtgcattgagttgggaatgctatctaaccgtcttatcctctgtcatcccttcactctttcccagcatcagggtcttttccaatgagttggctcttcacatcagcttcagcaatagtccttccaatgagtaatccagagtcggagtattgctgaagttgattggcacttcaactgaagtgcttcagttgaaggagcttcaacttcagcaaaagttcttccaaagaatattcagggttgattttctttagaattgactggtttaatctccttgcagttcaagggactctcaacagtcttctccagcaccacagttggaaagcatcaagtctttggctctcagacttatttatagttcaactctcacatctacatgactactggaaaagccatggctttgactacatgaatctatgtcagcaaagtgatatcttgctttttaatatgctgccttgcttggtttatcataatgttccttccaaggagcaagcatttttaaatttcaaggatgcagtcaccatccacagtgattttggagcccaaggaaataaaatctgtcattgtttccacttttcctccatctatttgccatgggacaggccaggatcttagtttttttaatgttgagtttcaggccagctttttcactcttcttcaccctcatcaagaggctctttagttccttttcactttctgcctttagaatggtatcatattcatatctgaagttgttgctatttcccctggcagtcttgattccagcttgtgattcaaccagcctggcgttttgtgtgatgtactctgtgtagaggttaaataagcagggtgacaatatacagccttcgtgtcctcctttcccaatttggaaccagtccatcattccatgtccggttctaactgttgcttcttgacccacatacatgtttctcagaagacaggtaaggcgatctggtattctcatcttttttaagaattttcagtttgttgtgatcctcattgtcaagggttttagcatagtcaatgaagcagagtagattttttatggaactcccttgctttctccatgatccagcaaatgttggcaatttgatctctggttcctctgcctctttgaaatgtagcttgtacatctggaagttcacagttcatgtactgttgaagtatagcttgaaggattttgaacataacctagctagcatgtgaaatgggtataattatacagtagtttgaacattctttgacatgcccttctttgggattggaatgaaaactgaccttttccatccttttcgtggccaccatggagttttccaaatttactgatatattgtgttcagcaccttaataacatcatcttttagaattttaaatagctcagctggaattccgtcacctccactggctttgtttgtagtaatgtttcctaaggcccacttgacttcgcactccaagatatctggctctaggtgagttaccacatctttgtggctatccatgtcattatccaagaccttttttgtataaggcaaatacataaaagaagccataaaggcaaatccgtaaaaggagaaatttacagtaacacaaaaatagtagggagttttaacaccccattttttatcaatggacagatcatccagatagaaaatcagtaaggaaacacagtttttatatgacccactagaccagttggacttaattgatatttttagagcattccatccaaaagcagcagaatatacattcttctcaagtgcacatggaacattctccaggatagatcacatttgggtcacaaatcaatccttggcaaatttaagaaaattgaaatcatatcaagcatcttttccaacttcaacctatgagattataaaatcaattacaagaaaaaactgaaaaaatcactagcacatgggggctaaacagtatgctagtaaacaaccaatggatcactgaagatatcaaggaggaaaggaaaaaaaaatgcctagagacatgaaaatgaaaacacaatgatccaaaatctgtgggacatagcaaaggcagttcaaagagggaagtttatagcaatacaaccttacctcaggaaacaagaaaaatctgttaaaccgcctaaacaacataacctgtctcttatatctaaagcaattagagaaagaacaaacaaaatccaatgttagtagtaggagagaaatcataaagatcaaagcagaattaaatgaaatatagacaaagatctatagaaaagatcaatgaaactaaaagctggttctttgaaaagataaacaaaattgataaacctttagccagactcattaagaaaagttgggatagggctcaaatcaacaaaatcagaaatgaagaaagaaaagttataaatgacaccacagaaatacaaaggataagagactactacaagtaactgtatgcaaataaaatgaataaagtaaaaaaaaaatggataaattcttagacaagtataattttccaagactgaatgtggaagaaataaaaaaatatgaatagaccaatcataagtattgggattgaaactatgatttaaaaaatcccaactaataaaagtccaggaccagatggcttaacaggcaaattctgccaaacatgtaaagacttaatacctattcttctgaaactctttcaaaaaattgtagaaggaacactggaactcattctgtgaggccactatcactctgataccaaaactagacaaagataccacaaaaaagaaattataggccaatatcgctgatgaacatagatcaaaaatcctcaacagaatattagcaaacagaatctaacaatacatttaaagaaccacacatgatcatcaagtaggatttatatcagaaattaaaggatttctcaatgtctgcaaatcaatcagtgtgatacaccacattaaccattgaagagtaaaagtcatacaaccatctcaatagatgcataaaaagcttttgataaagttcaacaccaatttgtgacaaaaactctcaagaaaatgggcatagagagagaacatacctcaatataacaaaggccatatatgactaccccacaacaaacatcattctcaaatgagaaaagctgaaagcatttcctctaagatcaggaacaagagaaggatatccactgttgtcaattttattcaacatagtttgggaagtcctaaccatggcaattagagattaaaaggaagtaaaaggaacccaaattgtaaaagaagatgtaaaactgtcactatttgaagatgacatgataccgtacaatacaaaatccttacaatgctagcagaatactagagctcatcaatgaatttgtgaagttgcagtatacaaaataaatacacccacgtctattgcatttatatacactaacagtgaaaaatcaggaagagaaatcaaggaaatagtctcacttaccattaaatgaaaatgaataaaatatctaggaataaacctttctaaggagggagaagacttgtactttgtaaactataagataccgaaaaaagaaattgaagattacattaacagatggaaagatagaccatattcctggatgggaaaattcagtattgtcaaaatgactatactacccaaagcaatttacagattcaatgaaatccctatcaaatttgctgtagtatttttcacagagctagaacaaaaaaattttaagtttgtatggaaacataaaaatccccaaatagtcaaagcaatcctgagaaagaaaaatggaggtggcagaatcagacttcctgacttctgattatgctaaaaagttatagtaatcaagacagtatggtactggcacaaaaacagaaatatagataaataaaacaagataaagagtcaagaaataaacccacacatctatggtcaacctacaacaaaggaggcaagactgccatggagaaaagacagtctttttagtaagtggtgcttggaaaattgaacagctacatgtgaaaaatgaaattagaactttgttgaacactatatacaacaataaacctaaaatggattaaagagtttgaatgctttaattgaatgctataaaactcttagaggaaaatacaggcagaacactctctgacataaattgcagcaatatattttttgatttgtttcctagagtaatggaaaaaaaagcaaaagtaaagaaatgagacctaattaaacttaaaagttttttttttctcacagcaaaggaaatcataagcagaatgaaaagacaatgaaaagacactgaatggtagaaaatgtttgcaaatgatataatcaacaagaggagaatggtgtggcagagaatgagatgattagagagcatcactaactcagtggacttgagtttgagtgaactccaggaggtagtgaaggacaaggaagcctggcatgctgcagttcatggggtcacaaagaatcggacatgacttagtgactaaacaacatcaagggattaatacaaaatttacaagtagctcatgctgatcaatatcaaaaaagcaaacaatccagtcaaaaaatgggcagaagacctaaacaacatttctccaaagaagacattacagatgactaatagggactgaaaagatgctcaatattgctaattattagggaaactcaaaacaaccatgagatatcaccttatacagttcagaacagccatcatcaaaaagcctacacacagtaaattttagagagagtataggaaaaagactctactcatggacatcaccagatggtcaatgccaaaatcagatctttgcagccaaagatggagaagttctatacagtcagtaaagtcaagaccaggaactgactgtggctcagattatgaactccttattgcaaaattcagacttacattgaagaaagtagggaaaaccactagaccatttagatacaaccgaaatcaaatctcttatgattatgtagtggtagtgacaaatagattcaagggattagatctgatagacagagtgcctgaagaactatggatggaattcgtgcaaaaggcaaaatggaaaaaagcaaaatggttgtctgactaggccttacaaatagctgagagaagaagaaaattgaaaggcaaaggagaaaaggaaagatatactcatttgaatgtagagttccaaagaatagcaaggagagataagaaagccttcctcggtgataaatgcaaagaaatagacaaaaacagtagaatgggaaagactagagacctcttcaagaaaattggagttacaaagggaacatttcatgcaaagatgggcagaaatgtacagaataaaggacagaaatggcatggacctaacagaagcagaagatactaagaaaaggtggcaacaacacacagaagaactatcaaaaaagatcttcatgacctaggtaactacgagattgtgatcactctcctagaatgtgtagtcatcctggaatgtgaaatcaagtgggccttaggaagcatcactatgaacaaagctagtggaggtgatggaattccagatgagctatttcagatactaaaagatgatgcctttaaagtgctgcactcaatatgccagcaaatttggaaaactcagcagtggccacaggactagaaaaggtcagttttcattccaatccctaagaagggcattgccaaagaatgttcaaactaccacacaattgcactcatctcatatgctagcaaagtaatgctcaaaattttccaagccagagttcaaccgtacataaaccatgaacgtccagatgttcaagctggatttagaaagggtagagaaacctgaggtcaaatttccaacttccattggatcatagaaaaagcaagagcataaaaaaaaaatccacttctgctttagtgattacaccaaagtctttgactgtgtggatcacaacaaactgcagaaaattcttcaagagatgggaaataccagaccaccttacttgcctcctgagaaatctgtatgcaggtcaagaagcaacagttagaactggacatggaacaatgcactggttccaaattgggaaaggagtatgtcaaggctgtatattgtcattctgcttgtttaacttatatgcaaagtacatcatgtgaaatgctgggctggatgaagcacaagctagaatcaagaatgctgggaaaaatatcaatgatatcagatatgcagatgacaccaccattatggcagaaagcgaagaaggactaaagagcctcttgatgaaagtgaaagaggagagtgaaaaagttggcttaaagctcaacattcagaaaactaagatcatggcattcttagcaatggtcccactgcttcatggcaaatagatggggaaataatagaaacagtgtcagactttatttcgggggggggggctccaaaatcactgcagatggtgattgcagccatgaaattaaaagacgtttgcttcttggaagaaaagctatgaccaacctagacagcatattgaaaagcatattcctttgctgacaaagattcatctagtcaaatctatggtttttccagtagtcatgtatggatgtgagagttggactacaaagaaagctaagcaccaaagaattgatgtttttgaacttcggtgttggagaagactcttgagagtcccttggactgcaaggagatcaaaccagtgaatcctaaaggaaatcattcctgaatattcattggaaggactcatgctgaaacttgaagctgcaagccacttgatgtgaagaactgacactgaaaaagaacgtgatgttgggaaagagtgaaggcaggaggagaaggggacaacagaggatgagatggttgtatgacatcactgacatgatggacattagtttgaggatgctccaggagttggtgatggagagggaagcctggcatgctacagtccatggggtcacaaagggttggacacgactgagcaactgaactgaactgatagaaaaaaagacatccatttacattgttggtgggaatgtaaattggtacagccactatagagaacagcatggaagttcttaaaaaaaaaaaaaacaactaaaagtaatactaccataagatccaacaatcccgctcattggcatatgtctggataaaaccataatttgaaaaatacatgcaccataatgttcaagacagtagtatttccagcatcaagacatggaaccaacctaatgttcatggttaatggataaagaaaatgtggtacatacatacaatagaaatttacttagccatataaagaaatagtgccatttgcagcaacatggatggacctagacattatcttacaaagtgaagtaaatcagagaaagataaatatatgatatcacttatatgtagaatctaagaaagtatataaatgaacttatttacaaaacagaaatagacttgcagacataaaaaactaatttatggctaccaaagggataaagggaggaggagggataaattaggagttttggattaacagaaacacactagtatataccaaataggtaatcaacaatgacctactgtatagaacaggaaactctactcagtattctgtaataacctacaggagaaaagaatctgacaaagtgtagatttaggtatatgtataattgaatcactttgctgtacagttgaaactagcacaaacttgtaaaagagctatactccaatataaaataaaaattaagaaacaaaacaaaaatcactactaggcctcataagagtcaagaaatcacatctgacaaatctctgctttctctgtgtaagaattagtcagaaattacaggaagttgtgaggaaaattattccaagtcaccctttgcactctgctcacttgtagatctcttgggatgggtcccatttgcagaatttctagtattgaataggcagatgggcagacctccagtgtccactggtcctttcctggcattggcacaagtctacagtgctccaggatcccatgtgcaatgacacattgtcctttcatctctcaactgattgatggggagatagtcttcctttgtcggttacacttgctcctttttgcctgttctagggagactccccactaatgaacatgattatttaaacaccttttaaacaacactggaagagtttctttaggagagccatgtactctatgctcttgaatggcattttcacccatcacaggaaggcatttcttaccatgacccagatatgtgtgcactagaacattcctcaggtcttttccaccaggcccccaggccctgtgccactgggatcttcctcctggctctgccacaagctactgtgccagtggagcactcttctgctcctccatccactgacatcctccatccagaacttcgatggtgttggtctctgctcgttctcatcctgtctcttttgtaagttcttaatctcctttgtgagttttctgtttccacacatcttcaacatctatggattttggggttctgattttttgactcttttccctgttaggtgagcattttctagtggagcttatgaccttagtggcttgcactgttgcctgaatgctaggattgcccacctctgtctctgccagagtctcaccttcctcagatcatgtgtgccagtgccctagcctccacatacttgatggatccctcacactgaagatgctctacctggatcacatccattctgcagtgctggggtcatctccttgctgggtctccagacatgtttctatcctcagattacaccatgatatttagtaaaacatccagtagttttactttatacactttaaagagaatttctttgaagtaattgtgtcagtggggttcaaaccaaaattgtttcttgaattaccctgctacaatccagttgactgttttgactttcacaaagctagcctgaaagcttcatccctagaaaatggaattggtgggccaggagctagatatcccttaaatatatgtagtttattaggctctgaatgctctaatgattctgagggatccttgattattttatatgcctcaacatttgaccacttactctatcaaatgaggacattgtggaaaattaagaataaagtggcttagtgtagtcaaaatgaaaacagtacaaaatgaggctgagagggaagggaagaaacagaaccagtactttggaagaaagggctgcatttaagtactgcactgatgtaagtatgacagtaggtagtttggttactgaatacgttaaagagacaattttaggaaattgtagagccatgtaaaaacagcaaggaggccctgacacatgcactgaacaagcttagaaaacacatatgtagcctattgtgcattgcacctgcctgtgttttttcttgaaattttcagtctggatttttccattctatatttttcttacttaaaaaatctacttgttacaattctagaagcaaccaaatacttcttttcaacactgtgttagttttgctgtggaggcctttctaagacaccttttgtccttttctttctcctcatttcacccttttcatctgatttttccttcaactgctccatcatttctaatgggagaaaaattaacagttttgttacaggttttcttcactatccaaaaatagagctttcccatataaactttcagaagtcaaaatggcatagagtgagaaaacaatcacttgtttccctaaaagcaaaaatcctcttcagatttcttccttagtgaaaacagatgctaatgtaggtcttttgtaaaagcaaagcaaagtggcataaagtgaaatttcaaaaagtgggggacatctgtattgtgttccaaagggacctataattattcaggatataagtactttggccttcatgagttcctgtctccaaaaaatattaattacatttcacgactgaattcatacacaggaaatacattaatatattttaagctatcttcttccctattttgttcctgattttaaaacaaatgaaatgattttcatttaaaaagtgttttggacctttttattttttaattttatttattttattttattttatttttttattttattattttttttcttttttattttaatttttttcttttttcttttttatttttttaatttttactttacaattctgtattggttttggcatagattgacatgaatccaccacaggtgtacatgcgttcccaaacatgaacccccctcccacccccctccccacaacatctctctgggtcatccccgtgcgtcagccccaagcgtgtcatatcctgcatcagacatagactggcatttcgattcttacatgatattatacatgtttcaatgccattctcccaaatcatcacaccctctccctctccctctgagtccaaaagtccactatacacatctgtgtctcttttgctgtcctgcgtatagggtcatcattgccatcttcctaaattccatatatatgtgttagtatactgtattggtgtttttctttctggctcacttcactctgtataatcggctccagtttcatccatctcatcagaactgattcaaatgtattctttttaatggctgagtaatactccattgtgtatgtgtaccatagctttcttatccattcatctactgatggacatctaggttgtttccatgtcctggctattataaacagtgctgcaatgaacattggggtacatgtgtctctttcaattctggtttcctctgtgtgtatgcccaacagtgggattgctgggtcataaggcatttctatttgcaattttttaaggaatctccacactgttctccatagtggctgtactagtttgcattcccaccaacagtgtaggagggttcccttctctccacaccctctccagcaaaggtatttgggacatgcattctaaagacacaacatccatggtgatatcctcagaaacgtggtggattctaatggccattgaaagcatgccatgagccccagctcttcataggtttctctgctatctgtatatgatcagcctcacataattccatctgtcattcagatgctattttcaagggcaaccactggatgtgcagataaactgcaagtgattaataacttcagatcattgtacactggcaggcctaaattttcacacaacttactaatggttctaagttgtgatcatggtttctaagttgtgttttatctttagcaatgttataagtggtttcaggtattttctggaaaagaggggggacaaataagtaaattttaataaacaataatttgttgttcagtgtctgactctttgagactccatgaactacagcatgccaggcttccccgtccttcgccatctcctggagtttgctcaaactaatgtccattgaattagtgatgctacccaaccatctcatcctctgttgcccccttctcctcttgccctcaatatttcccagcaacgataattaatattgagttcactccttccatctcaggcctttagaagatgaccttccagactgctgccttgggaatggtctccaagtttgtcactagtgtccctgggacctactctctttacaccccactcaccccactggtcctgcctgagagtctcccccaatgttccgtcattatgcctctgaccctgttttgtggatcagtggtccaggagttcttgccagtgagaaactggttctcgcagcccagttcatggggacaacaacctgcgagggtctcagagggtgtcacatgtatttactgaatatttaagcaccgtgaaaacaaaaggaaaaaactgaccaatattgttgctgacttattcccttacaaatcaacctagtggagatttcatccaacaacaaaaatatcctcagcagttgactgtggaaaagagcccagagtcaggcaaaggaattgcgaggggaaggagagcacttctgcctgggacccttgagactggttgggacaccctgtggttcttaagtcctgatggccactaggtgacctgtggaggactgtgctttccaggcatggcgaagctctttcgtatcgatagcagtaacttaaatgaagtgtttaagaaaatgcaatttaccttcaaacagatgaatattgcctcatagtctttttatttttttcttttaaattgaagtatcgttcatttcggagaaggcgatggcaccccactccagtattcttgcctggaaaatcccttggatgaaggagcctggtaggctgtagtccacggggttgagaagggtcggacatgactgagcgacttcactttcgcttttcactttcatgcgttggagaaggaaatggcaacccactccagtgctcttgcctggagaatcccagggatgggggagcctggtgggctgccgtctctggggtcgcacagagtcggacacgactgaagcgacttagctagctagctatagttcatttacaacattgtgtaagttccaggtgtatagcaatatgattcagttttatatacatatatgttgcttcaggttcttttgccttataagttatcataaaatactgagcatagttcctggtgttataacaataagttcttgttggttatctattttatatatagcagtgatagctttatgttttgtctccctcagtcttgtttcaccggatcccagaggacatgtcagtatagtggtgaagtagaaccagctaaggttgggataagatgtgatgacctgtttttgtttccttctaaggttgcttgtcattcagataataattggtgttttattatgaaagaaacaactcttgaatgtttgcaaaactgcagtgaagagtacctgttctgtgggctttgtgtaggttccccagcccttgatctcagacttccctgggctctgccgtgaggttgtgcctgtgctgcctgtggtttcatgtctcctttcctgtttccagggtctggacttcgctgggtttacagcacacatgtttgctgggatttgcttcgttctcttgttctcctttccactcctcagactcctttactggaacaaaaagatctataacaaggaacccagtgagattgttggtgagtagaagcacctcctcatagagcttcagagtttactaacacaatattatttttttctgggggaggttgccacaaaaaggcaggagattaatgctatgtagaataccagggaagtatccgtcactgggatgctgcacactagcgtgtccctgtctgcctccttgtaggcagtgcactttcaggggctttaaatccatgaattgtgcctctttagtgttctatagaatgaaatgtggttacatgtaggaagcaatgtccactgcatacaatttgcttgtcatgatatcattgaaccacctgtatttaatacaaaaagagcatatagactgtagtctatatttttgaaccactctgttgcttcatgtccagttctgttacattttgtgctgcatatgggcttctcaggaggcaggtaaagtggtctgatattctcatctctttaagaatatttcacagtttgttgtgatccacacagtcaaaggctttattgtagtcaatgaagcagaagtagatgttattttgaaatttttctaaatccagcttgtacatctggaagttctcagttcatgtactgctgaagcctagcctgaaggattttgagcataatcttgctagcatgtgaaataagtgcaatcaattcccatttctgtataaatggctgggaatctaagtatgttctcaccagccttcctgctcatcagatggtgactttacatggtagatctgcctttctttcctgggtgacttttgtgttcagaatttaactgtttttgttctaactaggaaaatgtcatatacaccttctcaagtcacctatataaaaccagcttgttcctagtagaattgaatcacccacctccaccagataaatggaaagataagaagaaatttctattccagacaatttgtattgattgcacaaaaattggagtgcccttgtagatataaaagtggtactttaaatgtaagcaatcaacagggatttcctgggcagcctcttggcctagcccttagtgaaggctgcataggtgcaagacaagtgggcagcttgtgtaggcataggaatgggcctcaccaaagaagcccaaaactgtggggggtggctccagtatgggggctggagggaaggaaaggaaagcaggcacagatgccgggggccaaatggagtagtctttttggctgcttcctgggccatggaagattcctgccatgtaacatagtttacttcatttaggaagaacgtgttttcttaataacattgataattactcacctggtcgtttgcagagcagacatgtgattttttttgagaaaaaagaacatcttcatgttcatggcttcccaggtggtgccagtggtaaagaatccacctgccaatacaggagacccaagtgacatgaattcaattcctgggtcaggaagattccctggcttaggaaatggcaaccaactccagtattcttgcctggaaaattccatggacagaggagcctggtggactacaatccatagagtctcaaagagtcagacacgactgagcgactgagcatgtacacacattcatgttaacatggcattcttcctatgtgtgtctgtgtccacatttccccatttgtgaggacaccagtcatcttggatttggggccatcctaatgacctcaccttaactaattatatctgcagtgagcctatttccaaaacaaatcacattctgaggtactagaggttaggacttcaacacgtgaattcagggggacacaattcaacccatagcaatcagcaagaggtattcaaaatgttttatcatcaacaagtatatgtaaagtgggataacttaatatgtagctttagttttctaatggaaagggtcatacccatggagagctagggaaactaatcaatcacaatggctaatctgtctttagaagcttgtgtgggcacagttgcacctctttcctccccaatatccctccaccttgctggtgatcagaattactcaggaataattgttatatatacagattatcaggcccacccctaggaaatctgtgctgcgaataaactcttctggaaagtcttatcttgagattaacttggacatactgatttggaaacatagaaaacaaatctgtgtattgattcctttactcatcatgaataaagagctgagggaagctttgagggaagtgggatagaaaggttgggatatggataatgctggaaccctatggtaaggacaacacaggttgtacgtcagcacacagtgaactgtgcagatccagagcaatcactctgagccactattgtgtatagggaaatctgattttgaattgcttggtataactatagattcctaagcttaaccccagagatttgggttcagcaggtctgtgatgagtccaaaacatgtcagaatagcttggctatgctacagtttgaatattctttggcatggcctttctttgggactggaatgaaaactgagcttttctagtcctgtggtcactgctgagttttccaaatttgttggcttattgagtgaagcactttaacatcattatcttttaggatctgaaatagctcaactggaattccatcacctccactagcttggttcatagtgatgcttcctaaggcccacttgacttcacattccaggatgtctggctctagttgagtgatcacaccattgtggttatctgggtcatgaagctcttttttgtatagttcttctgtgtattctctccacttcttaatatcttctgcctctgttagtttctgtcctttattgtgctcttctttgcatgaaatgttcccttggtatctctaattttcttgaagaggtctctagtctttcccattgtattgctttcctatatttctttgcactgatcactgaggaaggctttcttatctctccttgctattctttggaactctgcattcaaatgagtatatctttccttttctcctttgcctttcacttctcttctcttctcagctatttgtaaggcctcttcagacaaccattttgcctttttgtatattctttttcttggacatggtcttgataactgcctcctgtacaatgtcccaaaccttcatccatagttcttcagtcactctatcagatctaatcccttgaatctatttgtctcttctgctatataatcataagggatttgatttaggtcatacctgaatggtctagtggttttccctactttattcaatttaagtctggattttgcaacaaggagctcatgatctgaaccacagttagctcctggtcttgttttgctgactgtatagactagcaaagtaatgctcaaaactctcctgcatagactagcaaaataaggctcaaaattctccaagcaagacatcaacagtatgtgaaccacaaacttccagatatcaaggtggatttagaaaaggcagaggaaccagagatcaaattgtcagcgtctgttggaacattgaaaaagaaagagagttccagaaaaactacttttgctttagtgattaaaccaaagccttttgattgtgtggatcacaacaaacagtgtaaaattcttcaagagatgggaataccagaccaccttacctgcctcctgagaaatctgtatgcaggtcaagaagcaacagttagaactggacatggaacaatggactggctccaaattggaaaagaagtatgcaaaagctgtatattgtcattctgtttatttaatttatatgcagagtacatcatgtgaaatgttgggctggataaagcacaagctggaatcaaaattgccaggaaagatatcaatgacctcagatatacagatgacaccaaccttatggcagaaagtgaagaagaactaatgagcctcttgatgaaagtgaaagaggagagtgaaaaagttggcttaaaattcaacattcaaaaaattaagatcatggcattcattcccattgctttatgacaaatagatggggagagaactgaaacagtgagagactttattttcttgggctccaaaatcactgtggatggtgactgcaggcatgaaattaaaagacgtttgctccttggaagaaaagctatgaccaacctagacagcatattaaaaagcagagatactacttagccgacaaaggcccatctagtcaaatccatagtttttctggtagtcacgtatagatgtgagaattggattataaagaaagctgagcgccaaagaattggtgcttttgatctgtggtgttggagaagactcttgagggccccttggagtgcaaggagatccaaccagtccatcctaaaggaaatcagtcctgaatattcactggaagtactcatgctgaagcttgaagctccaagccatctgatggaaagaactgactcaatggaaaagatcctgatgctgggaaagactgaaggcaggaggagagggggatgacagaggatgaaatggctggatgccatcactgactcaatgggcatgagtttgagcaagctctgggagttggtgatggacagggaagcctggctgtgctgcagtccaagggtcacaaagagttggacacgtttgagctactgaactgaagtgaactaatagtactagaaaaagtatccctgaaatcttagtaacactacttcgtgttggcctaatgtccactgtgggatcacagtgccttgctgatcagtagttctcagaactgtgagctgctggtcatcatagggatcagagagaaccatatgttccactctgtcactgaatgactcctcctgactgtcctgactgtcactaggctccaccagttgcaggggctgggttgagtcagcctgccaagtgatcaacatgggagagaatttgacttatttattgaaaagcacaaataatcaccagagtatgcccctctggtaatcaaataccaactcatgatgcttattcctaatattttatatagacttttttatatctgtgtacattagggatatttgtgtgtaatatcctctcttaaaatatatactttttgctgtcctcaaaggatgaatatataagtataccctccttttcagcttttgggaagagatggtgtaaaattgctattacattttaccttaaacgttttccaggatattttagagttgaacttccttccctcccttcttacatcactatctcccttgatttcctcctccctctctctctctctccttcccttctagtttttaaatacaaatactgattctttaatagatataggctggctattaaagttatctgtttcttcatgagggctcactggtagtttctgcctttaaaggaatttgtccctgttcaaactcagttgttgaaagaattattctaaaattgtttataatagtttttcattatcctttaatagctatagaacttttaaaattgaagtatagctgatttgcgaaattgtgtatagtttcagtcaacaggaaagtgattcagttatatatgcaaatatatatatatacactcagattattttccattagtttattataagatatggagtgtagttccctgtattaaacagatacaattccttatctcttttatgcatagtagtttgtctctgttaatctcatactcctaatttatgtctccccctcctcttcccttttggttaccataagtttattttctatgtctgtgaatctgttttatttgcatatagatttatttgtattatttttagtttctacaaataacaattcagttcagttcagttcagtcactcagtcatgtccaactcttcgcgaccccatgaattgcagcatgccaggcctccctgtccatcaccaactcccagagttcacccaaactcatgtgcatcgagttggtgatgccatccagccatctcatcctctgtcgtccccttctcctcctgcccccaatccctcccagcatcagagtcttttccaatgagtcaactcttcgcatgaggtggccaaagtactggagtttcaaccttagcatcattccttccaaagaacacccaggactgatctccttcagaatggactggttggatctccttgcagtacaagggactctcaaaatttcacaaatatcctataatattttttcttcacttagtacaatattctctatgtccatgttgctgcaaatggcaatatttcattctgtcaattccaaagaaaggcaatgccaaagaatgctcaaactacggcacaattgcactcatctcacatgctagtaaagtaatgctcaaaattctccaagccaggcttcagcaatatgtgaaccgtgaacttcctgatgttaaagctggttttagaaaaggcagaggaaccagaaatcaaattgccaacatcccctagatcatggaaaaagcaagagagttccagaaaaacatctatttctgttttattgactatgccaaagcctttgactgtgtggatcacaataaactatggaaatttctgaaagagatgggaataccagaccacctgacctgcctcttgagaaatctgtatgcaggtcaggaagcagcagttagaactgcacatggaacaacagactggttccaaataggaaaaggagtacatcgaggctgtatattgtcaccctgcttatttaacttatatgcagagtacatcatgagaaatgctggactggaagaaacacaagctggaatcaagattgccgggagaaatatcaataagctcagatatgcagatgacaccacccttatggcagaaagtgaagaggaactaaaaagcctcttgatgaaagtgaaagaggagagtgaaaatgttgacttaaagctcaacattcagaaaatgaagatcatggcatccggtcccatcacttcatgggaaatagatggggaaacagtggaaacagtgtcagaatttattttggggggctccaaaatcactgcagatggtgactgcagccatgaaattaaaagacgcttactccttggaagaaaagttatggccaacctagatagtatattcaaaagcagagacattactttgctgactgatgtccatctagtcaaggctatggttttttctgtggtcatgtatggatgtgagagttggactgtgaagaaggctgagcaccaaagaattgatgcttttgcactgtggtgtttgagaagactcttgagagtcccttggactgcaaggagatccaaccagttcattctgaaggagatcagccctgggatttctttggaaggaatgatgctaaggttgaaactccagtacttcggccacctcatgcaaagagttgactcattggaaaagactctgatgctgggagggattgggggcaggaggagaaggggacgacagaggacgagatggctggatggcatcacggactcgatggacgtgagtctgagtgaactcctggagatggtgatggacagggaggcctgacgtgctgcgattcatggggttgcagagtcagacacgactgagcgagtgaactgagctgaattaacataccattataaatatatatacatcttcttacctatatatatatatacacacacacacacatatatatatatatatatatacatgtatatatatatacatcttcttaccaattgtctgttgatgcacacttggattgtttccaggtcttggctatgcatatatgtttttgaattagagttttcatctcttctatatatatgtccaagaatgggatttctggatcacattgttgtttagttgttcagtttgtctgactttttgtgaccccatagactgtagcatgcccggcttacaagtccttcaccatctcctggagcttggtcaaactcttgtccattgagtcggtgatgccttccaatcatctcatcctctgtcgtccccttttcctcctgccttcagacttttccagcataagggtctttcctaatgaatcagctcttcatatcaggtggccaaatattggagcttcagcttcagcatcaatccttccaatgaatattcaggtattatttcctttagaattgactaatttgatctccttgcagtccaagggactcttgagagtcttctccaacatcacagttcaaaagcatcagttcgttggtgctcagctttctttatggtccaactctcacatccatacatgactactggaaaaaccatagctttgactagatggacctttgttggcaaagtaatgtctctgctttttaattcgctgtctaggcttgttataggttttattctaaggagcaaatgtcttttaatttcatggctgctgtcaccatctgcaatgattttggagcccaagaaaatgaagtttgtcagtgtttccactgtttctccatctatttgccgtgaagtgataggaccagaaccatgatctttgaatgttgagttttaagcctactttttcactctcctctttcaccttcatcaagaggctctttagttcctctttgctttctgccataagggtagtgtcatctgcatatctgagtttattgatattttttccaacagtcttgattccagcttgtgcttcatccagcctgacattttgcattatgtactctgcatataagttaaataagcagggtgacaatatacagcctttacatacccctttcccaattttgatccagtccattttcccatgtacagatctaactcttgcttcttgacatgcatacagatttcttaggaggagggtaaggtgatctagtattcccatctcttgaataattttccacagtttgttgtgatccacagaatcaaagattttagcatagtcaatgaagcagaagtatatatttttctggaattctcttgctttttctatgattcaacagatgttggcaatttgatatctattagcttcttatatagtctggatattaactctttgtcagttgtttcatttgcaattattttctcctgttctgagggttgtctttcagtcttgctaattgttaccttcattgtgcagttcttatatttaattaagttccttttgtttatttctgtttttatttccattttctaggagtggatcaaagaggaacttgccgtgatgtatatcagagtgtactgcctatgttttttttttttaagagatttatagtgtccagccttatatttaagcctttagcccattttgagtttatctttgtgtgtggaattaggaggtgttctagtttcatcctttcacgtgcagctatccagttatcccataccacttattgaagaggctgtctctctccattgtatattcttgacttctttgtcaaaagtaaggtacctgggactaagtttatctccgggctttctatcttgttcaggtggtctatatttctgtttttgtggcagtaccatactgtcatgatgactgtagctttgtagtataatctggtgagaaaggtagattcctccatcttcattcttctttatcaagattgctttggctattcgagttttttgtgcttccatacaaattgtgaaattttttgttctagttctgtgaagaataccattagtaatttgatagggatcacactgtatctgtagatagcattttgtagtatatatagttattttcacaaccttgtatgttgattccaaccttgtatattgattcttccaacattgtatatctctccatttgtttatggtgtgttgatctctttcatcagtgtcttagagttttctgcatacagaacttttgtctctttaggtaggtttatttctgggtattttattcttttggttgcagaggtgcataggattgcttccttaatttcactttctgatttttcattgttagtatataggaatgcaagggatttctgtgtattaattttatatcctatgattttataatatttattaattctagtaattttctggtggcatcattatggttttcaatgtagaaaatcatgtcatttgcaatcaatgagagttatacttcatttccaatctggattccttttatttcttttcttctctgattgctgtggctaggacttccaaaactatgttgaataaaagtggtgagaataggcacccttgtcttgtttttgattatggaggacatgctttttgatcttttaccattgaagataattgttgctgtaggttcactgtatatgggttttatgatgttggggtatgttccttctatgcctactttctggaaagcttctttaagaaatgagtgttgaattttgtcaaaggctttctctgcatctattgagatgatcatattatttttatctttcaatgttaatatggtacatcagatagcatatactgaagaatccatgcatctctgggataaagccctcttgatcatcttgttaatgtgttgttggattctgtttactggaattttgttgaggatttttatatcaatgttcatcagtgctattggcctgtaattttctttttttgtggcatctttgtttagttttgatattagggttatggtggccttgtagaatgagtttgggagttttccttcttctgcaattttctggaacagtttgagcaggatagatgcctgtcaagccatctagccctgggattttgttgaaaggtttttgattttagttttgatttccgtgtttctgattggtctattcatattttctatttctttggttcagttttagaagcttctacttttctaagaatttgtccatttttccaggttgtccatattattggcatatcgttgctcatactagtctcttgtgagccttggtatttctgtgttttctgttgtaacttttccttttgaatttctgattttattgatttgagtcttctcccttttgatgggtctggttaacagtttgtcaattttatcttctcagaaagccagtttttagttttattgatctttgctattgtctccttcatttatttctgctctgattctttatgatttctttccttctactaactttggattattattattatttttgttctttttctagttgctttaggtgtaagattagcttgtttatttgatatttcttatttcttgaggtattcttgtattgctataaacttccctcttatcactgcttttactgtgtccagtacatttgagttgtcatgttttcactgtcttttgcttctatccatattttgatttcctttttgatttcttcagtgacctgttggttattcagagaagtattatttagcctccatgtgttttttttttttaatagatttttcttctgttgtttttatctaatcttatagtgttgtggtcagaaaagatgattagaattatttcaaattttaaaagtttaccatggcttgatttgtggcccaagatgtgatctatgctggagaatgttccacttgcaattgagaaaaagtgatatctattgattttggatgagatacctgtagatgtcaattggtcaaacttgtcaaatgtatcatttaaagaagaactaaagagcttcttgatgaaagtgaaagaggagagtgaaaaagttggcttaaagctcaacattcagaaaactgagatcatggcttctggtcccatcacttcatggcaaatagatgggcaaacagtggaaacagtggcagactttattttgggggactccaaaatcactacagatgatgatggacagagaggcctggtgtgctgcagtccatggggttgtaaagagttggacacaattgagcaactaaactgaactgaactctgtttaaaataagtaagcaacaatgatatattgtataatataaggaaatatagccattgtttttaataactttaactaaagagtaaaaaaaatatcgaatcactatgttgtatacctgaaactaatataatattgtaaatgagctatattcaattttaaaagttttaatattaaaagtatactggagcaaaaaaaaaaataaagcttgcatttctttatgaattttctgtctggataatctgtcaattggtgtgaatggggtattagtgttaccccactattattgtgttactgttgatttaccattttaatagttgctaacattttccttatgtgctgggtgctcttattttgggtgcatgtacttaataatcattttatccttttcttgggttgatgccttgatcattatgtaatgtccttctttgtctcttgaaacaatcttttttgtaaagtctattttatctggcatgagtattgctatttccactttctgttgatttccatttgcatggaatacctttttttagatcctcactttcagtctgtatgcgtccttaggtctgggttgggtctcttgtacatagcacatatcttggttttgtatccatttatccaatctgaatcttttggtgggagtgtttagccagtttatttatatatatgattctgaatcttcccttgtggctcagactgtaaagaatctatctaaatgcaggagatctgggttgggaagatccactggagaaggcaaaggcaacccacttaagtattcttgcctgggaaatcccatggatacaggagcttggtggtctacatttcatgccattacaaacagtagcacacaactaaaaacaaattctttcaccaattactttattgttttgcatttgttttgtatgcctttcctttttgtgtttcctttctagagaagttcttttagtgtttgttgtagagctggtttggtggtgctgaattctcttaactttagcttatctggaaagcttttgatttctcctttaagtctgaatgagattcttgcttggttgtaggtttttcccttttatcactttaagtatatcctgccattcccgtccggcctgcagagtttctgttgaaagatcagttcttagctttatgggggtgttgtatgttgcttttcctttgctgctttcaatatttgttttttttgtgtgtttaatttttgttagtttgattaatacgtgttttggcatgtttctccttgggtttattctgtgtgggactctctgggcttcctggacttgggtagctatttcctttctcattgtagggaattcttttgactataatagcgtcaaatattttctcatgccctttccttttgtcttcttcttctgggacccctatgattctaatgttgttacacttaatgttgtcccagaggtctccgagactgttctcatttctttctttttttttgctccagttgttttcagcattttaccttccagttcacttattttttcttctgcttcagttactctacaattagctccctcccacccccagtgcatttctaatctcagttactgtgttgttcattgttgtttattctttaattcttttaggtctttgttaaacatttcttgtatcttcctgatctgtgcctgcagtctaagtatccatgcctccattttattttcaagattttggatcatctttactatcattactatttattatttttggtgtagactgccagtttgttttcatttgtttggtcctgtggatttttagcatgttctttcatctgctgcacctttctctgtcttttcattttgcttaatttaccatgtttggggtctcctttctgtaggctggaaggacataatttctcctaactgtggagtctgcccccatggttggggttgtaccagtgccttgtgaagatttcctggttgggagacatgcctgtgttctggtgaatggagctcaatcttgtctctgggggcagtgccatatccatagtgagttttgggggtatctatgggtttggtatggctctgggcagcctgtctattaatgtgcagagttatgttcctgttttgctgaagatttagtgtggcatctggcactgaagcttactggccttggccttagtgttgagatggaggcctttaggagagctcttgcctattaatgtttcctggggtcagaagttctctggaggatcaaaatcctggagttgagtctcccacctcaggggttcaggcctgaccccttactggaactccaagacctcacaagccacacagcatagaagaccaaaccccgagactcttgctgaaggcaacactcagcagcccagaatacccagtgagactcacaccgaagtcctccaatatttctaggaaggtctctgggcctgttgtgggcagtatgtggtcagctcagtctcagatgtggccttacttcagtttgtacttactcctaaagttcacagtttcccctaaagttcactgtctgttccctgcctatcctcaagggagcgaaggccaaggcttattgaggctcatttgttcactcaggctgagaagtggggaggacatggcagccacaatttggatgcaccagggagtgcctgtgacaatagagtcttgatggatattggtgcagtctgaggtgggttgtatgctttcccagaggaattggcttcagattatgggtccctagaaagagtcaaagtgattaagcttccagaaaggtgtggaaagtaacctgtgcctgcttataaccaggcagttttgactacctctggagtcaggactgcatcagtggtgttttgcctgctgtctcaggcactttccctaggtttggcagtggcaattgtgtttaattccacagatgacactctgactggttttgccagatttggcagacacccaaactgtctatgagtgtggtgttaagtgtcccagaaacaacaacttcttgctgctctaggatgcccagtattttctctggactctgtccgccgtgtcaaagtagccctctcagagtatcctcatggaagccaagcttgatcctttccctgagatctgacacctgagcctgtcccttggcaccctgcctccaccctctgctgcgggcggaggcgtgtgagcggcttctcagttgagaagtgctatttggcagtaatttctgtagtgaattttctctgttttgtctcctgagccccgtgccaccatcacactcccctctgaggttccaaagctccctccctgactgcctgtgaaggggtttcctagtgtccagaactttcccctccttcatgactccctcccttggggtgcaagtcccatcctgaaatcctttgtctcttttagtctttatcttttcccctatctctttctaaggagattggcttgtctttttgaaaatttggggtcttctactgttgttcagaagttgttctgtaggagctgttttatattcagatgaatttttttaatgtacttgtggggaagaaggtgatctcctcctcttattcttcctctatcttcttgcattcccgcttattgtttcttaatgttagagctgaggttattggttttcatggaaattgattcagttcaaattagtttctaatttccatttttatttctcctttgatctttggatattttattttatttttatttacatttatttattttaattggaggttaattactttacaacattgtatttgttttgccatacatcaacatgaatccgccatgggtgtacacgtgttcccaatcctgaacccccctcccacctctctccctgtaccatccctctgggtcatcccaatgcaccagccccaagcatcctgtatcctgcatcaaacctggactggcaattcacttcttatatgatattatacatgttttaatgccattctcccaaatcatcccaccctctccatctcccacagagtccaaaagtctgttctatacgtctgtgtctcttttgctgtctcgcatacagggttatcattaccatctttctaaattccatatatatgcgttagtatactgtattggtatttttctttctggcttacttcactctgtataataggttccagtttcatccacctcattagaactgattcaaatgtattctttttaatggctgagtaatactccattgtgtatatgtaccacagctttcttatccattcatctgctgatggacatctaggttgtttccatgtcctggctattataaacagtgctgcgatgaacattggggtacacatgtctttttcaattgtggtttccttggtgtgtatgcccagcagtgggattgctgggtcataaggcagttctatttgcaatttttaaaggaatctccacactgttctccatagtggctgtactagtttgcattcccaccaacagtgtaagagggttcccttctctccacaccctctccagcatttattgcttgcagatttttggatcgcagccattctgactggtgtgaagtggtacctcattgtggttttgatttgcatttctctaataatgagtgatgttgagcatcttttcatgtgtttgttagccatccgtatgtcttctttggagaaatgtctatttagttctttggcccattttttgattgggtcgtttatttttctggaattgagctgcaggagttgcttgtatatttttgagattagttgtttgtcagttgcttcatttgctattattttctcccattcggaaggctgtcttttcactttgcttatatttttctttgttgcagcaccacttgttaaagagattgtcttttctccattgtatattcttgcctcctttgtcaaagataaggtgtccatatgtgtgtggatttatctctgggctttttattttgttacattgatctatatttctgtctttgtaccagtaccatactgtcttgatgactgtggctttgtagtagagcctgaagtcaggcaggttgattcctttaattccattgatctttggatattttaaatgtctttacttgcactaaatttggcgacttctttacctaatttaatttcatgggcttcccaggtggtataatggtaaagaatctacctgccaagcaggagacatgggtttggtccctgggttgggaagatcctatggagaaggaaatggcaacccactctggtattcttgcctgagaaattccatagacagaggagcctggcaggctatagtccatggtgttgcaaagagttagacatgatttagagacaaaccaacaacaataatgtaatttcacaatggtcagagaatatattttgtaaaatttgattatttttgaatttattgaaacatgtttttattgtaaaatgtggcctattctcataaatattctactattctacttgtactagaaaagaatatgttttctgccattgttgtttggagttatgtcaatatgaccaattaggtcaagttggctgatactgttattttgatcatccatattcttgttgattttctgtccacttgttctatcagttattgagaggtatatatagaaatctttgattatgtgactgtgaatttgtctttttatctttataattctaagatttttgcgttacatatttcagaattttatttagttcagttcagtttctcagtcatgtttgactttttgtgaccctgtgaactgcagcatgccaggcatccttgtccatcatcaactcccagagtttacccaaactcaagtccattgagtcagtgatgccatccaaccatctcctcctctgtcgtccccttctcctcccaccctcaatctttcccagcatcagggtcttttcaaatgagtcagctcttcgcatcaggtggccaaagtattggagtttcagtttcaacatcagtccttccaatgaacacccaggagtgatcttctgtaggatggactggttggatctccttgcaatccaagggactctccaagagtcttcttcaacaccacagttcaaaagcatcagttcttcggtgctcagccttctttatagtccaactctcacagccatacatgactactggaaaaaccatagccttgactagacggacctttgttggcaaagtaatgtctctgctttttaatatactatctaggttggtcataactttccttccaaggagtgagcatcttttaatttcatggctgtagtcatcatctgcagtgattttggagccccaaataataaagtcagccactgtttccactgtttccccatctatttcccatgaagtgatgggaccggatgccatgatcttcgttttctgaatgttgaactttaagccaactttttcactctcctctttcactttcaccaaaaggctctttagttcttcttcactttcttccataacggtggtgtcatctgcatatctgaggttattgacatttctctcggcaatcttgattccagcttgtgcttcatatagcccaaagtttctcatgatataccgtgcatagaaggtaaataagcagggtgacaatatacagccttgacgtactccttttcctatttggaactagtctgttgtttcatgtcgttataactgttgcttcctgacctgcttacagcttgtctaactcaatgaaactaagccataccgttcggggcacccaagatggaggggtcatggtggagaggtctgacagaatgtggcccactggagaagggcatggcaaaccacttcagtattcttgccttgagaaccccatgaacagtatgaaagtgcagaaagataggacactgaatgatgaactgcccaagttgataggtccccaatatgctacttgagatcagtagagaattttattactagggtacataaacatttagggttactgggtcttcttgaagaattaacacttttgttattatgaagtgaccttccctatccatagtaatattcttgctctgaaatctaatttgatcttaatgtagcaattccagctttttattgactgttgttagtctgatgtattttttaaagtcatcctttcacttttaacatttttgtgtatatttaaagtgcatttcttgcaaataacttacagctgggtcttgctttttatctaatctgataatctgtcttttaattgatatgtttaggtcattgatatttaatttgattagtgacatggctggatttaattgtatcttcatgttgcatttttctaattgtgattttatttataattattgaactaacttcaagtgatactatactacttaacatgaagtgtaagaatcttacaatagcttaagttaatttatcaacttctggcctcagtgtcttcccctgagacctctgaattagagctacctcctgtgagagagcaaatcccacatggtaatgtctttgcctgaggttgatcgagaagctcctaggggctggtggtaatcagagaggcagagataaggcatctgatactgtgtcctggtcagggccagtcagccaaaagcaacagctaaaacttatacaatgggaacaaatctcacaatggcacacaccatttgaggatcttgagtcttccctaaagatctttgcgggtcatgaggaaccactggatatttgaaagaagaaacctatgtaactatctgtcatttatcttcttagattgatcagcctagatagtattatcctcttagaagacaggtaaataggaagatagagtccttgtttctatatatcaatctaactgaatttatctatcaatagattaatatatagaaagtttctgtagatgacagatagattgatagaacaagcagtgttttaagattaatcagtggtgggtctcttccctggtggctaagaggttaaagagtttgcctctaatgtgggagacctgggttagatccctgggtcaggaagatgccctggagaaggaaatgacaacccattccagtattcttgcctggagaatgccatggacggaggagcctggtgggctacagtccatggggtcgcaaagagtcagacatgactgagcgacttaactaactaagtggtgggttggtaagaagtggcttcagtcaaagtttactgagagcaatcagaattggcaaatgtgcggagatgaaacctggataacctggtgaactgaggcaggaacaagtggatcctgcaagatccatatcattatattcggaactgctcccatggctcagtactgttcatttgtaatgtatcttatttctctgtcttgttggaggcctgtccctataatgtcaaattcattctctcctttagcatctagcatcctgtctggcacttattgcatgttcaatgcagaaatgtagaggagaatgtcattgataggaccaaaatgacatttcaggttcatgtacctggaagattaatgatgtcatataaaaactaagaaagagggaagagagtttcatgggggcagatggaaggcttatctgtgaatcttatagcacaagggtcagaggacaacatcaagtagctgattgggatcatagtcttggagctcagcagagacgggatggggaaatggtggtggagatgcacagtaagcctgggaactaaggagtgaatacttggccaaactgagctctgggtgcaggcagtgagctcccttttccttggcaaaatgtttcttaaccaaattttcccatgatcagtgacatatttatttcattttccaactaggagaacaaaagtggactagctgagcataaacccattgggtgatctggggagagtaacccatcctgttcaatttgatgggttagaaggcatctggactctgggtgtgtgtgaggggttgaagctgccactggaaaagacaactgcagaaaggagccctggggacctggaaggccagattcagtttctacttctgcaaacacagagatggagagggtgccataggctggcctgggaaaaaagttgttgggtactagctttgatatgcctattcaagaattttttcttaacacaaagagttgaaattatattacttcacatccactgtaatttttcaaagtcagctttgtcttctgtttccatcataataacatgaaagctaagaaaccactcttctggtttggtccctgaatatctgcatcacgaatgcatgtttcctcttcttagaggatacagaggggagtaggtgttgacatgtgaagttgcaggatactgaagcctcaacttttctttcctgcagaactgaagcatgagatccatgtctggcgtcttactgcacagcacatcagcccagccagcagggaggagacagcagttcgaggtatgctcctggggaaggtgctgacactggagcgcctgctggcccagaggctacacagcttccacaggtaccaagccagaccctgctaagaccacttttggtttacaactttggtcctcatctttaccaagtatgctcaatggttgaatcgtcgataacctttatatgaccaccctaagagtgttcaaatgtcaacagcaaaatgtgagctaaaatgattttgtagagtagtccatggttctgcaaaacagtaacactaactgcaggctactaggtaggttttgggcaccatacactgtgttaagcctgttatggtgcatgattttatttaaccctcacttagctctctggaatgtgtgctgatattagtcccagtttaaggatgaggaaactgagggtcagaaaatttgaacaacttgcccaggttatacatctagaaaagagtgatgcctgggattgagttcacatgcctgtcacatttcacacctaacacgttgcataacaagaacaaaaaaacaatttaacaaattaatctaatgaaatgttctcccagtagcttattttcagggggctcaaagaatacctaagtttaattcatttcttggagtttgttggtttgtttggccttgccaagtggcacgtggaatcttagttccccagccagggattgaacttttgcccctgaattggaagcatggagtcctaactactggaccacaagttaaatcccttgaatttatttttaatcagagctgagatctaatgggtaacaatgaggtgccgaatctttcctcctcacttggatgagatgctgagttccaaactgtctttattccggaagtactgccaggaagtgcaaaagcctgctcaaccttcagaaatgtagaagcagtcccgcagcaggatcaggtactgggtggagatgaggtctgtcacagcaaggggaactgtgagtccttgtgaagatagtgagaatgatcttacatgtggcaatttggtgagaccagccctgtgttcccagagagtaggcaagagtctgaggacaggagctggtacggtgccaggaccaaccttttaggcccatctagagtggttgcagctgattctcggttttggggtgagaattccacaggtgagtatgtggagattcactctgtccagaaatgaagcccagggagaagctctgtctcagcatccttagctctatctcagcccagaacctacctgtaccttgtggcactggagaaccagtacctggtatctccaggttacaggaaggccctgagttgctgactggggacagagtggccaacttcagcaacaggcctagatcttaaaaggtaaaactttgtgaattaaagatgcagcagtaagtttctctgaatgtattaaatttcctgaccttcaatttcttcatgctccttctgacatgggcattaagacatagtcagtgtatctcagggctaaaatgggaagagacatgtggactcagagattcaccaagcttgcatcaactcatcttattttgatctcagaaagggaaactgagacgcagagactgcagtggcctttctaaggccacacagtcactgagaagcaaatagtagtgagggtgatctaagtcatgtacttgctctacaggtcttatttctacattttatttttaaaaatttccttagaaccattcagttgggtcagctgtgatttcctctagggtttatatgggctgcatggtcaacctccattaatacgatgacacatgagagctcatgaagactaaattctcccccacaaatctttttcctcattgatgagagaggaaataaagcagaaagatgagttgataggaaaggttagaaaagaaaggcaagtgggaacaaatagaagtgactgaaatagaaatggagataaggtgggtaccatgactagaggggagtggaacagacacaagtgcttcagggtagatttccaattgatagaaatcaccactaaagcaagtggcacttcttttactgttttctcctttaattaaattataacacagcctcattttgaaaaaaaaatcagaaaattcagaagcaaaaagagatgacttactgtctcattccctgtcacttcagttgtgtccaactctgtgtgaccctatggactatatctgccacgctcctctgtccatggggattctccaagcaagaacactgaagtgtgttgccatgtccttctccaggggattgttcaaccagggatcgaacccaggtctcctgcattacaggtggattcttttccatctgagccattatggaaacctgcctatttacatttaggccattattctgatgtttcctgtgctgtactcatacatacctcattgaacagtctggtcattgcatgtgttactttccttgggaatcttttgagtgagcatctttcctagtccatgaacccagccttactgggtgccttatatgacaagagctgctccattctatggctgcacctggtatcatgcagtggacagcatccaggccaggggatcatgctgtgtgctactgctgactgccatcctgctggcctcactgctcaatgccagaaggaaaatgatgtctgcacttttctcttttagacagatctcacaggaagataaaaattgggagaccaatatccaggagctacaaagaaaggtattatggtttcttttcttagggatttcttgaagaacagagtaaattcctttccttttcttcatgtgaagttgcaacttaaagtcacctctcttttattcctgtaattgtacataagacatagctatttatttgagttaatgggaaagataattttccagacatggtaagcttattatattttatataataagctttttatatttcctttaagatagggcaacgctttctgtggttaatgtggatgtagggaaggatggctggctctcggctccacctgaccttgaaaggcaagtctgtgtttcccattgtgcaggttaagaggtggaagcctagacaagagaggcatggtgcttgagacagaacacttttgtgggtagaaatggagtgtatgtcttctgttgtacagctctgacttggggaggcaaatgttattttgagttcttttgtcatttttccttggtggaatttctcaacccacctgaggacacatagtgcccctcttccactaagagagctctgcccaagatctgctggaagtaatttgtaatatcttcatgaaatttcaaatccaggtggtttgtttcctagggagaggtaaaatatcctttccctagttatgataggaacatttggtcctttgctaaacaaaatttaaacgttgggacctgtagctaacatgttccttgagtctctcctcccatcatttgtcctactcagatggtcaggattagggaaggcaggtgtggctatgacacttttctggcctcaggtttaaacagaccctgtgtggttcttgccacaagttagggatgagactacttctgtgtgtacctggtgaacaaggactggagagctaccctcattatttctcaaacttttcattgtgatggccccaggtaatcaaatggtaaaatttgattgatatcccaaaataacaaagcacaaacttttgattatcttataccagctgaatgacactgacttccctgatcccttatttcctgtattgaagttggcatgggaatacccagtttctatggttagcttggcccagtgagatgccaggctcctgtcctcctgattctgcatcatagactcatttagcaaaattggcttccttggagggtgaatggaaagatgagttggggccagccaagctgcaattcttggcagtaggtggacaaggaagatagtggctcctaaggcaacccctaagcccatgaccagggggctagaatctgctgccaaagcacctgtgacagagggatatgcttatgattttttgtggtagcagctttaactgtgaccacaggaaatcaagagaggaaatctatctctgtctctgtctatacccatacttacactcaagtctgtgtctgtccatgtccatgtctatacccttgtctatactcatttctgtgtctatatctatctctatatctttttctatggccatatcttatgcatagctctgtctgtatctacctataccaagatctgtatcgataaccttatttatatttacacctagacttggatatcctaggcatagaccaacaacagaggtgctgctgggaccacactgaagaaaatacacaatgcagttgttggttcacacggtgaagtgtgattcacattgggacctggttagatgtgccttgtgtacaagcgtctgtgtctgcttgttgggaccttactccctgccccagttccacacagccatggctctcagagcacagagccctttgggaaccttgccctgtcttgccctgtggctcaggctcactggaaggaggtcttcaattccaaagctaatgaaggtgctacagtgcacttccccttacccccggaatcctggaagcaggatccatatgtgtcatttggtgactaggcgactgctaagtgcattcaacagtagtccagttattgaaagaatattttaacctcagtgccaggtgaatggggctttgcataataaacagaaaggtgaactaaaagactatgaacacataaaacctgtggacatgcatgtgtcttgaagggacaagtctttggaggttatgtgttggctccccaatggctttatctcatctaatgctggcagtgggactgggaacagcttagcatctctgtgtcatattgaaaaatctatttagtcatgtgtcatataaaagggttttactatattttaaatttattgtgttaattgttcatagattttgatttcaagattctgtaatgtggcagtcttgaatctgttacccatgaatttatcatctttcaagttcaagatgttttatatttcatcataaggagaaatttgtagtgattcaaatcacataggattgtggacacactgcagaaattaggttgcattgagtacatgagttgtgttttcctctcttacagcacaggatatcagataagactctgctcgccaaatgcctgacagtgttggtatttgttatcttcatgttttttctcaattcatttgtccctggtgttcatcttgatcttggtgagtctaattttttgcttagcttttgttgatgggtttttcaagtgatatcacaatctggaaggtttcaaagcttgtttgcagacattggtgagggctgagagggatagttttctggaggagaggaagaggaggaggaaagtagagagagacatcttagtgccatgggtcctcagctcctctaggttgaacattagaagggatagagagcaaggtggatagcatcatctctatcataattaataattggatctgatcttcaaattgttacctcagaagcacctccagaaaagataagaggttatttcagcaaggccacagtcctgcagattgtacaacccaatctgatgattaaattagagactgttagtgaaagggctagagaattataagaagtctacattggtccctctccttactcgaaggtgcatccatttctcctgtgcatcagaactttgatctcccacctgctcctgtgagtttctcttctcttgctttcacaatcctatggctctcactttgtactttcttaaggtctaggttgcatggcccatctccacctgacacatggccatcttgcagaatgaactcaccagatatcttgtttaccctagcattcttccactgtccattaacgtttttcatgcttcttagatctttctaattgatttgatagttatctctattgcctattgtatctttatttaaaacaaaataaaaccatttccaaaactcccctcaaataaaatttttacctatgggtttccttcaaaaattagctcttctaaaatgtttttataaagtttaattactacaacatttgaagaatataacttctgtagaaagcaagaactcttaactgtgtaaaatagatgaatatcatgggaagactagttattcaaaccacagcattgctcctttggttcttggctaccactaagactctttatatctctaaagattaaacaaatactacaaaactggtagtttgtgggcaggattccattagctaattcttcaggtgttcacagattattttgtctcttttccttttttcttcatgttcgcaaaatttactaagcttgaaggaaagttattgtctcagctacagaagctgtcaaatttaaacaggttgtaaaactctatttaaactttactgtcataccttcaattgttttcttacaatttttaattaaagtatagttgaattacaatgtaatattactgctgtagagcaaagtgactcaattttacatatatatatatatatatatatatatatatatatatagttttttcattttattttccattatagtttttcacaggatattgaatatcattgcctgggcaatacagtaggatattgttttgtttctaattttgtttgagatcctattttaaaagaacacatcatgcattttaaagacattgcagcactgtttataatagccaggacatggaaacaacctagatgtccatcagcagatgaatggataagaaagctgtggtacatatacacaatggagtattacacagccattaaaaagaatacatttgaatcagttctaatgaaatggatgaaactggagccgattatacagagtgaagtaagccagaaagaaaaacactaatacagtatactgacacatatatatggaatttaggaagatggtaatgatgaccttgtatgcgagacagcaaaagagacacagatatatagaacggacttttggactctgagggagagggagagggtgggatgatttgggagaatggcattgaaacatgtatactatcatgtaagaaagaattgccaggctatgttcgatacaggatacaggatgcttggggctggtgcacggggatgatccagagagatgatatggggtgggaggtgggagggggattcaggattgggagctcatatacaatcgtggtggattcatgtcaatgtatggcaaagccaatacagtactgtaaagtaaaataaagtaaaaataaaattaaaaaatattttaaacataaaaaaactgaaaaaaataaaaaataaagactgaaaaaatatattgaatttgcatgtatttttgttaaatttgacagtggtataaataacaatactttaaaaacttagtcacatcttttaccatatttatgagattgaagggtttgtttctgcttttaaatcttatgtttttggattgtggataaattattttatctggggattctagaatacataatctgtatatttgcaaaatacataatctgtatatttgcatgttcgctgaaacaggaaagaggttgacccggagaaaagtttgattagcaaatatttaaaatggaatacagttttcttagagttttagtaactctcttggtgggaacagagacaaaattaatacagaatcttcccagggcttcagtggacagatcatttgtccttggtgaagtgctgtattgaacatgacatgctgggtaagttgaagcataatacaaggtaatgccatgtaacatgaggtactatcacattacacaatgtatatcatataacatgtgacatcatataacacaatgtgatggcacatgacaaggtggtatcacataaggtgtacctttaacacagtgtgatatcacataatacaatgtggtgtcatataacactgtgtcatgtcatgtaataaagcatgacatcatataacacattcctttatttaaacatcataacctaaactcaacagtgattatcattctctttttctcgctaattctattttttaaattatcatagagaaaaattgatttttcttttcaaattcaaaattctatgaactttaacaaagatgtatatttatgtaactgccactataatcagaatacagaatagttctatcaccctccaaaatttctttgtattattcttttgtatcaccctttgccttaatcctggtgattcatcatatgttctccatcaccatatttttgtcttttgttgaatgtcatacacatggactcagacaacctttgggactgacttttctctttcatattcatccatgttattgtgggtatcaatagttcattctttttgtttgtgagtattcttccatggtatggagataccagtttgtttatctactggcccattgaaggacatttgggttgtttctagtttttggtaattgtgagtaaagctacttcaaacatacatgtacatggttttgtgtaaacttaagttttcatttctcttgggtaattacttaagagtgggacttctggatcatattgtgagtgtgtgtttagtcttaaaagcaactgctgcaccaatttccagagtgactgtagtactttgcactttcacagtagtgtatgggaattacagcagctctatatcttcattagcactcggaggaggtgatgtagactacatcttttttttttttttttggagcaaatatattttattggagaggtataatgagttttctgatcctttcaaattagaaataacaagttgtaggagatatttacaaaaaattattgtgttttatttatttatttatttttatagttttttttttaaattttatttttactttattttactttacaatactgtattggttttgccatacattgacatgaatccaccacgagtgtatacaagctcccaatcctgaatccccctcccacctcccacactgtggtggattcatgttgatgtatggcaaaaccaatacaatattgtaaagtaattagcatccaattaaaataaataaatttaaattaaaaaaatagactatatcttaaatctagaactcatgtgttattataatctttgtttacctccctgtcccctggtatcccctaccctagctagattcaagggtatggtccatgccatctaagcttttctctactcagtgccttgtgttaatgcctggcacaatagtagatataagttaatatgatgtatgtacaaacttcttattcttatagattccaatttcattattgtgagaatttcatgtgtggttgactcatccttggctatctagggagcaaaagcctcttgtggggattcttcattggggaaatgataccagggaagagaagtaaggggcagagaagaagagtagtgaaaggagtgagtcaaaacaaggctgaatcattatctgaccacattatgggtccataggattatctgagaagaaatatgagatgtgtctcaggactgtccatgggattgtagcattacccattggtgcccatcatccattagtccaagttctttcctatggaacaccaacttacatgtacatgtagctaataaattcatgaaggacatgcaacagaggagcccctgctgggaagcaggtgttggtacatggattcaggggcagacttggtcagggtacagctaagtatgagaggatatttactctctggccactgccacagatttccagtgagtgacaggagaaccccaaaggtatgcaagaagtggacaataatgaagaaagaaaagctcatggtcacaattcatatgtacctggcaaacaaatagttccctaatatacaagtattttttatctgttaagacacactggaattaattccagattggtcaagcagttatgcagagatacattggcattaactccagattactcaagcagttatgcagagactccacatgaagttcttgggtgccagatatgtttcaaaattctgattttttgtttatattttacaaagccatgagcacacactgaattgtatatattaataacacccctgaggggttcagggctggcaccctgtccttcaagggttaataattctgtagtgaaacttgaatattttctacaaatgggataaattatgaccacaaatagcctcatttcagttcaaatcagattttgttgtatgttgacataaaatgtaaaaaatttgctttcccaaactttaggattctaaaatctaaattctaaaattgtggatcagttcagttcagttcagttgctcagtggtgtcagactctttgcgaccccatgaattgcagcacgccaggcctccctgtccataaccaactcctggagttcactcagactcacatgcttcaagtcagtcagtgatgccatccagccatctcatcctctgtcgtccccttctcctcttgcccccaatccctcccagcatcagagtctttttccaatgagtcaactcttctcatgaggtggccgaagtattggagtttcagctttagcatcattccttccaaagaacacccaggactgatctttagaatggactggttggatctccttgcagtccaagggactctcaagagtcttctccaataacacaattcagaagcatcaattcttcggcgctcagctttcttcacagtccagttctcacatccacacatgaccactggaaaaaccttgactggaaagccttgactagacggacctttgttggcaaagtaatgtctctgcttttcaatatgcctctgcttttcaattttcaacactttattctcttgactagacggacctttgttggcacagtaatgtctctgcttttcaatatgcctctgcttttcaattttcaacactttattctcttctaattttcttgtctttttttttttttttttgctcttggcagaatggagatgatctcattagtttcccaaattataggatctcaatttcaaccacgtagagcaaaaagtctattttgaatccaaaattccctggtgaagactttgtttgacccaggttggattaatttccttccctaatccagaaattatcaccaggataaccagggggcacatagaaattatggccaatcaatttaaaaggaaagtacaattgaatattaaaaaatttataaattaagtgaaagaaaatggataggaatcatcaatagactcttcaaaaaagagaatattaaaataactgagattaccaataagcatatgaaaaagtgcttaaccttattagtcatcagtaaaatgtgaatctaaaccacataaagatatggatatatctacatctaaatggctaaaatcaaagtctgacagtaccaaatattagataacgtagagccacaggaagtgtcataagctgttaataaaacagtaaatttgtacaaacttttgaaaacaatttgtcagcgtctataatactaaagtttagtaaagcccagaaagtttgttcttagttatatgcccaacaaaaatatgtatgtatgaacaacaaaagacatgtattaaaatgctcataacagcattatttatattaataatatacccaagctggaagtcattcacatatctatcaactctagacctgataaagaaattgtggaataatcatacaatggaatactccacagaataaaaacaaatgtattactgaaactgtaacaatgtgactgaatctcacaaacatgttgaacaaaagagaagtctgatagaaattcatatgtagcatgtgattccatgtatgaagactcagaaacaggcaaatgtacttcttggggtgttaggaatgatgcattgaagggagagtataaggaatggaaggagatctaattgggcttttggtatattgatagtgtcctctttcttgtcctgatgggaggaggttacattgttgagtttcctctgtaactgagctatgtggtttatttaaaattgatgcacctttatgtatgcatgctatagttcaactaaaatgtttataacataatttaatgaatatattcactgtatccttcagatggcatagtcaaacttggtggtggtggtttagtcactgagtgtgtctgactcttgaaaccccctggaccgtagcccaccaggctcctctgtccatggaatttcccaggcaagaatactggagtgggttactatttccttctgagtgaactcactattgggcaagatggaggaatctgtgaggggtacagtggtatccaggccagtgtttttgtgtatatgggtgtatgtgtgtgtgtgtgagagagagcatctttctaggaactagaaggatgcaatgacaaagccaccttgacaagagctgtgttgaccttcagtgagaggactctgtagggaatagtccaaaataatgaatgctgtgaatcctcatgcccagattccatctcctgctgtgcctctccttagcagaacatacctggaaacctgggtatgacaacctcttgatgtaatccctgcagaaagggagcaagagaggatggaggggaatgaagaggggcaggcaactcagcagggtcctgtccacttacattttcccatcagtattgattgaaagcttagttgcagcaaaatgattagaaatagaatcacttacttttaaattgcctttatttttttcaatctcaattatttaaaaactgctgacactacaatcatggtgtttcctaagcctgattgggagccacacagaagtttccaggtgttgtaatggagccacaagcttcacgctgagctttgacatcaaagctgctgctgaatgtttgtggccacatccctagatcgagtagggagagggcagaactaaggccaggttaccctggctcaaagcatagctctagtacttatggtttttcttttcattattattattttaaaattttatttgcaggtgtttgaggcccttgggcacctgcagggtgcctcagtgctctctgtaaggatgctgtgaggactgaatcacctcatgcaggcagaagtcttagaaacagtgcacctggtgctggattaagtgtgatgtgaatgaacagtttatgctgattgctaagtaactcaggaaaatacaagatgatgaaaaatggccttgcttttgctggattttaaagggaaactagacagaataggactgttctcatgagagggcacctttcagactatatgtacaggtaatgacatgcttcctccttttggtctcaggccctttgtgtgttagtagaacttaactccttggtgactctcctcattgtcaccttcgaatctaactcatcccatgctacctgtactacttgcctaaccaactatgtactgggagctccctaagagcaggcttaagcttataccctggaagtttaatgcttgagtgaatgacaggtttagtggtagatttaaaactaccccctggacactcatagtgtttcttttcaactgaaattccttaattatatgtgataaatcttatgttgtctattttaggtagtcaatggccaacacaatttagtgatacatcaccaaaggaggcagacagggtggtttgtactctatacagtatgtacagtccattcacgagtttctctggtttgaaggatgaacatgaggtatgtaactgttgagatattctctagagatgcatcctgagtggcttaagactataggttatctcatcataacttgaggtagtggattcatcagaacagtattgtttataaccaaaggcacttgaaaaatgttcagagccagactagctacagtatgttttttttttttttttaaataagactacaaggtttcagatagaacatagtcaaatagtatctctgagcacatgagacaagatcacctttggggaagaggtttcaccagtgattttaagtagtgaaaacatctaattttggttacaaaagcaaacctcaatatatgttatatgttagaaaggaaaaaaaaactgagtgcatgagaagagtgtaccttggtgcaagggaaagacattctcacagattggctgaattttgattttgcccccaacaagctatgtggcctgaagaaaacgtgttaattattgggagcttcagggtttcctcatgagcagggctgctacaaggtgaccagaatgtctgtgccaaggaggctgcttagtgaatggtagaagtcttgttctgctctactctgaatcgtattgcccaggtctttaggaacagggataaagtcacctacttagctccttgttttgcactgaagcttgactctataggaaatttgagtgagaaagtacagaaccacttagcatagattctgctttaaggaatggcagagctcttgatgaaagattaatgcccaaggagggggttgatagaaaagcaacaggataaagatagcccaggtaaatgttactttttatctttagccatttctacccaaccaaacttttaattttaggtgtctcaatggtacattgttagaatttgtagtagaatgtgaagctgaaaattgtattgttcttattagcagtcttatcttccaacatgctataaaagggataccactgactacctatcattgaggagctatctctgagtgagaacagaatgaaatgttactgacagtggcctggggggacacattagaaagtgctgcttggattcctcagtgaaggcactaattgccaatcagatgtacttatgcacaggcagtttgaaaggtaggtgctctagagaatttagagcaactttgttaggtagacaaagttgcatacatggaaaaatcgggcattccagctactttgcttagaaaacttcagtgatttctttctgtagaataaggtcctacctcctttggaaaataatagtgcccttcccaatcaggaaatctttcttttattatggtacaaaatacacatcacaaagtttgtcatttgatctatttgttttaaattttatttaaaaaattttttatttttacttaattttactttacaatactgtattggttttgccatacattgacatgaatccgccacgggtgtacatgagttcccaaacatgaacccccctcccacctcccaccccatatcatctctctggatcatccccgtgcaccagccccaagcatcctgtatcctgtatcgaacatagcctggctattcgtttcttacatgatagtatacatgtatcaatgccattctcccaaatcatctcaccctctccctctccctcagagtccaaaagtccgttctatatatctgtgtctcttttgctgtctcgcatacagggtcatcattaccatctttttaaattccatatatatgtgtcagtatactgtattagtgtttttctttctggcttacttcactctgtataatcggctctagtttcatccatttcattagaactgattcaaatgtattctttttaatggctgagtaatactccattgtgtatatgtaccatggctttcttatccattcatctgctgatggacatctaggttgtttccatgtcctggctattataaatagtgctgtgaaaaacattggggtacatgtgtctcttccagttctggtttccttagtgtgtatgcccagcagtggaattgctgggtcataaggcagttctatttgcaatttttaaaggaatctccacactgttctccatagaggctgtactagtttgcattcccaccaacagtgtaagagggttcccttttctccacaccctctccagcatttattgcttgtagacttttggattgcagccattctgactggtgtgaagtggtacctcactgtggtcttgatttgcatttctctaataatgagtgatgttgagcatcttttcatgtgtttgttagccatctctatgtcttctttggagaaatgtctatttagttttttgtcctattttttgattgggtcatttatttttctggaattgagctgcaggagttgcttgtacatttttgagattagttgtttgtcagttgcttcatttgctattattttctcccattcggaaggctgtcttttcaccttgcttatattttcctttgttgtgcagaagcttttaattttaattagatctcatttgtttatttttgcttttatttccaatattctgggaggtgggtcatagaggatcctgctgtgatttatgtcggagagtgttttgcctatgttttcctctagttggtcttacatttagatctttaatccattttgagtttatctttgtgtgtggtgttagaaagtgttctagtttcattcttttacaagtggttgaccagttttcccagcaccacttgttaaagagattgtctttactccattgtatattcttgcctcctttgtcaaagataaggtgtccataggtgtgtggattcatctctgggctttctgttttgttccattgatctatatttctgtctttgtgccagtaccatactgtcttgatgactgtggctttgtagtagagcctgaagtcaggcaagttgattcttccagttccattcttctttctcaagattgctttggctattcgaggtattttgtatttccatacaaatcttgaaattatttgttctagttctgtgaaaaataccgctggtagcttgatagggattgtattgaatctgtagattgctttgggtagtatactcattttaactatgttgattcttccaatccttgaacatggtatatttctccatctattagtgtcctctttgatttctttcatcagtgttttatagttttctatatataggtctttagtttctttaggtagatatattcctaagtattttattctttttgttgcaatggtgaatggaattgtttccttaatttctttttctactttctctttattagtgtataggaatgcaaggtatttctgtgtgttgattttatatcctgcaactttactatattcattaattacctctagtaattttctggtagagtctttagggttttctatgtagaggatcatgtcatctgcaaacagtgagcattttacttcttcttttccaatttggattccttttatttctttttctgctctgattgctgtggccaaaacttccagaactatgttgaatagtagcggtgaatgtgggcacccttgtcttgttcctgactttggggaaatgctttcgatttttcaccattgaggataatgtttgctgtgggtttgtcatatatagcttttattatgttgaggtatgttccttctattcctgctttctggagagtttttatcataaatggatgttgaattttgtcaaaggccttctctgcatctattgagataatcatatggcttttatttttcaatttgttaatgtggtgaattacattgattgatttgtggatattgaattatccttgcatccctgggataaagcccacttggtcatggtgtatgatctttttaatgtgttgttggattctgattgctagaattttgttgaggattttttcatctatgttcatcagtgatattgacctgtagttttctttttttgtggcacctttgtcaggttttggtattagggtgatggtggcctcatagaaacaaatgaaaatgaaaacacaacaactcaaaacctgtggcacactataaaagcagtgctaagaggaaagttcatagcaatacaggcatacctcaagaaacaagaaaaaagtcaaataaataacctaactctacacctaaagcaactagaaaaggaagaaatggagaaccccagagttagcagaaggaaagaaatcttaaaaaattagggcagaaataaatgcaaaagaaacaaaagagaccatagcaaaaataaacaaagccaaaagcttttctttgaaaggataaataaaattgacagaccattagccagactcatcaagaaccaaagaaagaaaaattgaatcaataaaattagaaatgaaaatggagagatcacaacagacaacacagaaatacaatggatcataagagactactatcagcaattatatgccaataaaatggacaacgtggaagaaatggacaaattcttcaaaaagtacaactttccaaaactgaaccaggaagaaatagaaaatcttaacagacccatcactagcacggaaattgaaactataatcagaaatcttcgagcaaacaaaagcccaagtccagatggcttcacagctgaattctaccaaatatttcaagaagagcaaacacctatcctactcaaactcttccatatgacctattttaagagtacagttcagaagtgctaattacattcacaatgttatttaaccattgctgttcagttcagtacagtcactcagtcgtgtccgactctttgtgaccccatgaattagagcacgccaggcgtccctgtccatcaccatctccctgagttcactcagagttgcgtccatcgagtcaatgatgccatccagccatctcatcctgggtcgtccccttctcctcctgcccccaatccctcccagcatcagagtcttttccaatgagtcaactctttgcatgagttggccaaagtactggagtttcagctttagcatcattccttccaaagaaatcccagggttgacctccttcagaatggactggttggatctccttgcagtgcaagggactctcaagagtcttctccaacaccacagttcaaaagcatcaattctttggtgctcatccttcttcacagtccaagtctcacatccatatatgactactggagaaaccatagccttgactagacagaccttagtcggcaaagtaatgtctctgcttttgaatatgctatctaggttggtcataacttttcttccaaagagtaagtgtctttgaatttcatggccgcagtcaccatctgcagtgattttggagccccccaaaataaattctgacactgtttccactgtttccccatctatttccaatggagtgatgggaccagatgccatgatctttgtttcttgaatgttgagctctaagccaactttttcactctcctctttcactttcatcaagaagctttttagttcctcttctctttctgccataaaggtggtgtcatctgcatatctgaggttactgatatttctcccggcaatcttgattccagcttgtgtttcttccagtccagtgtttctcatgatgtactctgcatataagttaaataagcagggtgacaatatacagccttgacgtactccttttcctatttggaaccagtctgttcttccatgtccagttctaactgttgcttcctggcctgcatacagatttctcaagaggcaggtcaggtgggctccaattttgccacctcctctctgatacttgctatttctacttttctgattatatctatcctagtaggtataaaatggtatctcactgtggcttagatttgcattttcctattcccatctctttcaggattttccacagtttaatgtgatccacacagtcaaaggctttggcatagtcaataaagcagaaaaagatgtttttctggaactctctttctttttccatgatccagtggatgttggcaatttgatctctggttcttctgcctttttgaaaaccagcttgaacatcaggaatttcatggttcacgtattgctgaagcctggcttggagaattttgaacattactttactagcgtgtgagatgagtgcaattgttcggtagtttgagcattctttggcatttcctttctttgggattggaatgaaaactgaccttttccagtcctgtggctaccacagtttatttaaaaattttttcatcacctcagatagaaactttgtaaccattaagcagtaattcctcattctcttcccctcagccctcagctcttggtaccctctaatctgcctcttgtctctatgaatttgtgcattctacatatttcatataagtggaatcataaaataattgttctttttgtctgatttatgtcagttagaatagtgttttcatggttcactgacactatcgcatgtatccaaacttcattctttttatggataaataatattctgttgtatgtatataccatattttgtttatatgtatatctgtcgatggacatttgggtttttccagattttgactgctgtgaagtccccaatttaatttccttttgagtatatgcctgagaatagaattgctgggtcatatgtttagctttttgacaatctggaaaactattttccacagcaatttcactgttttacattccaactagaaaaatataagggctccaatttttccacctcctctctgatacttgctatttctactttctctgattataactatcctagtaggtgtaaaatggtgtctcactgtggcttagatttgcattttcctaaagcctttgactgtgtggatcacaatatactgtggaaaattctgaaagagatgggaataccagaccacatgacctgcctcttgagaaacctttatgcaggccagaaagcaacagttagaactggacatggaacaaaagactggttccaaataggaaaaggagtacgtcaaggctgtatattgtcaccctgcttatttaacttctatgcagagtacatcatgagaaacgctgggctggaagaaacacaagctggaatcaagattgccaggagaaatatcaataacctcagatatgcagatgacaccacctttatggcagaaagtgaagaggaactcaaaagcctcttgatgaaagtgaaagaggagaatgaaaaagttggcttaaaactcaacattcagaaaatgaagatcatggcatctggtcccatcacttcatgggaaatagatggggaaacagtggaaacagtgtcagaatttatttttttgggctccaaaatcactgcagatggtgactgcagccatgaaattaaaagatgcttactccttggaaggaaagttatgaccaacctagataacatattcaaaagcagagacagagacattactttgccaacaaaggtccgtctagtcaatgctatggtttttccagtagtcatatatggatgtgagagttggactgtgaagaaagctgagctctgaagaattgatgcttttgaactgtggtgttggagaagactcttgagtgtcccttgggctgcaaggagatccaaccagtgcattctaaaggagatcagccctgggatttctttggaaggaatgatgctaaagctgaagctccagtactttggccacctcatgcgaagagttgactcattggaaaagactctgatgctgggagggattgggggcaggaggagaatgggacaacagaggatgagatgacatgatggcatcaccgactctatggatgtgagtttgagtgaaccccggaagttggtgatggactgggaggcctggcttactacaattcatggggtcacaaagagttggacacgactgagcttctgaactgaattgaactgattaactaatgatgatgagaattaaagtaatggctactcaagaccattgcccatttttattgataaattgtgttgtctttttgttattgagttttatgtatttttatattctccttattaaaccattatcagttatatgatttgcaaatattgtctactattctataggttgtcttttcactttatgaaagtcttgtttttcaatttatttttttattgaaggataattgctttacagaattttgttcttttctgtaaaagctcaacacgaatcagccataagtatacatatatcccctcccttttgaacctccttcccatccccctccccatcccgcccctccaggttgatacagaaccctgtttgagtttcctgagccataccacaaattcccattggctatctaattccatatgttaatataagtttccatgttactctttccatacatcttactctctcctcccctctccccatgtccataattctgttctctatgtctgtttctccattgtttccctttaaatcaattcttcagtaacagttttctagattctgtgtatgtgttttagaatattatatttatttttctctttctgactcacttcactctgtataataggttctagtttccttttaatggctgagtaatattccattgtgtatatgtaccacaatttctttatccatcctctgttgatggacatctaggttgcttccatgttctagctattgttaatggtgcaatgagaagtgggatacatgtgtctttttcaattttggtttcctcaggttatatgcctaggagtgagattgctgggtcatatggtttttctagtcctagtttttaaaggaatcaccatacagttgtccttagtggctgtatcaatttacattcccatgaaaagtgcaagagtgttctcttttatccacaccctcttcagcattcattgtttgtagacttttgatgagggccattctgactggtgtgaggtgatatctcattgtggttttgatttgcattcctctaataatgagcaatgttgagcatcttttcatgtgttagccatctgtaagccttcttcggagaaatatctgtttaggtctttctcccactttttgattggattgtttgtttttctggtattgagctgtatgggctgcttgtatattttggaaattaatcctttgtcagttgtttcatttgctattaatctctcccattctgagggttgtcttttcaccttgcttgtagtttcctttgctgtgcaaaagtttttaaatttaatcaggtcccacttgtttgtttttgtttttatttccattactctaggaggtgggtcatagagggtcattgctttgatttatgtaatcaggtgttctgcctatgttttcctctaagagttttatagtttctggtcttacatataggtctttaatctattttgagtttatctttgtgtatggttctaatttcactcttgtatacatagctgtccagttttctcaggatcatttattgaagaggctgtctttgccccattatatattctttcctccttcgtcaaaagtaaagtacccataggtgcatgggtttatttctgggttttctatattgttccattggtctatatttctatttttgtgccagtaccatactttctagatggttgtagctttgtagtataatctgaagccatgaaggttgattcctccttctccattcttctttctcaagactgctttggctattcagggtcttttctgtttctgtatgaattgtgaaattttttgttctagttctgtgaaaaatgccttgggtaatttgatagggattgcattgagtctgtagattgcatttggtagtatagtcagtttctcaacattgattcttctactcaggaacatggaatatctctccatctgtttatgtcatctttgatttctttcatcagtgtcttataatcttctgtgtagaattattttgtctccttaggtaagtttattcctagatatttaattctttttgttgcaatggtgaatgggattgattccttaatttctctttctgatttttcattgttagtatatagaaatgtaagtgatttgtgtgtattgattttctatcctgtaactttgctaaattcactgattagctctagtaattttctgatactatctttaggattttctatgtacaatatcatatcaactgcaaacactgagacctttacttcttttctgatctggattccttttatttctttttcttttctaagtgctctagctaggactatgttgaataatagtgataaaagtggacaaccttgtcttgttcctgatcttagggggaatgctttcagtttttcaccattgagaataatgttttctgtaggcttatcatatgtggcatttactatgttaaggtaggttcgttccttctatgcccatgttttgaagagttttaatcataaatgggtgctgaaattgtcaaaggcctttactatatctgttgagatgatcatatgttttttgtctttcaatttgttaatatggtgtaccacattgattgatttgtgtatattgaagaatacttgaattcttggaataaacacaacttgatcatggggtatgagattttttgatgtgttgcagagttctgtttggtaaaattttgttgaggatttttgcatctatgttcatcagtgatattggcctgtagttttcttttttgtgttgtctttgtctggtgttggtatcagggtgatggtcgccttatagaatgagtttggaagtattacttcctctgcaattttttgagttttagaaggacttctttaaatgtttgatagaattctcttgtgaagccatctggtcctgggtttttggtttttgtgagatttttgatcacagcttcaatttcagagcttgtaattgggttgttcataatttctatttctttctggttcagtcttggaaaattgaacttttctaagaatctgtccatttcttcctggttatccattttattgccacatagtttttcataatagtctcttataattctttgtatttctgcattgtctgtcataacctctcgtttttcatttttaattttgttgatttgattcttctctctttttttcttgatgaatctggctaaaggtttctcagggtttttttttttaatcttctcaaagaaccagcttttagttttattaatctttaatattgtttctttcatttctttttcatttatttctgctcagatctttatgatttccttccttctacttattttgagttttttttttttgttgttgttcttttcccagttgttttaggtgtaaagttaggttgtctatttgatgtttttcttgtttcttgaggtaggattgtattgctataaacttcccccttggaactgcttttgctgcatcacataggtattgacttgttgtgttttcattgttgtttgtttctagcaattttttgatttccctttttcttcagtaaactgttggttatttagattgtttaatctccatgtatttgcatttcttacagttttttttttcttgtaattgacatctaatctcatagtgttgtggtcggagaagatgactgatatgatctcaattttcttaaatttactgaggtttgatttgtgacccaagatgtggtctatcctggagaatgttccatgtgcacttgagaaggtgtattcttctgtatttggatggaatgtcctgaagatatcaatgagatccatcttatctaatgtttcatttaagacttgtgtttccttattaattttctgttttgatgatctgtccattagtgtgagtggggtgttaaaatctcctactattattgtgttactgtcaatttttcctttaatgtcttttagtgtttgtcttatgtattgaggtgctcctatgttgggtgcatatatatttacaattgttatgtcttcctcttggattgatcccttgatcattatatagtgtccttccttatatcttgtaatattcttattttaaggtctattttctctgatatgaggattgctactccagttttcttttgcttcccatttgcatggaatatatttttccagcctctcacattcagtctatatgtgtctttagatctgcagtgggtttcttgtagacagcatatatatggatcttggttttgtatccattcagccagtctgtgtcctttggttggcacgtttaatacatttacatttaaagtaatcattaatatatatgttcctattgccattttcttaattgttttgggttgattttgtagatctttttcttctcttgtatttcttgactatataagtccttttatcatttgttttaaagctggtttggtggtactgaattctcttaacttttgcttatctgaaaagctttttatttctccaacaattttgaatgagatccttgctggatacagtaatcttagttgtagattttcccctttcagtactttaaatataccctgccattcccttctggcctgcagagtttctgctgaaaaatcagtcgttaagcatatggggtttcccttgtatggtacttgttgcttctcccttgctgcttttaatattctttctttgtgtttagtgtttgttagtttggctggtatgtgtcttggcctgtttctccttgggtttatcctgtatgggactctttgtgcctcttggacttgattttctatttcctttttcatgttggagaatttttcaactataatctcttcaaacattttcccataccctttattttctctctttcttcggggacccctataatttgaatgttggtgcatttgatattgtccctgaggtctctgagactatcctcagttcttctcattctctttacggtattctaatcttcagaagttatttccaccattttatcttccagctcactgattcattcagatattctgctattgattccttctgagtatttttaattccaataattgtgttgtttgtctctgtatgtttattctttaattcttctaggtctttgttaattgattcttacattttcaccgttttgttttcaatgtttttgatcatatttactatcattattctgaattctttttcagaaagtttgcctatttcctcttcatttatttgggcttctgtgtttctagtttgttccttcatttgtttagtatttctctgccttttgattattttttttaaacttattttgtttgagagctccttttctcaggcttcaagtttgaattctttcttccttttggattctgccctcctatggttggtctattggtttgtgtaaggttcctgtagggtgagacttgtgcgagtttttgcttgtttttcctctgatgagcagggctgagtgagggggtaatcctgcctgctgatgattaggtttgtatttttgtttgtttgttgtttagatgaggcatcctgcacagggtgctatggtggttgggtggtaccaggttgtcttttattcggtggtttcctttgtgtgagtactcactgtttgctactgcctagggctagttttccagtagtccagggtcttgcagtcagtattcccactccaaagtctcaggggttgatctctggtcaggaaggaagattcaagtggtttcttatggcattaagtgagattaaaacaaatatccaaaaatgagaatgcaaagaagaaccctagacaagtgtcagttacaaaatcaggcaaataataattaaaataatggaatatgcacatatacatatacacccatgagcaaattcaaaacagtccaaccaaaataaagtacaataggttacctggtgaagaaaggaaatcaaaaattgcattttcttgttaagaacaaaactaagtaaagcacaaggtagaaaacaaaactaaagcaaggtaccgagtggggaataaaacaatgaaaacaagactaacaaatatgttgagaagaaaagaaagaaagtaagggaagaaagaatagatatgcaaagttaaatagaggtagatgaaaaagatttatatacattaaagattaactgcaagggggaataacattaggaaaggataacaaaggaataaatatagaaaaaacaataggtttaaaaaaaattaaaattataataaaagagcaaagaaaaaaatggaagaagaagaaaaaaaaaaccctccacagaactgcaaaagcctaacatagatgcagaggcttataacaacaataaaaagtatgactgaatatacacatatacatatacacccataagcaaaatcaaaacagcccaacaaaaataaagtaaaatagattgacctggtgaacagaggaaaccaaaaattatgtctaccagaacaaaattaactaaagcactaactggaaaacaaaatgaaagcaagatgccaatttgggaataaagcaatgaaaataaaactgacaaatatgttgagaggaaaggaaagaaggaaaagaatgaaagaataagtatgcaaagttaaatagaggtagataaaaaagatttatatacattaaagattaatcacaaggtgaaaagaacagtaggaaaaacaaacaaaggaatagatgtagaaaaataataataggtttaaaaaattaaaaaaagagaaaaaagaaaaaaggaaaactctccagaatggcaaaagcttagtgtagaggcagaggtttataacaacaataaaaaatgtgactgacaaagataaaaaaaagctcaaaagcttaattagatttcatagtgccaataaaagcaacaactacaatggtgggggggggcagtgtggggggtgcagggagagaaagagatacaaaagaatctacagaacaagtcaaaaaataagaataataaatgtttttcttgagtcactgctgtcagagtactttcccttgctggaggtcacagtccaccacacctccctaggatactctccaacacagaagtgcatgcagaacaccagctgagatctctggacctgttgtgtgggtagctcagattctaatatggtcctactcctctgtaatcttgcttcaaatgtccatagctatcagaactagtgcattttcttttgtgggagctctcagtgaccttttatagacacagtctgcttagttgatcatgtggatttaatctgcagcttgtacagctggtgggaagttttgggtcttcttccttagtcacactgtccctgggtttcaattgtggttttatttccacctctacatgtaggtcatctactggggtttgctcctgaggctgccctggaggacttggtttgcccctgtgagggtcaggtgtggaggtggtgcagctgcttgggttgcagggattctggcacatcaggtactcaggggagttggtggcttgggcagcaggaaatatagtgctctagaagggtatggcaaccagtattggcaaatacaccccagtattcttgcttggagaacccccttccctgacagagaagcctggcaggccacagtctacagggttgcaaagagtcggacactactgaagcaattctgtgtgcaaaaaggcaagactttttttgcttgtggtagctctgccccagtgagagttgagcatgaaggtggcacagctgcttggcttgcagggactctggcggtgccaagtgtgcagggacatggactgcctccgatgcaagagttatggccctatcagagtcttttttcaagcctcctgtagctggcaatcagaaggcctctttagccagtttgtctccatagttcctcaggttcaggcacttagagggctcccttgcttgaggtccttctctgttgtttggtgtgtcaggcacatagaggggcccccctggcttgggtcctactctgtagatcggtggccttaggcacttaaaggggcacccttgttggggttctactctgtagttcagtgcatcagtcacttaaaggagcaccatgggtggggtcctactctgcagttcagtgcatcaggcatttgatggtccagcttctctattagtcagctgccaatgctggagtgtagggggagagaggctatagtgatggcttcacgctgtatgcatgactcagtagtattgctttgcttccatggctgcctggctttcctccacaggcatttcccacagcagtctcctccctcacatcccctggatctgtctcttgcagtcaacagcagccctcaccctgagattgttccacaaaccctacgctccagctccaagctgctgccccttccaggggacccgtgtccctgtctggggtatgtatgtctgtgacagggactgttttattctcattccatttaggctgccacagatcagctgtttccctctcagccttaaatgttcttcctctgactcagaaaattgccctgatgtggggatagaactcctgcttcagttcccccacccaccaagggcaggtccagtcctactaacactcctgttttctgccctagttccttcatcctaccgagttttgcatggttctatatattcttttccactggtcaggtactcctgtccactctcagctggtgttctgtatgcacttctgtgtctgaaggtgtattcctgatgtatccatggagagagatgtactccacattcagctactcctccaccatcttgttctctctgataatgtcttttgatgcacaaaaggttttaattttgatgaagtccaatttgttttttcctatgttgtttgttgccggggtccagccccggtggatccagggtaattcgaaggggagacggagtaggcatcctaggaaaaaacttatttaattacagatatatagagagattagaaatggatagtgtagtaggaaatattagtggagaaaaagattctgaataacttggtttacatggaataccaataaaactccaagacaaggagtttgccaagtatccgtgctccagatgggaattcagccagaaggggaaagaaagaacgacacgggggaatcagtctttccagaaactgatccaatttctttatttttcatgtttgcttatatactttttgttatacatagggatgaatacagagtcacgcgggggtcagcagacctgacccttgtcaaaatcaggtgcttcatataaatgtatataaaggtcttatgggttttaaatcatcttatggccatgaggcctgctgacattttatggccctttctgataacagtcagtcaaccagaaaacttattttttttcaggggtgattttttcttaaacaaagctccaccctccaaataaagttgcattcctacagggtgagggtgtagtgggttacaatcaagaaaggaatttacttagcctaaggtttaacataattaatcttaaaggttaatacttatttctcttatatgttagttatattcattattagggcagggaatatggagatttagcagcaaatattggctcaacaaatgaaaacccttcaccaacataatttctaatcaatctaccatactatactagtaattttgtaacttcttaaaagagtctgtatttagaaggttttaaagcatctggtgcctctcacggttgggaggctggaaacaatcacatgtggccggacgaacctgctcaggcaggctagagaaccttcagaagagtttgtaagttgaaacactcttgtcatacccaggaatttttattaactagaactgcaagttaactccttctccgagagagctggtggggggacagccccccataaagtcagaggtataggtgagagcataaaacagactctggttttgggggtagatgcatgggaacagggggtttcctgaggcttgatcccacctttgtgtatgccgaagcctccttcctcatgacctttgcatgggcggagttcctcactgctcctggcagtttgtgttttactatcacgcaaaaacaaaaaatggctgtctggggaggccttacaaatagctgtggaaagaagaaaggcaaaaagcaaaggagaaaaggaaagatataagcatctgagtgcagagttccaaagaatagcaagaagagataagaaagccttcttcagcgatcaatacaaagaaatacaggaaaacaaaagaatgggaaagactagaggtctcttcaagaaaattagagatagcaagggaacatttcatgcaaagatgggctcgataaaggacagaaatggtctggacataacagaagcagaagatattaagaagaggtggcaagaatacatggaagaactgtacaaaaaagatcttcatgacccagataatcatgataatgtgaccactaatctagagccagacatcttggaatgtgaagtcaagtgggccttagaaagcatcactctgaacaaagctagtggaggtgatggaattccagttgagctttttcaaatcctgaaagatgatgctgtgaaaatgctgcactcaatatgccagcaaatttggaaaactcagcagtggccacaggagtggaaaaggtcagttttcattccaattccaaagaaaggcaatgccaaagaatgctccaactaccgcacaattgcactcctctcacacactagtaaagtaatgctcaaaattctccaagccaggcttcagcaatacgtgaaccgtgaacttcctgatgttcaagctggttttagaaaaggcagaggaaccagagatcaaattgccgacatccgctggatcatggaaaaagcaagagagttccagaaaaacatctatttctgctttattgactatgccaaagcctttgactgtgtggatcacaataaactgtggaaaattctgaaagagatgggaataccagaccacctaacctgcctcttgagaaatctgtatgcaggccaggaagcaccagttagaactggacatggaacaacagactggttccaaatagggacaggtgtatgtcaaggctgtatattgtcaccctgcttatttaacttatatgcagagtacatcatgagaaacgctggactggaagaagcagaagctggaatcaagattgccgggagaaatatcaataacctcagatatgcagatgataccaccctaacggcagaaagtgaagaggaactaaaaagcctgtttatgaaagtgaaagaggagagcgaaaaagttggtttaaagctcaacattcagaaaatgaagatcatggcatccggtcccatcacttcatgggaaatagatggggaaacagtggaaacagtgtcagactttattttggggggctccaaaatcactgcagatggtgattgcagccatgaaattaaaagacacttactccttggaagaaaaattattaccaagatagacagcatattcaaaagcagagacattactttgctgactaaggttcgtctagtcaaggctatggtttttcctgtggttatgtatggatgtgagagttggactgtgaaggctgagcactgaagaattgatgcttttgcactgtggtgttggagaagactcttgagagtcccttggactgcaaggagatccaaccagtccattctgaaggagatcagccctgggatttctttggaaggaatgatgatactaaagttgaagctctagtactttgcccacctcatgcaaagagttgactcattggaaacgactctgatgctgggagggattgggggcaggaggagaaggggacaacagaggatgagatggctggatggcatcacggactcgatggacgtgagtctgagtgaactcctggagatggtgatggacagggaggcctggcgtgctatgattcatggggtcgcaaaaagtcggacacgactgagcgactgaactgaactgatcacatctaagaatccattgccaaatccaaggtcagaaagatttacctttatgttttcttctaagacttttatggctttaactgttatatatttccttgatacattcagagttaaggggtcctactttattcttttgcatgtggaaattcagttgtcctagctccatttgttgaatagatgactctttttccattgaacggatgtgacagccttctcaaaaatcagttggtcatagatatatgggtttatttatggactctaaattttattccagtaccccactgtttttattactgtagctttttagcaacttttgaaattagaaaatacgagttatctgacttttctctttttcaaatggttttggctgtttgggaacccttgcaatcccatgattttgagagttggattttccatttatgcaaggaaagcattttgttagaaaatacacttaatctgcaggtctctttgggtcatatgaacatattagaaatattaaggttttctactcacaaagataggatttctctttgttaatttttttttcagcaatgtttctggttttcagtgtacaaatcttttacctttttcagtttatttattccctggtattctattcttggcctttgctgatggctcagacagtaaagaatctgcttgcaatgtaagagacctgaatttgatccctggattgggaagatcctctggagaaggaaatggaaaccccaccacagaatttgtgccaggaaaataacaagacaggagagcctagttggctacagtctatggggttgtaaagaattggacacgactgaggactaacactttcattttttttctattcttctagatgctcttgaagtgcagttgcttagttattttttccagataacttattgcaaatatatagatagaaacacaactgacatttgtgcattgatttcataccctgcatattgtttgttgcttttttctggattctttttctgcagttttctatgtataagacaatttcatctgttaatgttcagttttacttctccctttccaactcagagaccttttatatatttatttttttgttgataactttttctgcattgaagttccagttcaatgttgaatagaagtgataaaagtgcgcatacttattttgtccatgatcttaagctaaactctttcatcctttcactaatgagtatggcgttcagttcagtttagttcagtcgctcagtcgtgtccaactctttgcaaccccatgaatcgcagcacgccaggcctccctgtccatcaccaactgccagagtttacctaaattcatgtccaccgagtcggtgatgctatccagccatctcatcctctttcatccccttctcctcctgcccccaatccctcccagtaccagggtcttttccaatgagttaactcttcatgaggtggccaaagtattggagcttcagcttcagcatcagtccttccaatgaacactcaggactgagctcctttaggatggactggttggatctccttgcagtccaagggactctgaagagttttctccaacaccacagttcaaaagcatcaattcttcggtgctcagctttcttcacagtccaactctcacatccatacatgactactggaaaaaccatagccttgactagactggcctttgtgggcaaagtaatgtctctgctttcaatatgctatctaggttggtcataactttccttccaaggagtaagcctcttttaatttcacggctgcaatcaccatctacagtgattttggagccccccaaaataaagtctgacactgtttccactgattccccatctgtttcccttgaagtgatgatcttgatcatcacttgatcatcttgatcatcttcccatgatgccgtgatcttagttttctgaatgttgagctttaagtcaaccttttcactttcctctttcacttccatcaaggggctttttagttcctcttcactttctgccataagggtggtgtcatctgcatatctgaggttattgatatttctcccagcaatcttgattccagcttgtgcttcttcctgcccagcgtttctcatgatgtactctgcatataagttaaataagcagggtgacaatatacagctttgacgtaccccttttcctatttggaaccactctgttgtcccatggtgttagctgtgggttttttgtaaagttcctttatcttgttgatgaagaagcttcccttctattcttatttttctgggtatttttaattataaagatgattgattttgtcaaatatgttttctgtgtcaattgagataatcatataaaattttccctttcattcaattaatgtggtggtgttgttaggtcactcagtcgtgttcaactctttgtgaccccatggactgcagcatgccaggcttccctgtccttcactatctcctggactttgctcaaatttgtgtccattgagtcaatgatgccatccaaccatctcatcgtctgctgcacacttctcctcctgccttcaatcttttctagcatcaaggtcttttccaatgagttggctctttgcatcaggtggccaaggtattggagttccagcttcagcatcagtccttccagtgaatatttagggctgatttcctttaggattgactggtttgatgtccttggagtccaagggactctcaagagtcttctccagcaccacaattcaaaaccatcaattcttctgtattaagcttctttatggttcagctgtcacatctttacatgactactggaaaaccataggtttaactagatggacccatgttggtaaagtgacatctttgcttttcaatacactgtctaggtttgtcatagtttttcttccaagaaatgagagtcgtttaatttcctggctgtagtcaccactcaaagtgattttggagctgaggaaattaaaacctgtcactgattccattgtttccccatctatttgccatgaagtgatgggactggatgccatgatctttgatttttgaatgttgagttttaagccagctttttcctctttcctatttcactttcatcaagaggctttttagttcctcttccctttctgccattagggcagtgccatctgcttatctgaggttattgatatttctccaggcaatcttgattccagcttgaacttcatccagtctggcatttctcatgatgtactctgcataagataaataagcaaggtgacagtatacagccttgatgtactcctttcctaattttgagccagtccattgttctatgtccgattctaactgttgctctttgacctgcatacgggtttctcaagagacaggtaaggtggtctggtattctcatctcttttagggattttccacagtttgttgtgaatccacagtcaaaggctttagtgtcttcagtgaagaagaagtagatgtttttctggaattcctttgctttttctatgatccaacagatgttggcaatgtgatctctggttcctctgccttttcatttttgaaattaattaatttattttaattggaggctaattactttacaatattgtagtgtttttttttttcccctatattgacatgaatcagccataggtgtacatatgtcctccattctgaacctcctccccgccacctccctcccaatcctatcccccagggtcatcccagtgcatcctgtctcatgtattgaacctggactggtgatctatttcacatatgttatctatttcacataggtttcaatgctattatatcaaatcatcccaccctccccttatcccacagaatccaaaagtctgttctttatatctgtgtcttttttgctgtcttggatattgttatcatctttctaaattccatatatacacattaatatacttggtgtattaatataattggtgtttttcattctgacttactacactctgtataataggctccagtttcatccacctcattagaactgattcaaatgcattctttttaatatctgagtaatatttcattgtgtatatgcacaatgaaatattactttcttatccattcatctgccaatggacatctagattgcttccatgtcctaactattgtaaacagtgctgtgatgaacgttggggtacatgtgtctctttcagttctggtttcctcggtatgtatgcccagcagtggtattgctgggttgtatggcagttctatttccagttttttaaggaatctccacactgttctccatagtgactgtgctattttgcattccaacaacagtgtaagagggttctcttttctccacaccctcgtgagcatttattgtttgtagactttttgatagcagccatctgaacggcgtgagatgttatctaattttggttttgatatgcatttctctgataatgagtgatgttgagcatcttttcatgtgtttgttagccaccttagccatctgtatgtcttctttggaggaatgtctgtttagttctttggctcatttttctattgggtaacttatttttctggaattgagctgcaggagctgcttgtttatttttgagattaattcttggtcagttgcttcttttgctattattttctcctattctgaagtctctcttttcaccttgcttatagttaccttcattgtgaaaaaacttttaattttaattaggtcccatttatttatttttgcttttatttccattactctgggaggtgggtcatagaggatcctgttgtgatctacgtcagagagtgttttgcctatgttttcctccaggagttttatagtttctggtcttacatttatatctttaatccactttgagtctatttttgtgtatggtgttagaaagtgttctagtttcattctattacaaatagtcaaccagttttcccagtcccacttgttaaagagattgtcttttctccagtgtatactcttgcctcctttgtcatggataaggtgtccatgctgctgctgctgctaagtcgcttcagtcatgtccaactctgcaaccccattgatggcagcccaccaggctcccctgtccctgggattctccaggcaagaacactggagtgggttgacatttccttctccaatgcatgaaagtgaaaagtgaaagtgaagttgctcagtcgtgtccgactcttagcaaccccatggactgtagcccaccaggctcctccatccatgggattttccaggcaagggtactggagtggggtgccatttctttctctcttaaggtgtccataagtgagtggatttatctctgggctttccattttgttccattgatctatatttctgtctttttgtgtaggtaccatactgtcttgatgactgtagctttgtagtagagcctgaaatcatgcaggttgattcccccagttccatttttcttgctcaagattgctttgcctattcaagatttttgtgtatgtttctgtacaaattgtgaaattatttgttctagttatgtgaaaaatgctgttggtagcttgatggggattgcattaaatctatagtttgctttgggtagtacactcattttcactgtattaattcttttgatccatgaacatggtatatttttccatttatttgtgtcctctttgatttctttcatcagtgttttatagttatctatatataggtcttgtttctttttatttatttattttttattttactttacaattctgtattggttttgccatacattgacattttgtttctttaagtagatttactacgaagtattttattcttttcattgcaatggtgaatggaatttttccttaatttctctttctgttttttcattgttactgtataggaatgcaagggaattctgtgtgttaattttataccctgaaactttactatatttattgattagctctagaaattttctggtggagtctttagggttttctatgtagagaatcatgtcatctgcaaacagtgagagttttacttcttcctttccaatctggactccttttatttctttttcttctctgattgctgtggctgaaacttccaaaactatgttgaataatagtggtgagagtgggcacccttgtcttcttccagactttaggggaaatgctttcaatctttcaacattgaggataatgtttgctgtgggtttatcatatatgacttattatgttgaggtatgttccttctatttctgctttatggaggatttttttttgtcataaatggatgttgaattttgtcaaagactttctctgcatctattgagatgatcatattattttcatctttcaatatgttaatatgctctaacaaatattatatattgaagaatccgtgcatccctggaataaagcccacttgattatcttgttaatatgttgttagattctgtttgttagaggtttgttgaggatttttgcatcttagctcatcagtgatattggcctgtagttttctttttttgtggcatctttgtcagtttttggtattagggtgatggtgggctcatagaatgagtttggaagtttaccttcctctgcaatttttcggaagagtttgaataagataggtgttagctttgctctaaatttttggtagaattcagctctgaagccttctgttcctgggcttttattgttggaagattttttattacagtttcaatttctgtgtttttgatgggtttgttaagattttctatttcttcctggttcagttttggaaatttacacttttctaagtatttgtccatttcttccaagttgtccattttattaacatatagttgtttacagtagtctcttgatcctttgtatttctgtgttgtctgttgtgatttctccattttcatttctaattttgttgatttgactctattttttttcccctgaagagtctgcctaatggtttgtctattttatttatctactcaaagaacctgcttttagctttgttaattttggctatgttcctctttgttttcatttatttctgctctaatttttatcatttctttccttttactaaccctaggtctcttcatttcttctttttctagttgccttagatgtagagttaggttatttatctgatttttctcctgtttcttgaggtaggcatgtattgctatgaaccttccccttagcactgctttaactgaatcccataggttttgggttgctatgttttcattttcattcatttctatgcatattttgatttcttttttgatttgttggttattcacaagtgtgttgttcatcctccatatgtctgtatttttaataatttgattttcctgtacttgacatctaatcttaccgcataataatcagaaaagacacttgagatgatttcaaattttttgagtttacaaaggctagatttatggcccaggatgtgatctgtcctggagaaggttccttgtgcacttgagaaaatggtgaaattcattgttttgttgtaaaatatcctatagataaaaattaggtctaacggttccgttgtatcatttaaagcttgtgtttccttgctaattttctgtttagttgatctatccataggtgtgagtggggtattaaagactatcactattattatgtttctattaatatcccctttcatacctgttagtatttgccttacatattgcggtgctcctatgttgggtgcatatatatttataattgttatatcctcttcttggattgatcctttgattcttatgtagtatccttctttgtctcttttcacagcctttatttcaaagtctattttgtctgatatgaatattgctactcctgctttcctttggtctccatttgtggaaaatatcattttctagcccttcactttcattctgtatgtgtcccttgttttgaggtaggtcttttgtaaacagcatatataggagtcttgtttttgtatccattcagccagtctttgtcttttggttgggctattcaacccatttatatttaaggcaattattgataagtatgatcccgttgccattcatttgttgttttgagttcgagtttatgaacattttctgtatttcctgtctagagaagatcctttagcatttgttcaagagctggtttggtggttctctcagcttttgtttgtctgtaaagcttttgatttctccttggtatttgaatgagattcttgctgggtacagtaatctgggttgtagatttttctctttcatcactttaagtgtgtcctgcctctcccttcttgcttgaaaatttctattgaaagatctgctgttatccttatgagaatccccttgtgtgttattttttttcccttgctacttttaatatttgttctttgtgtttgatgttcattaatttgattaatatgtgtcttggggtgtttttttctggaactctcttgcttttccaatgatccagcagatgttggcaatttgatccctggttcctctgccttttctaaaaccagcttgaacatcaggaagttcacggttcacgtatttctgaagtctggcttggagaattttgagcattactttactagcatgtgagatgagtgcaattgtgcggtagttggagcattctttggcattgcatttctttggaattggaatgaaaactgaccttttccagtcctgtggccactgctgagttttccaaatttgctgtcatattgagtgcagcactttcactgcatcatctttcaggatttgaaatagcacaactggaattccatcaccttcactagctttgttcatagtgatgttttctaaggcccacttgacttcacattccaggatgtctggctctagatgagtgatcataccatcgtgattatctgggtcatgaagatctttttttgtatagttctcctgtgtattcttgccacctcttcttaatatcttctgcttctgttaagtccataccatttctgtcctttatcgagcccatctttgcatgaaatgttcccttggtatctctaattttcttgaagagatctctagtctttcccattctgttcttttcctctatttctttgcattgatcactgaggaaggctttattatctcttctttggaactctgtattcagatgcttatatctttccttttctcctttgcttttcgcttctcttcttttcaaagctatttgtaaggcctcctcagacagccattttgcttttttgcatttcttttccatggggatggtcttgatctctgtctcctctacaatgtcatgaacgtcagtccatagttcatcagacattctatcagatctagtcccttaaatctatttctcacttctactatataatcataagggatttgatttaggtcatacttgaatggtctagtggttttccctactttcttcactttaaatctgaatttggcaataaggagttcatgatctgagccacaaccaactcctggtcttgtttttgttaactgtatagagcttctccatctgtgtggatcacaataaactgtggaaaattctgaaagagatggaaataccagactacctgacctgcctcttgagaaacctatatgcaggtcaggaaggaacagttagaaccggacatggaacaacagactggttccaaataggaaaaggagtacgtcaaggctgtatattgtcactctgcttatttaacttatatgcagagtacatcatgagaaatgctgggctggaagaagcaccagctggaatcaagattgctgggagatatatcaataacctcagatatgcagatgacaccacctttatggcagaaagtgaagaggaactaaaaagcctggttatgaatgtgaaagaggagagtgaaagagttggcttaaagcttaacagtcagaaaacaaagatcattgcatctggtcccagcacttcatgggaaatagatggggaaacagtggaaacagtgtcagactttatttttgggggctccaaaatcactgcagatggtgactgtggccatgaaattaaaagacgcttactccttggcagaaaagttatgatcaacctagatagcatattgaaaagcagagacattgctttgccaacaaaggtctgtctcgtcaaggctatggtttttccagtagtcatgtatggatgtgagagttggactgtgaataaagctggcgctgaagaattgatgcttttgaatggtgatgttggagaagactcttggaaagtcccttggactgcaaggagatccaaccagtccagtctaaaggagatcagccctgggatttctttggaggaaatgatgctgaagctgaaactccagtagtttggccacctcatgcgaagaattgactcattggaaaagactctgatgctgggagggatgcagcagaaggtgaaggggacgaccgaggatgagatggctggatggcatcactgactcgatggacatgagtctgagtgaactccgggagttggtgatggacagggaggcctggcgtgctgcaattcatggggttgcaatgagtcggaaacaactgagcaactgagctgaactgaaccgaactagggagtttagtcttgggtttatcctgaatgggactctctgtgtttcttggacttgggtggctatttccttccccattttagggaaggtttcagctattatctccttaagtgttttctcatgactttctttttgtcttcttcttctttcgaatgttggggtgtttaacattgtcccagaggtgtctgaggttgtcctcatttcttttaattgttttttttccctctctgcttcatttatttccaccattctaccttccacctcaccttcttatcttctgcctcagttattctattgttggttccctccagagtgcttttgatttgttattgcagtattcattattgattgactcttttttatttctcctaggtccttgttaaacttttcttgcatcttctcaatccgtgtctccagagcatttatctataactcaattttgttttcaagattttggatcatttttattatcattattctgaattctttttcaggtagactccttatctgctcctctcttgttcggtttggtgggcatttatcatgttcctttaccttctgaatatttttctgtcttttaattttgtttagattgctgtgtttgggttggcatttctgtatattggaattttgtggctcttcttttttgtggagattgctgcctgttggggggggggtggtgttggacgaatggcttgtcaaggtttcctggttagggaagcttgcggcagtgttttggtgggtggagctggattccttctctctgtagtgcaatgaagcttccagtagtgaattttagggtgtctatgggtttggtgtgatttagtgaagtgaagtcgctcagttgtgtccgactctttacgaccccatggactgcagcctaccaggctcctccgtccatgggattttccaggcaagagtattggagtggggtgatttaggcagcctctattttaatgctcagggctgtgttcctgcattgctagagcattagcatggtatgtcttgctctggaattgttggctcttgggtggagcttggtttcattgtagtaatggaggcttttggatgagttcttgtcgattaatgttccctggggtcaggagttttctgatgttctctagttttggatttaaacctcttgtctttggctttcagtcttattcttacagcagcctcaagacgtctccatccatccaccacagacgataacaatttaggttaatggtgaaacgattctccacaatgagagacacccagagaggttcacagagttacatggagaacagaagaaggaggagggagatagaggtgaccaggaggagaagagggggagtcaaaaggggagagagcaatttagccagtaatcaattccctatgtactctccacagtctgggacacccagagtggttcatggagctaaatagagaagagagggggagggagcagatagaggtgacctgggggacaaatttgagcattaaaaggggagaaaggaatcaagccagtaatcacacccctaactaaaaatgggtactgaagattagattcttaaaggtacaaaattgatcagttcagttcaattcaatcactcagtcatgtccgactctttgtgaccccatgaatcacagcacaccaggcctccctgtccatcacaaactcccggagttcactcagactcacgtctattgagtcagtgatgccatccagctatttcatcctctgtcatccccttctcctcctgcccccaatccctcccagcatcagagtcttttccagtgaggcaactcttcgcatgaggtggccaaagtactggagtttcagcttcagcatcatcccctctaaagaaatcccagggctgatctccttcagaatggactggttgggtctccttgcagtccaagggactctcaagtcttctccaacacgacaaaattgataacaaataccaaaaagcaaagattaaaaatccagagtagagatgagactcccagaaatacaatattagaaataaaaaacaaaatcacaaaaattataaaaaatgtaatatgaaatttgttttaaaaatagggtcttttatgcaagtaggttataaaaatgaatattaaaggagtaataaagaagtaaaaataaaataaattaaaaaattatagtagtaaaaatatatctaggaatttttctggagctgttgagggcaatgtggggtcagttcagtttcagatagttccttgttccagcttatcattcttctcaaggtctataggccccttccaatgcttagtcaatgttaactacaaggttttaatctgttgcacctgtcagtttcagagcagttccctcttctttattttggcttcatctgtttgcaattctcttcagtgtctaatttccaaactgactcaagggagtgaggtgattacttatttttgctcacttgttcagttgtgtcgtggggaggaaggaacacagcaaataaatatcactggcttgtgtggggagtgcacagtgtatggatcacactgggcttgccccagctcatggtggcatgtacttccctggtctacactgctcaggttcaggtttttgggtactccacaaaggcacagacttggttgtgcattttgtgcctttcccaggtcagagcagctcaggcagtcaggtgcttggtgagcgcactgtcctaggtgggctgtgcatcttaatcacctccctggtcctggctgctcagtgtcctgggtatgctgcaagagctccctctcaggtgtgccatgtgtctcctctggggagctgacctcaggctgtgactctcctggcagatgtcaaccatccaggatcccaggaagacttggttagcaactgtgagtctgctcacagtttggtggagaatgccggtctctggggcagagattgccccttacctacaggctctggctgtcccatgcctgcctctctgcctccagcagggcaaaggaccattccacagccagctagctctcctttggtatttgctcaatcctttcctctgtgagcaggccaggctgtgacttaggttagagccttagactagagtttttcatgggaaaattctctctctttttctctctctctctggctatcccacagtttgggttgttatctcaccttcagttcagttcagtccttcagtcgtgttcgactctttgcaaccccatgaatcgcagcatgccaggcctccctgtccatcaccatctcccggagttcactcagactcacgtccatcgagtccgtgatgccatccagccatctcatcctcttgtcatccccttctcctcctgcccccaatccctcccagcatcagagtcttttgcaatgagtcaactcttctcatgaggtggccaaagtactggagcttcagctttagcatcattccttccaaagaaatcccagggtcgatctccttcagaatggactggttggatctccttgcagtccaagggactctcaagagtcttctccaacaccacagttcaaaagcatcaattcttcggtgctcagccttcttcacagtccaactgtcacatccccatacatggccacaggaaagaccatagccttgactagacggaccttagtcggcaaagtaatgtctctgcttttgaatatactatctagcttggtaataacttttcttccaaggagtaagcgtcttttaatttcatggctgcaatcactatctgcagtgattttggagccccccaaaataaagcctgacactgcttccactgtttccccatctatttcccatgaagtgatgggaccagatgccatgatcttcgttttctgaatgttgagctttaagccaactgtttcactctcctctttcactttcatcaagaggctttttagttcctcttcactttctgccataagggtggtgtcatctgcatatctgcagttattgatatttctcctggcaatcttgattccagcttgtgtttcttccagtccagtgtttctcatgatgtactctgcatacaagttaaataaggaggacacatccccaccaacattttttcctgccttttcatagtagtcatcttaacaggtgaaagattatttctcattgcattttgatatgcatctctccaatgattagtcatgctgggaaatctcatctggttactggccatttgtataccatctttggagaaatatctgttaagttcctctgcccattttaaattaggttatttgatttttttttttgagtcgtaggagttctgcgaaagattgagggcaggaggagaaggggatgacaaaggatgagatggttggatggcatcaccgactcaatggacatgagtttgggtaggctccgggagttggtgatggacagagaggcctggcctgctgcatttcatggggtcacaaagaatcggacatgactgagcaactgacctgaactgaggagttctttatatattttggatattaactcattttcagatatgtgatttccagatatttttgcctattccatgggatgcctttttactctaaagattgtgtcctttgataaacaaaagttttaaagtttcatgtagtcttattagtctatttctgtggcctgagcttttggtgtcatagccaagaaaatattggcaagttcaacatcatattttcccttaagttttctttgggagatttatagttttgggtcttatatttaagtctatatttcatttaatttttgaatatggtataaagtgaagaagaactaaagagactcttgatgaaagtaaaagaagagagtgaaaaaattggcttaaaactcaacattcagatcatggcatctggtcccatcagttcatggcaaatagatggggaaacaatggaaacagtgacagacattattttggggggcttcatatcactgcagatggtgactgcagcaatgaaattaaaagatgctctctccttggaagaaaagttaagaccaacctagacagcatatttaaaagcagagttattagtttgccaacaaaggcccgtctagtcaaggctatggtttttccagtggtcatgtatggatgtgagagttggactaaaaggaaagctgagcaccgaagaattgatgtgtttgaactgtggtgtttaagaagacttttgaaagtccccaggctgcaaggagatcaaaccagtccatcctaaaggaaatcagtcctgaatattaattggaaggactgatgctaaagttgcaactccaatactttggccacctcatgcgaagagttgactcattggaaaagactctgatgttgggagggattgggggcaggaggagaaggggacgacagaggatgagatggctggatggcatcacagactcgatgcatgtgagtctgattgaactccgggagttggtgatggacagagaggcctggcgtgctgcgattcatggagtggcaaagagttggacacgactgagtgactgaactgaactgaactgaactgaagaaaatttaacccaagatcaaagaagcctttgcatatgtttattctagcagttttaaaattacagattttacatttagtcttattttctatgtgagtattcctggtggctcagatagcaaagaatttgcctgcaatgcaggagacacaggttctatccctgggtcaggaagatcttttggagaagggaatgactacctactccagcattcttgactgggaaatcccacagacataggagccttgtgggctacagttcatgggattgcaaatagtcagacacgactgagtgactaacactttcacttttcattgtccacatagctaacttttgtgtatgattcaataaatggatcaaagtaaaaaatttttttgcttgtgaatatccagttgtttcagcaccattcatgaaaataattacaatttcttcactgaactgttgtcgaacttttcttgcaaatcatctgatctttaaattgtgggtgcatttctggactctccattgatcagtttgactatattaatgtaacactatactgttttgattaggtaatgtatgttctctaattttgctcttctttttcaagtttgtgttggctattctaggtcctttgtatttccacataagttctggaatttctacaaaacgttcttagaaaaaataaggagatcttaataaatagagacatatcatgttcatagacttcttaaagacttaatattgttaaaatgctagttattcccaaattactctatatgtggctcctcaaaggtgtctacatcctaatatgtgatattaatacctgtgtttgttatgtcacatggcagaagggactttgcaggtaaaattaaggttacaaacattaaaacagggaaattttcctagattatccaggtgtgctcaatgtaataacattggcccttaaaatggaagtggaagagaagagagttaattggagagatgcagcaggaaaagcaggagagatttgaattgtgagagtgacttgacttgacgcaccattgttggctttgaagacagaggaagtgagtcatgagctagaaatgtgggtggcctcttaaaactaagaacaactcctgggtgatagcaagtaaggaagtagggactttagtttgcattgaatagtatctacaatcaaaataagcaggaactgaattatgtctataattgaaataagtagggaaacagtttttgtcctgaagcctctagaaagaaatgcagccctgcaaacaccttgattttgttttgaggccctaattagagactagccaagctcatcatacttctgatctatgaaaaccatgatataataaagaggtgctatttcaagccactacatttgtagtactttgtgatgacagctatagaaaactagtactttttatgtctgtataatctaaagccatattgctgatcttattcttgatattggcatttttatttccttttcacttttcattatatttagattgaccaagtctaccggtcttcttgctcttctcaaaggaccaagttttagtattattgcttttcgctaataattttctatcttcatttcactgatttctgatccagcacatttttttctacttattttgagttttatttgcttagaaaaaaacgtgctcagcctatttgaacaaaaactccatgaaagagcatatatgagtggcaaataagtacatgaaaagatgctcaacatcattagtcatcagagggatacaatttgaaaccataatgcgatatcattttatgcccactggaaaataaaaaaaaggattcatgtcaatgtatggcaaaaccaatacagaattgtaaagtaaaataaaaataaataaattaatttaaaaaataaaaaaataaaaaaataaaaataaatcaaatctctaaaaaaaaaaaaaagaaaatatggaaaaatgggcatttccatatactactggtggaattgtaaaatgttacaaccattttgggaagcagtttcacagttttttaaaacacaaatatcccataaactagcctatcatataattcaggaattccattcctagatattgatccaagataactgaaagcataatgtatatatagataatttatatgaaagttcatagcacattcatttgtaatagccaaccactggcaacaatgcaagtgtccatcaaaggtgaatgagtatgtgcattgtggcatagccatacttaacaaaaaagaagaatgaaataccaacactgaagaattgaagaatgaacacaccaatgttgaagaatcttaaaataattgtattgaatggaagcagtctgttaaaaaaatacatgttatatgattgcatttatagaaaatataaaaactatacagtgaaaggaaagcaacgaacagtctcctgggggtgggatggggtgacaggaggagggagagagagaaaagaatatggacatgagcaaactgctggcatggtggatatattcattatcctgatggctgttgtgttggtttctttgatatatatattagccaaaagatacatgttaagtgtgttcagtttgcagaatatcagttaccttcaattaaaaaagaaatctgaagatgaagaattagcattttaacaattaaactttaagtctgtttacttgtttttcagggtggattgctattctaggtgccatctggttgctaattttagctgacatccatgattttgagataattctacacagagtggaatgggcaacccttctgttctttgcagcactctttgttctgatggaggtaagtcttttgttgaacttttgcgatagttcaaagacctgatttttatatttcacattctatttactgaatgaaaaacgcccaaagtttgtaagtctttatgcatattcactaagtgtaaaattatgggggttgaaattagactattttaagttaaaccaacttttatctaaggcactgaaataatatttaataaacttgtttatttggttgctgttgtttttttcttgaataacctttgtggtttgtaaactttctctaatttgatttgctgtaaagtagaatttactctaaattgggcttagagcaaaatgacttgttacaaaaagtttatagggaaatatcttgatagtctattccttttgtgtaatatttaaataaataatctcataatgggaaagactgcatcaaagaaaagaatgaataatacgtattgttttagttataattgttgtcacaaaattaatcacaataacttttatcttgggaattgattcacaaacatgtacctcctcaaatacaaagatttactatataaaaaaatactgttccccaaaggattacttcaaacacaccaaatgtttcacattgatcaccttaacttattgattacaaattcattcaatattcactattttcttgattaaaactagcagtttttttattaattatttttaaacaggtctcttgtatcattgaaacctgtctttaattcataatagattacataggtgtaataactcacatagctccttcaaatacatcaaggagttatgaatcctattctacttcatcaatctcctactcaaaaacttcaccttttctattctgggttttctttatgcacaaaacatatagactattgagggggggaattctagttactatttcatgattggcttttgaaagtcagtgcctcaattgcatatttattcaagatgtaaactgctatctcatctgggctttggcatattgttctcaatttcatacttctctttgtctgatagggtaaatgctggaatatttaaagcaacttgagatataatttatgtcataaaattaattccttttatatttacagttcaataacttttagttacttttgaatgtttcattcccatgaccctcatgatcccttacagtcagttttagctcacaactccagctctaggcaatcactgatcctttttctattgagttgtctttcctgtacatttcatctaaaaggaatcatatattgtgtactattttctgttggcttctttaaattagaataatgatgttgaagttcatccatgtaccttagactcatttatttttttggtgaataacattctgctatatggatatactatattttatttacctattttgataaacatttatgtttatttgtatatgagtttttgtgtggacatatgttttattttattttaggtagataataggtcttagcactgctttaacttatttaaaatattttccacagtggttataccattttacaatcttatcagtaatatagtagattccagtttctttacatcgtcattgtcacatattgtcattcattttgattatagacattctagtaggtgtatcagtcagttcagttcagttgctcagtcgtgtctgactctttgtgacccgatggactgcggcatgccaggcctccctgtccgtcaccaatttctggagtttattcaaactcatgtccattgagttggtgatgccatccaaccatacatcctctttcatccccttctcctcctgccttcaatctttcccaggatcacggtctttcccaagagtgaattcttcagatcaggtggccaaagtgttggagtttcagcttcactatcagtccttccaatgaatatccaggactgatttcctttaggatggactgattggatctccttgcagtccaagggactctcaagagtcttcttcagaaccctagttcaaaagcatcaattcttcggtgctcagctttccttttagtccaactctcacatccatacatgactactggaaaaaccatagccttgactagacggaactttgttagcaaagtaatgtctctgctttttaatatgctgtctaggttggtcttaacttttcttcgaaggagcaagtgtcttttaatttcatggctgcagtcaccatttgcagtgattatggagccccccaaaataaagtctgtcactgtttccactgtttccccatctatttgccatgaagtgatgggaccaaatgccttgatcttagttttcttagtaggtgtataatggtttttagtttttaaaaaaggtgatatgggaaaacattctttgaaccatactgttctccatagtagctatacaagtttatatttccaccagtagtgtaggagggttccctttcttcacaccctctccagcatttttattagattaatctttactggagtatacttgatttgcaatgttgtgttagtatctgctgtgcagaaaagtgaatcagctatacatatatgtatatccactcatttttagattctttttccatataggccattaaaaaatattgagtagaatgtcctagtttatagagtaggtccatattagttatctgttttatatatagtggtatgtatatgtcaatatcaatctcccagtttacccctccacccttttctcctgataaccataattttgttttctacatctgtgactctatttttttgcttttaattgatttgtatttaattgaaggataattgctttgcaatattgtgttgctttctgccatacatcaacatgactcaaccataggtataccaaagtccccttcctcttgaaccttcctccaacctcccaccacatcccacacttctaggttgtcatagagcaccatttgagctccctgagtcatacagtaaatacctactatctgttttccatcagatcagttcagttgagacactcagtcgtgtccgactctttgccactccatgaatcacagcacgaaaggccgccctgtccatcaccaactcccagagttcactcagactcacgtccatcgagtccgtgatgccatccagccatctcatcctctgtcgcccccttctcctgctgaccccaatccctcccagcatcagagtcttttccaatgagtcaactctttgcatgaggtggccaaagtactggagtttcagctttagcatccttccaaagaaatcccagggctgatctccttcagaatggattggttggatccccttgcagtccaagggactctcaagagtcttctccaacatcacagttcaaaagcatcaattcttcagtgctcagcctcttcacagtccaactctcacatcgatacatggccactggaaaaaccatagccttgactagacagatcttagtcagcaaagtaatgtctttgcttttcaatatgctatctaggttggtcataacttttcttccaaggagtaaacatcttttaatttcatggctgcaatcactatctgcagtgattttggagacccccaaaataaagtcagccactgtttccattgtttccccatctgtttcccatgaagtgatgggacccggatgccatgatcttcgttttctgaatgttgagctttaagccaacttttttactctctttcactttcatcaagaggctttttagttcctatttactttctgccataagggtggtgccatctgcatatctgaggttattgatattgcttctggcaatcttgattccagcttgcgtttcttccagtccagcgtttctcatgaggtactcggcatataagttaaataagcaaggtgacaatatacaggtttgacgtactccttttcctgtttggaaccagtctgttgttccatgtccagttctaactgttgcttcgtgacctgcatacaaatttctcaagaggcaggtcaggtagtctggtattcccatctctttcagaattttccacagtttattgtgatccacacagtcaaaggctttggcatagtcagtaaagcagaaatagatgttttccaggaactctcttgatttttaatgaaccagcggaggttggcaatttgatctctggttcctctgccttttctaaaaccagcttgaacatcaggaagttcacggttcacgtattgctgaagcctggcttggagaattttgagcatgactttactagcatgtgagatgagtgcaattgtgcggtagttggagcattctttggcattgcctttctttgggattggaatgaaaatggaccttttccagtcctgtggccactgctgagttttccaaatgtgctggcttattgagtgcaacactttcacagcatcatctttcaggatttgaaatagctcaactggaattccatcacctccattagctttgttcatagtgatgctttcttaagcccacttgacttcacattccaggatgtctggctctagatgagcgatcacaccatcatgattatccaggtcgtgaagatcttttttgtacagttcttctgtgtattcttgccaactcttcttaatatcttctgcttctgttaggtccagaccatttttgtcctttatcgagcccatctttgcatgaagtgttcccttggtatctctaattttcttgaagtaatctctagtctttccaattctgttgttttcctctatttcttggcattgatcgctgaagaaggctttcttatctcttcttgctattctttggaactctgcattcagatgcttatatctttccttttctcctttgcatttcgcctctctacttttcacagctctttgtaaggcctccccagacagccattttgcttttttgcatttcttttccatggggatggtcttgatccctgtctcctgtacaatgtcacgaacctcattccatagttcatcaggcactctatcaatcagatctaggcctttaaatctatttctcacttccactgtataatcataagagttttgatttatgtatacctgaatggtttaacggttttccctactttcttcaacttaagtctgaatttggtaataaggagtccatgatctaagccacagtctcttcttggtcttgtttttgttgactgtatagagcttctccatctttggctgcaaagaatataatcaatctgatttcggtgttgaccatctggtgatgtccatgtgtagagtcttctcttgtgttgttggaagagggtgtttgctatgaccaggcatcttcttggcaaaactctattagtctttgccctgcttcattctgcattccaaggccaaatttgcctgttactccaggtgtttcttgacttcctacttttgcatcccagtccctataatgaaaaggacgcctttttttgggtgttagttctaaaaggtcttgtaggtcttcaaagaaccgttcaacttcagcttcttcagcattactgcttggggcatagacttggattactgtgatattgaatggtttgccttggaaacgaacagagatcattctgtcgtttttgagattgcatccaaggactgcattttggactcttttgttgaccatgatggctactccatttattctgagggattcctgcccacagtagtagatataatggtcatctgagttaaattcacccattccagtccattttagtttgctgattcctagaatgtctacattcactcttgccatctcttgtttgaccacttccaatttgccttgattcatggacctgacattccaggtttctatgcagtattgtgttggagaagactcttgagagtcccttggactgcaaggagatctaaccaatccattctgaagatcagccctgggatttctttggaaggaatgatgctgaagctgaaactccagtactttggccaccctatgcaaagagttgactcattggaaagactctgatgctgggagggattgggggcaggaggagaaggggacgactgaggatgagatggctggatggcatcacgaactcgatggctgtgagtctgcgtgaagtctgggagttggtgatggacagggaggccgggcgtgttgcaattaatggggtcgcaaagagtcggacacgactaagcgactgaactgaacttaactgaaatgatgcaatattgctctttacagcatcggaccttgattctatcaccagtcacatccacaactgggtattgtttttactttggctccatcccttcattctttctggagttatttctccactgacctccagtagcatgttgggcacctactgatctggggagttcctctttcaatatcctatcattttgccttttcatactgttcatggggttctcaagcaagaatactgaagtggtttcccattcccttctccagcggaccacattctgtcagacctctccaccatgatcctcccatcttgggttgccccatggcatggcttagtttcactgagttagacaaggctgtggtcctagtgtgattaaattgactcattttctgtgagtatggtttcagtctgtctgccctctgatgccctcttgcaacacctaccatctttcttgggtttctcttaccttggaagtggggtatctcttcacggctgctccagcaaagtgcatctgctgctccttatggtggaggaaggatttctcctcaccgctacccttcgtgaccttcaacgtgggatagctcctctaggcaagcagccactgctccttggacatggggttgctcctcctggccgccaccccggccttgggcgtggggtggcttctcctggctgcccctggccttggaagtggggaactcctctcggctgccacccctgaccttggacttcggtagctcctctcggccattgctgcgctgtcgcagcctggtactgtcagctgtgaccagcgcactaagcacgggtggctgcgatgggcgcactaagtgtggccgagaggagttaccccacgtccgaggtcaggggcagtggccaagagtgccagactattttccatataatagtataaatatttcgatgctgctctctcggtttgtcccaccctctccttcccctccctgtttcctcaagtctgttctctatttctgcatctgcattgctacgtgcaaataggtgatggcatcatcagcatttttgatgatggccattctgactggtgtgtgatgatatttcactgtagctttgatgtttatttctctagtaattagtgatgttgagcatcttttcatgtgcctcttgactatttgtgtgtcttctctagagaaaagtctatttaggtcttcttctcatttttgattagatttttttctttattgagcttcatgagctgtttgtaaactttggagattattcccttctttgttgtatcagttgcacgtattttctcccattctatggattatatatttgctttgtttctggttacctttgctgtgcaaaatttttgagtttaatatggtaccatttatttattttctttcatttccactattctaggacagagatcagagagatattgctgcaatttatgtcaaagagtgttctgcctatgttttcctctaagagttttatagtaatgtcttacatttagatctttaatccattttgattgaagtttgtttttttagtgtatggtgttaaaggatattctaatttcattcttttatatgtagctgtccagttttcctaacaccatttattgaagagattgtcctttctccactgtatatttttgcctcctttgtcatggattaattgaccagaggtgcatgggtttatttctgggcattctgtcctgtttcattgatcgatagttctgtttttatgcagtaccatactgttttgattactgtagctttgtagtatagtctgaagccagggaacttttttactccaggtttgtttttctttctcaagattgctttggatactcaaggtcttttgtgtcttcatacaaatgtaaaattttaaaattctagttctgtgaaaaatgccattgataatttgatagggattgcattgaatccatagattattttgtgtagtatagtcattttcacaatattgattcttccaacctaagaacatggtatatctttccatctgtgtcatctttgatttctttcttcaacatcttgtatatagtttttggagtataggtcttttgcctccttaggcaaaatttataacagtgtgttatattctttttgatgatattgtgagtataattgttttttaaattttattagattggtgcaaacttaattgtgatttcagaccctaaattttaattcattataattaggctcaaacatatatttattaattgaagtaggaacaattacaattaacacatttttgccaatgagaaataagtttgtttattcctgttacataaaaatctgtgcttcaggattcaatgaaccgttggaaagcaaaaagttgttgagatgcttgaagagtggcaaatgaggcaaaactttgcagcccaattcattcagcttttgaagtgttggttgtgtgacgtgtggtctggtgttgtcatgcagaagaatggggcccattctgttgaccaatgccagctgcaggtgttgcagatttcaatgcagctcattgatttgctgagcatagttttcagatgtaattgtttcacaggaattcagaaagctgtaaaggatcagatggccagcagaccaccaaacagtgactatgaccatttttttggtgcaagtttggctttggaaagtgctttggagattcttctcagtccaaccactgagctggtcattgccaactgtataaaatccattttttgtctctctcacaatctgatggagaaatggttcattgatgttgcatagaataagagaaggcaacacttcaaaacgacattctttttttcccccttaattttcagtcagctcatgaggcacccacttattgagcttttttgcctttccaatttgcttcaaatcccaaatgaccatagaatagttgacactgaattcttgggcattttctagtgtagttgtaagagggtcagcttcaatgatagctctcagttggtcattgtcacttccaaaggctggccactatgttcctcaccttcaagcttctcatctcctttgcgaaacttcttgaatcacaactgcactgcacatttgttagcatttactgggccaaatgcattgtagatgttgtgagttgtctctgctgctttatgaacattttgaactaaagaaaatcactcgaatttgctttttatttaacatcgtttccctaatctaaaataaatataaaataaacagcaagtaatgttattagcaaaaccacataaagtgagaaatgtgcattaaaatgatgtacaacataaccacatttatttaagaatgtattccaatatcaaatggcaaatttcaatgctgcaaaaccaccattacttttgcaacaacctaatatattctgattgcatattaacattacacagaaatacaaatttttaaataataacattgtgtcctgagatcttcatgaatccatttgttagtttagtagttgtttttagatccgttggagattcttttcatgtcatctgcaaagacattttaatttcttttctgatttgatgcctttaactagctcatattttctcccttcctttcctccaaatattctctttttcccttctcttaaatttttcctgtcttgttagctataatccctagtttgatgttgaagtgatgaatattaatgttcatatcttatatctgatcttagaggaaatggatttggtttttcaccattatgtatagtcttagttgtaagttttttatttttatttttttggctatatatagatatcctttattaagctgagaaatatattaggataattccttatttgttgtgaaatttaatattcaattttgtcaaattttatatgtatctattatgatgaccatatatatttttaactttgaatctattattatggtatactacatttactgattttcagatgttaaatctgctttgtattcctgaagtaaatctcacttgatcatgttgtaataagttgttgagttccttttactattattttttgagaatttttacatctatattcatgagggatattggtctatataattttcatgtatgtttttctctggatttgttttgagcatcatactgaatgagtgcaacagaatgctttgtcaataattctgtgcaggagtttgtgaaagattgtttttaaatattcaataaaagtttccagtgaagtcatctgggcatgaaattaaattgtggaaagttttatatatttgtttgtttttcctaattcattttctttggcctatttaggtattttatttcttcttgagtaaattttactagtttttgttttctatgaatttgtctatttcatccaaattttcttaatttttgccataagttgtttgtaatattgccttattttttaaattaatttatttatttaatatttactttacaattctgtattggttttggcatacattgacatgaatccaccacaggtgtacatgctttcccaaacatgaatccccctcccacccccctccccacaacatctctctgggtcatccctggtaccagccccaagcgtgccatatcctgtattggacatagactggcaattcgattcttacatgatattatacatgtttcaatgccattttcccaaatcatctcaccctctccctctcccactgagtccaaaagtccgctatacacatctgtgtcttttttgctgtcctgcatacagggtcatcattgccatctttctaaattccatatatatgtgttagtataccgtattggtgtttttctttctgggttacttcactctgtataatcggctctagtttcatccatctcatcagaactgattcaaatgtattctttttaatggctgagtaatactccattgtgtatatgtaccacagctttcttatgtaatattccttataatactttttatttcggtgaaatcagtgatatccccttttctatttctgattttgaagatttgtgtcttctctcttctttcttggttagcctaggtaaagtttgtctacttttttgatatttatttttaaaaggaaatattaattacgttgattttctttttttccatatttagtaattggataaactcttgagttggaaatatattttaaagttggaaaggcttaagatcttactttctaagctttagaatgtagtacatttcatctaaaactgtctattctctcaaagacatttcattttttcattaccatcctctttgcttcttcccttatagatgtgtatgtatttaaagttctcaggctttctggtacgtgttaatgtttgacagaaaccaacacagtactgtaaagcaattatccttcagttaaaaataaataaaaatttaaaaattcttgatctttaaaaattttctcaggttattccactagccagaaagaaaatccatttccaacaaacttcttttcactagactctgtttctcatttcctcttgctactctgccacccaagtcttcttattttaattatcctctccatagattcagatgctttcaggcagaccataaggtttccatggctgttgcttggaggtcagattactttcattaattttctttgtacatttttttggtttctatttcattggtttctgctctaatctttattatttcatttcttctgttggaatttgatttgatattctctctttgtctcctgcgttcttaaagtggaaccttaggtaagcattttagctacaaattttccccaagcatcatttctctgcatcctttattacctatactcttctttcatttttgtctgttcaaaatatttgctattttttcttataatttattttttaaaagatttgttagcaatttatttgtaatatttccatttgagagatgattccaggtttatttaatttttcttttcattctacataaatcagaacatgattcattagagtcacatattttgcttttatcactgtttgcaaatcttcacttagatgatcttgacaagtctataaaacaatcaaagtagattgttcttcaaaataggcaagagaagcaaagttgatgttagtgctttttgggaggtatttaaatatggtattcttgtttgacatatgggttattgagaagtatatttttaaagttataaatatttgagggttgtgtatatttctttctttttttaatttttaatttagtccaattgtcatagaacatattttgtgtatatcagtccttgtaattttattgagtcttgttttatagtcttgcattttgtcttttctggagaatactgtacttgggcctgaaaagtatgtgtattctgcttttgtttggtggagaattctacaaatatcagatacatcatgcttgtcaatagttttgtttaagttttatacatttcctatattctatgtaatttatatcaattgttgatagtggggtattgaagtcctcacctatcactgttgaattgtatattttcttttcacatgtattagtttttgtttcatatgtcttgaagatctgttgttaggcacatgtattttgtaattattataacattcatgtgaatagaactttcatcattattatatctccctcttttttttttttagtatatttttttgttagaatcttttttgactggtattgatatggccacttcagctctcatttattgttgtttgcaggggctaccattaaaaaaaattcagtctgacaatttctttttgattgaaaagtttgtttatatgtaataaaattactcatatggttgaatttatctgtcattttgttatttgattttgctatgttttgtttcttttgtacctctctcttctcctttactgctttctttgtgctaaacaaatatgtaactgtaaaccatttaaattctctttcattttgttttttacaccatattttaaaattattatattattatgagttaaactatgcatcaatttaaatttagtttttattttatattgaagtatatttgtttacaatgttgtgttaatcttggatgtatagcaaagtggttcagttatacatgtacatttatccattcttttccagattatttcctatgtaggttgttgcagaataatgagtagacttccctatgctatacagtaggtccttttcatttcattgatcttttttttattgttttctttatctctatttcatttgtttctgctttgattgttatgatttctttcctaccagtacctgagttttgtttgttcttctttctctagttgctttaggtgtaaggttgtgctgtgctgtgcttagtcactcagtcttgtctgactctttgcaactgcatgaactatagcttgccaagttcctcatcctggggatttttcatgcaagaatactgaaatgggttgccatttcctccttcaggggatcttcctgacccaggaatccaacctgtgtctcctgtgtcttctgtattgcaggaagattctttacccactgagccatcgaggaggcccctccatgtatgatgtaaggtgtaaagttaggttgtttatttgagatatttcttgttgtgttaggtaagattgtattgctataaaattctctcttggaactgcttttgttgtgtaccataagtttcggattttgtgttttcatttgcatttttttctaggtatattttgatttcctcagtgatccattagttgttatactaaagtagcatattgttcagcctccacatacttgtgttttttgtagttttttaaatgtgtgtgtatgtaaataatttttaatctcgtagcattgtggttggaaaagatgcttgatatgatttcaattttcttaaatttaccacagcctcctttgtggcctagcatgtgatctatcctgaaaaatgttccatgtgctcttgagaagaatgtgtattctgctgcctcatatgttctacaaatatcaattaagtccatgtggtctaattatttttcagtttgtgaattgctcacccagtgggtatgggattttattacatcatgaggtgccccctcctacaatcccgatgtggtttcctgtttgtctttggatgttgaatatattttttggcaggttcaagtcttttccatcaatggttgttcagcagtaagttgtgatttcagtattttcatgagaagaggtgaactcaagtccttctgctccactgtattgactccctatgcatcttaatttattacagtttacttcaggttaacagtgacttgcttccaataaaatatagacatctttttgcagtacagctccagtttttccttcctccattgtgcttctattgtcacatatattatatctttaggttatatgcctaacatatagttttaccatccttattgttttgtgatatgcattttaaataaaaaaagaaaagaaaatatattcttatagtcttttaaaaatatatatattattaaagtatagttgacttaaaatgtttcaaggtgattcagttatacaaatacacatatactattttagaaattattttccatcataagttattataagatattggccatggctccctatgctgtacagtaaatctttgtttcttgttgcatgtctatttttaattagaaatctcacattctatgcctactaagtcaaacaagtggaatcaaaatgtcataatttttttagttaggcaaaaattcataaatgtttaaagtatatgtatatataatacatatatatatgtatacaaaaactttttgctacacttgataaaggcttgagaaaaaacataaagaaagagatgaagaaattggagaacataaactaaatgaaataggagcactgaatatgaaatagaaaaagtgaaacaaactagataaaagtaaaaggtcttcatattacccagttgtttttaaacatgagcactcattagaaacatatctggagctctggagaaaaaaagcaatacctgagcattgatatttttcaaaaaattccaagataattctgatatgcatctagatttttaaaagtgattacaggttttcccattaaatcctagttttggtgatacagagttctattctttttctgttgaccaatcatgatacaatggtattaagtgagtaattgttacataatcacaagaggaaaagatgtttatcagttttcacaatcagttaccagacaaaaaataaaaaaaataattataattttgagccataatgggaatgtgattaacttaacaatataaaataattacatacaactctgggggatgtcaagcagaatgatgtggtaagtggaagtgcatacatgcgcatagtttcatccacccagccagtgtatgtcttttggttggtgcatttaatccatttacattcaaggtaattatcagtatatatgatcctattactgttttcttaattgtttggggttgattttctgtaggccttttccttctcttgtgtttcttgcctagaggagttcctttagcatttgttgtaaggctggtttggtggtgctgaattctcttaacttttgcttatctggagagcttttgatttctctataaagtccgaaggagagtcttgctgggtaaagtattcgtggttgtaggttctttccattcagcactttaaatatatcatgccattcccttctggcttgtagagtttctgttaaaaaatcagctgatatcttgatgggaattcccttgtatgttatttgtcatttttcccttgttgcttttaatattttacctgtctttaatttttgttaatttgattactatgtgttttgctgtattccttcttgggtttatcctgcctgggactctgtgcttgctgtacttggttgactatttcatttcccatgttctggaattttcaactattatctcttcaaatattttctcaggtcctttatctctctcttctacttctgggacctctataatgcaaacgctggtgtgtttaatgtaatcccagaggtctctagggctgtcttcatttcttttcattcttttttctgtattgtgttttgtggcagtgatttccaccattctttcctccaggtcatttattcattattctgcctcagttattctgttattcattccttctagtgtgttattcttctctgtttgtttgttctttagttcttgtaggtctttggtaaacatttcttgcctcttctcaatctttacctccattcttttcccaagatcctggatcatcactatcaatattatgaattatttttctggaaggttgcctatctccactttgtttagttgtttttctgggattttatcttatcctttcatttgggacataactttctgcttttacataatggttaactttctgtaatattgtttttgttttagccagtgtgagactgtgcttcttcttgcttcttctgtctgtcctttgatggatgaaactaagaagattgtgtaagcttcttgatagaagggactgatgtgggaaaaactgagtcttgctctggtgggcagggccttgctcattaaagctttaatccaattatctgctgataagtggtgttgcactccctccctggcagttgtttggtctgaggcgacccagtcctggtgtctatgggctctatgatagggttaatggccaattccaagagggtttacactaagggggaccttctagttccctcgtccctgtggtgagcgcctgccaacccatgtctccacaggcagccttccaacactagcaggtagttttggttcaatcttctgtgtggtcactgctcctctcctctgggtcttggtgcacacaaaattttgtttgtgctttccaagattcgtgtctctgtttccctcagtcttctggaaggcctgtaatcataccctgctgaccctcaaggccagactccctggggattcagtccctttgtcaaatcccccaggctgggaagcctgagatggggttcagaaccttcacaatagagtgagaacttctttggtattattgttctccactctgtgggtcacccacctggtgggtataggatttgatttgatcatgattgtacccctctttgggcttctcttgtggctcagctggtaaagaatctgtctgcaattgggagacctgggtttgattcctgggttgggaagatcccctggagaagggaaaggctacctactccagtattctggcctggataattccatggactgtatagtccatgggatcacaaagagttggacatgactgagacacctttcactttaccttctcattgaggtttcctctttgtctttaggtgtgagatatctttttttgatgggttccagcatcctcctgtcaatagttgttcaacagctagttgcaagtttgattcttttgcaggaggagatgaccacagatccttctactctgccaccttgaaccaaaagactcattcagtatttttatatatctatatatttaccttttccatggttctttattgtttaggatggatttaaattgccatctggtgttggcttgaaggagcagtaaatttagtttttatttgtatgtgaatgcctttcccaccccctgcattattttccaaaaatagttttgatgaatcaatgtggaattcttgggtcttttaacttttgtcttttaacattccaaatctattgtcttgctgccttctggtctccattacttctcatgatgtcagctattcatcatattgttttacccctatacatttagagtcatttttgttgctgtttttgagacctttttgtatttgtctctcaatacagtgactatagtgcatttttaggcttggatctctatgtttattttagttttgttcctttgagttttctttatttcttttaaattagaggataatttcttttcaatattgtgtcagtttctgctgtacaacagtgtgaatcagctataagcatatgtatatctccaccttcttaagcttccttcccatctcctaggtcatcacagagcactaagctgtgtttatggtgttataaaatatcttctcactgtgtagaaatgtctgtttatgtcttccacccatttttaaattgggttgttagtgtttctgatattgtataaactgtatgaactgcctgtatattttggagattaacactttgtcagtttctttatttccaattatttcctatcattcagagggctgtctttttgtcttgcttatgttttccttttctgtgcaaatttttttgtttaattatgtcctgctagtttattttgtttttatttcccttactctaggagatgggtcaaagatgatcttgcttcaatttatggcaaagattggtctggctatgttttcctctaagggctttatagtgtctggtattacatttaggtctttaatatattttgagtttaattttgtgtatggtgttagaaagtgttctaattgcatttttttacatgtagctatccagttttgccagcaccacttattgaagagggccttttttctccattgtgtactctttctttgtcaaagataaggtgaccataagtgatggatttatctcttggctttctgtcttgttccattgacctacattactgtctttgtgacagtaccatactatcttgatgactgttgctttgtagtatagtctgaactcagggaggttgattcctctagttccatttttctttctcagggttgctttgtctatttgggttcttttgtattcccaagaaaactggaattttttttttgtcgtggttttgtgaaaaatgccattggtagtttgatagagattgcattgaatctgtagattgctttgagtagcatagtaatctttacaatatttacatttccaataaaagaacatagtatatatttccatatatttgtgtcatctttgatttctttcttgagtgtcttgtagttttctgcatacaagtcttttatctccttgggtaggtttattcctaggtatttattctttttgctgcaatggtgaatggggttttaaaaagtttcttcctgatttttcattgttagtgtataggaatgcaagggatttctgtgtattaattttgaatactgtgactttaccaggctcactgattagttctagtagtttcctggtggcatctttttcattttctatatattgtatttttatgtcagttctaaacagtgagagttttttttttttccccaatttagggtcctgctatttattttactcctctgattgctgtggttaggacttctagaactatgttgaataatagtggtgagagtggacacctgtgtctagtttctatcttggaggaaatgccatcaaattttcaccatttagaataatatttactgttggtttgttacatatggcctttattttgttggggtaggtttcatttatgcccagtttctacagttttattttaaaattattatcaaaattttgaattttgttaaaagcctttcctacatatattgagtggaaaattctgaaagagatgggagtaccagaccacctgacctgcctcttgagaaacctgtatgcaggtcaggaagcaacagttagaactggacatggaacaacagactggttccaaataggaaaaggagtacatcaaggctatatattgtcaccctgcttatttaacttctatgcagagtacatcatgagaaaccctgggctggaggaagcacaagctggaatcaagattgcctggagaaatatcaataacctcagatatgcagatgacaccacctttatggcagaaaaaaaagaaaaactaaagagcttcttgatgaaagtgaaagaggagagtgaaaaagttggcttaaagctcaacattcagaaaatgaagatcatggcatccggtcccatcacttcatgggaaatagatggggaaacagtggctgactttatttttgggggctccaatataacttcagatggtgattgcagccatgaaattaaaagatgcttgctccttggaaggaaagttatgaccaacttagatagcatattaaaaagcagaggcattactttgtcaacaaaggtctgtctagtcaaggctatagtttttccagtgggtatgtatgaatgtgagagttggactgtaaagaaagctgagcaccaaagaattgatgcctttgaactgtactgttggagaagagtcttgagagtgcaaggagatccaaccagtccatcctaaaggagatcagtcttggctgttcattggtaggactgattttgaagctgaaactccaatacttgtccacctaatgcgaagagctgactcatttgagaagaccctgatgctgggaaagattgggggcagaggagaaggggacgacagaggatgagatgattgggtggcatcactgtttcagtggacatgggtttgggtggactccaggagttggtgatggacagggaggcctggtgtgctgcagttcttggggtcacaaagagtgggacatgactgagtgactgagctgaactgattgagattatcatatttccccccacagtttgttaatagtgtatcatattgatctgtatgtattgatgaactcttgaatcactgggataaacctcaattgatcatgatgtatgattcttttaatattttgttggattttgtttgatattattttttgaggatattttcatatatattcaacactgattttgcattgtacttttctctttttttggttcgtatctttgtctggttttgatatcagggtgatggtggccttgtggaactaattttgaagtattcctcccttggacatcttttggaagagttggagaaggaaaggtgttagctcttctctaaatgtttgattgaattcgcctattaagcaatcaagtcgtaggatattgtttgctacgaaatttttcctctgtttcaatttcactgtttttgattggaccattaatattttgtatttgttcctggttcagtcctggaaggctgtatttttcttagaatttgtgcatttcttctaggctgtccattttattggcatatatttgcttatagtagtctcttatgatcctttgtatttctgcagtgtcagttgtacgttctttttcatttataattttatcaatttgaattctttcccttttttgtttgatgaatctgggtaatggttttatcaatgttgtttatcttctcaaggaacaagctggttttttttttcagattttattttatttatttatttactttaaaatattgtattggtttttgccatacatcaacatgaatctgccatgagtgtacacgtgttcccaatcctgaacccccttcccacctccctccccataccatccctctgggtcatcccagtgcaccagccccaagcattctgtatcctccatcaaatctagactggtgattcgtttcttatatgatattatacatgtttcaatgccattctcccaaatcatcccactctctccctcttccacagagtccaaaatactgttttagtcatctttactgttgttttcttcacttctttctaaaaaatttatttctgttctgatctttgcaattcttttccttccactaactttttgttgttgttgttattcttttctaattgctttaggtgtagggttaagttgtttatttgagatttttcttgtttcttgaagtaggattatattactataaactttcctgttagaattgcttttgttgccttaccattggcttctagtcattacattttccactctcatttgtttctcagttcagttcagtcgctcagtcgtgtccgactttttgtgaccccatgaattgcagcattccaggcctccctgtccatcaccatctctcggagttcactcagactcacgtccatcgagtccgtgatgccatccagccatctcatcctcggtcgtccccttctcctcctgcccccaatccctcccagcatcagagtcttttcctatgagtcaactcttctcatgaggtggccaaagtactggagcttcaactttagtatcatcattccttccaaagaaatcccagggttgatctccttcagaatggactggttggatctccttgcagtccaagggactctcaagagtcttctccaacaccacagtgcaaaagcatcaattcttcagtgctcagccttcttcacagtccaactctcacatccatacatgactacaggaaaaaccatagccttgactagacggaccttagtcagcaatgtaatgtctctgcttttgaatatactatctaggttggttataacttttcttctaaggagtaagcgtcttttaatttcacagctgcagtcaccatctgcagtgattttggagcccagaaaaataaagtctgacactgtttctactgtttccccatctatttcccatgaagtgatgggactggatgccatgatcttcgttttctgaatgttgagctttaagccaactttttcactctcctctttcactttcatcaagagactttttagttcctcttcactttctgccataagggtggtgtcatctgcatatctgaggttattcatatttctcctggcagcatagcggttaggcaggcaggcaggctagggtctggaggtcgagttcaaatcacatttgtttctaggtacttttaaaaatttcctgtttgatttcttcagtgatatttttattacctagtagcgtattgtagagcctccatgtgtctgtattttaacgttttttccctttgtaattcatatgtaatttcatagtgtcatgatcagagaagatgcttaatatatttaattttcttaatttagttagtcttgatttgtgacccaagatatgatttaccctaccacatgttcagtgtgcacctgagaagaaagtgtattctgttggtttgatggaatgtcctataagtatcaattaagtctgtctgcactgttatttcatttaggacttgtatttcctttttagttttctgtctggatcatctatccattggtgtaagtgggttgttaaagttccccattattgtgttattgtccatttctccttttatggctgttagaatttgccttatgtattgaggtgttcctatgttgtatgcataaatatttgtaactgatatatatttttggattgatcttgttatggttatatatttttcttccttattttttatgtctttattttaaagtttatattgtctgatatggttattgctactccagctttgttttcatttccatttgcatggaaatatcttttttcatcccctcactttcagtctgtatgtgtccgtaggtctgaagtgggtctcttgtagggatcatatatacaagtcttctttttgtatccattcagccaatatctgtcttttggttgcagtattaaggtaattattgatatggatattcctattaccattttcttaaatgtttttggtttgtttttgtaaggtctttttcttctcttgtgttcccggcctggagaagtttctttagcatttgttgtaaagctcttttggtggtgctggattctcatgtttttcttgtctgtaaaacttttgatttcttcatcaaatatgaatgagagcctttctcattagtataatcttggttgaaggttttttcctttcatcactttaagtacattctgcaactcccttctgacctacagattttctgctgagagatcaactttcaatgttatgggattcccattgttgcttttcccttgtagcttttaacattttttgtttgtgtttaacttttgttagtttgactaatatgtatctgggtgaatttctctttggatttatcctgtatgaaactctctgtgggtcctggagttgattgactgtttcctcttccatgttagggaagttttcaactatataatctcttcatatattctttcagactctttctatttttcttctgctgggagccctataatttgaatgttgggtgtttaatgttgcccaagaggtcgtgatagtttgctcaattcttttaattttttattctgagcatttatttccaacattctatcttccagctcacttatccaattactgcctcagttattctgctactgattacttctcatgtatttttaatgtcagttattgtggtgttcatcactgtttgttctttagttcttctaggtccatgttaaattttttctaatattttctccatactatattcaatattttagatcattttttactattattattctgaatttttaaggtatattgctgattttctcttcatttatttggtcttttgggattttgcattgctcctttatctgcaatgtatttctgcatcttctcattttgtttaacttactgcatttattgtctttgttccacagcctgcaagtttgtagttgttcttgtttctggtgtcttctccttgtaaatgaggttggtcccattgcttgtgtagtcttcctggttgggggattggtgcatggattggcaggggcacatcaggtggtgtgtttcaaggtatctgtgaccttagtatgactttaggcatcctgtttgctaattagtggtgctgtgttcctgtctttgtggttgcttggtatgaggtttccagcactggagccttctgaccattgagtgtagctgtgtcttagtgttgacatggaaacctctggaagagctgttgccaattaatattccctgtggcttggactgtttttggtgtttcttggccctggacttggcggtcacacctcagaatctcagggttgattcatggctaaagaaactagatcttaccagccgcatgacatggaggaaaaagaagacaataattacaaaaaaagaaaagaaaatgaacaaatactccaacaagcggtaaaagcaaaaccagacaaaaataggcaaagcaacacacacacagggaaggaaaaaaagaagtgagaacaaaaagaggagggcaaccaaataaaaaaacctcaaacccaaaccaaacaatataaaccaaactaagaaaatgaacacaaagcataaaaaattcttactaaaaagtaaaagaaaagaaaaacagatgaaaagaaagaaggaaacaaaaggaaaaagcacaagacaactcccccccaaaaggaaaaatataaaaaatatagactgtagtttaaaatggagataaaaacagaacatggataaagcaaaaataagaaaaaactacaatataacaaaaaagttaagtaaaaaatattagaaatataagcataaaaaagaaaagataaaaattagaagaataatagaacaacttgaaacaagaatagcagtaaaaataatgataatattgacctcatctgtccatttacttgcccccacagtgaacaataggcaatctctacttcttcaggaagtcttccaatacctacctctaggtaaggctctggacctgttgtgtgtactgttggaccaactcaaactctgacctggtagaatacccatgtgtacttgcccttgaagcccacagttcttaatgttagactgcctcaaattgtgggtacactcattttctattcagatattctacatatgcagtgtttaccaagccaattgtgggatttaatctgttgcttctgtggctgcatggagagaattccattttttttttcctttggttgtaccgcccctggagctcaaaagcatgatttcagtatatttagtcactgtggccagggggaaggatgaatatgacagccataattgggatgtgcagggagtgcttgtagctgtagagactggcaggaagttgtaacagcctgtggcatgctgtatgctcttccagggaagttgttcccagaccaatggaccctcaacagtggcagactgagcaggctgctgggaaggtataggcactgtactgtgcttgctcacatgactcttggaggcagcagtggccacagtaggtctgcacctgcctaggggatccaagataggagcagcagcttgcacccacccctggagctcatgtagtgctctgatgcctgtgagtgcatggtgaaagaatctccttatggcggcccatgcctctcctcatgtacaccatgcacaccacaacaatggtccctggcctctctggtgggtccagacttcatcccttggctgtggcacattatgccctagccttctcaggctgtcttcatgaagccaaccctagtcctctccatggtgtctgacctctgaaggctgagcctccattctcagcccccaattaccccaccagccaaccataagcaggcaaacatttcaggctgggcagtgctgatgcactgtccttctgtgtgggactctctctgcttagccttccacatttctgttgcacccttttctgagacactgatgttcttttcccaatctctgccgtgatgtcttctgccattctttagtagatgtactgttggagtcattccacatttaaaggaattttttatatctctgtgtggagaaggtgagcttcacatcttagtcctctgacatcttgaacatctcccaaggttttcttatctgtagattaattttttttaaatcaagcgaatatttggataattttttattaacatcgcttcaattacatttttgttccttcttttttttttcctttcaagtatagtattcatttctctttctgatattcccatgttagttcgattgtagacgtaccacagttctttgacatattcttcatatttttttcactttttttctttctgtcttcagactggataatttctattgatacatttattttcagtgagtttttatatcatctcaaatacatcattgacttcctttggtaaagttttcatttcactcatatttttcagttctggaatttctattttattctcttcaatataatttttatctctttatgatagggctttctgatagctcagttggtaaagaatctacctccaatggaggagaccccagttcgattcctgggttgggaagatcccctggagaagagataggctacccactccagtattcttgcatggaaaatcccatggatgaaggagccttgtgggctacagtccacagggtcgcaaaaagtcagacacgactgagcgacttcatttcacttcacccactccagtattcttgggcatcccttgtggctcagctggtaaagaatccgcctgcagtgggggagacctgggtttgatccctgggatgggaagatgccctggagaagggaaaggctacccactccagtattctggcctagagaattccacggactgtatagcccatggggtcacaaagagttggacatgactgagtgactttcactttcatgatattttctagatatgtatcattgccatgatttaaaaattctttaaatatgatttactttagttctctgaactcacttaaaattctactttgaagtctttctaagtccaacatctatgcccacttcacaggcagtttctatttactgttttttcccccctaggatgtgaatcatacttcttgtttatgttactgaaaactggaaattttaggtaatatattttagcaactctggttactgatttatccccctcaggagttgttgattttatttacatgaaaccattataaatgtcctttgtctctagaaacaattttcatcttaatttttctaaaattagcctagccatgccagctctttagtttatgttttgtataatatatgtttttccatctttttcatgcaacatatttgagtatttaaatctaaaatgaattgcttgtagatagcatatagttggatcacattaaaaattctaccactatctgtttcttatttggtgtgtttattccacttatatttaatataaatattgaaaaggtagtgtttattataccatgtttctatttttatatatatttttgactatctattttcttgctctctttgttaaggtgtttgcctttattaccaaacatagctgttagacttcactaattcctaaattattgctctattttttttttttttacaatactctggaaagtgaaagaggagagttaaaacattggcttaaaactcaacattcagaaaactaagatcataacatctggtcccataattttatggtaaaatgatggggaaacaatggaaacagtgagagactttatcttttgggactgcaaaatcactgcagatggtgattgcagccgtgaaattagaagatgcttgctccttggaagaaaagttatgaccaacctagatagcatattaaaaagcagagacattgctttgccaacaaaggtccgtctagtcaaagctatgtttttttttcagtagtcatatatgggtgtgaggttggactataaagaaagctgagcaccgaagaattgatgcttttgaactgtggtgttgaagaagactcttgagagtcccttggactgcaaagagatccaacccgtcaatcctaaaggaaatcagtcctgaatattcattggaaggactgatgctgaagctgaaactacaatactttggccacctgatgagaagaactgactcattggaaaaggccctgatgatggggaagattgaagacaggaggagaaggggctgacagaggatgagatggtttgatggcatcatcagctcggtggacatgagtttgagcaagcttcaggagttggtgatggacagggaagccttgcatgctgcagtccatgggatcacaaagagttggacacagctgagcaactgaactgaactgaactgaactggatcataaatttctatagagtttggttcagttaaatttgtttccttcttcaggggtagtttctgagtctggtctttgaggtttgttctgaccacagaaggattctctaggctgattctttccttgtttccctctggtaaactaactggcctacagctgatcttactgcttttctggagctatcagcctcctcttacatgcttaacattacatctacattgtttctacattgttttgaacttcccaaaactaaagacagttcatttggagacagtttcagagctctcttttcttgtgtcctgcctttctcttgagaaaacctctgaggcactgctaaatagctaggggtcctctttctcttgaagtgaaaactcgctttataatctggggactagtggagacagtaatcttttaggtttgcctctcttggtgtggaacttcttacaccttctcttggtgtggagcagaggtgagggcagagtcccagtgtttttattctgatgcacctcaaaacttctaccccataaatgggggctgtgtggagaatgagaacccctgatttcttggcaaaactatcctagaaattaggctctgcaatacagtactgcggagacaaagaatggtggtaaggtagccttctcttcccagggagctatagttcttgactgtgatttgagagaaaagaagccctctgttcttgaacatacacagacaatttgttacatcgagtacaacatggaagtgggttatagttcaagtgtcattgattcttgttcttaccaaattatcttgaacaaatgtctctttactggctacatatcataaagaaaatttcagagactttcacaaatgcttttttctctacttatgccccctccccacccctcgccccagagagtctgcctgcagagttcctcatctggccattccaaggttaagctcccccaacattccttcctaattcatttatttaggtgcatcaggtcttggatgcaaaatgtgaagtttgctgtggcatatgggcttttcactgaagtacataggcttctctagttggagtctatggtcttctttctagttgtggcatgcaggcttctctctagttgtggtgcatgagctatacagtgtgtgggctcagtagttacagcatgtgacttagtgcccagtggcgtgtgtgatcttagttccatgaccagggagcaaacctgcatcttctgcattagaaggtggattctttttttttttttctcaaaattaatcagctttaataatcagggtggcaataaatgaacagtagaacatatttgattaacatgttctgatttcttgcatttccaacagccctagattaacaagtactaaaggcacaaatcctagcattcgttttgtatctttttttttaaaatttatttatttatttatttttaacttttactttacaattctgtattggttttggcatagattgacatgaatccaccacaggtgtacatgcattcccaaacatgaacccccctcccacccccctccccacaacatctctctgggtcatccccgcgcgtcagccccaagcgtgtcatatcctgcatcagacatagactggcatttcgattcttacatgatattatacatgtttcaatgccattctcccaaatcatcacaccctctccctctccctctgagtccaaaagtccgctatacacatctgtgtctcttttgctgtcctgtatatagggtcatcattgccatcttcctaaattccatatatatgtgttagtaaactgtattggtgtttttctttctggctcacttcactctgtataatcggctccagtttcatccatctcatcagaactgattcaaatgtattctttttaatggctgagtaatactccattgtgtatatgtaccacagctttcttatccattcatctactgatggacatctaggttgtttccatgtcctggctattataaacagtgctgcaatgaacatttgggtacatgtgtctctttcaattctggtttcctctgtgtgtacgcccaacagtgggattgctgggtcataaggcatttctatttgcaattttttaaggaatctccacactgttctccatagtggctgtactagtttgcattcccaccaacagtgtaggagggttcccttctctccacaccctctccagcatttattgcttgcagatttttggatcgcagccattctgactggtgtgaagtggtacctcattgtggttttgatttgcatttctctaataatgagtgatgttgagcatcttttcatgtgtttgttagccatccgtatgtcttctttggagaaatgtctatttagttctttggcccattttttgattgggtcgtttatttttctggaattgagctgcaggagttgcttgtatatttttgagattagttgtttgtcagttgcttcatttgctgttattttctcccattcggaaggctgtcttttcactttgcttatgttttcctttgttgtgcagaagcttttaattttaattagatcccatttgtttatttttgcttttatttccagaattctgggaggtggatcatagaggatcctgctgtggtttatgtcggagagtgttttgcctatgttctcctctaagagttttatagtttctggtcttacatttagatctttaatccattttgagtttatctttgtgtgcggtgttagaaagtgatctagtttcattcttttacaagtggttgaccagttttcccagcaccacttgttaaagagattgtctttactccattgtatattcttgcctcctttgtcaaagataaggtgtccatatgtatgcggatttatctctgggctttctattttgttccattgatctatatgtctgtctttgtgccaataccatactgtcttgatgactgtggctttgtagtagagcctgaagtcaggcaaattgattcctccagttccattcttctttctcaagattgctttggctattcgtggttttttgtatttccatacaaatcttgaaattatttgttctagttctgtgaaaaatatcgctggaagcttgatagggattgcattgaatttgtaaattgctttgggtaatatactcattttcactatattgattcttccgatccatgagcatggtaaatttctccatctattagtgtcctctttgatttctttcatcagtgttttatagttttctgtatataggtctttagtttctttaggtagatatattcctaagtattttattctttttgttgcaatggtgaatggaattgtttccttaatttcttcttctactttctcattattagtgtataggaatgcaagggatttctgtctgttgattttatatcctgcaactttactatattcattaattagctctagtaattttctggtagagtctttagtgttttctatgtagaggatcatgtcatctgcaaacagtgagagttttacttcttcttttccaatttggattccttttatttctttttctgctctgattgctgtggccaaaacttccagaactatgttgaatagtagtggtgaaagtgggcacccttgtcttgttcctgacttaaggggaaatgctttcaatttttcaccattgaggataatgtttgctgtgggtttgtcatatatagcttttattatgttgaggtatgttccttctattcctgctttctggagagtttttatcataaatggatgttgaattttgtcaaaggccttctctgcatctattgagataatcatatggtttttatttttcaatttgttaatgtggtgaattacattgattgatttgcggatgttgaagaatccttgcatccctgggataaagcccacttggtcatggtgtatgatctttttaatgtgttgttggattctgattgctagaattttgttgaggatttttgcatctatgttcatcagtgatattggcctgtagttttctttttttgtagtatctttgtcaggttttggtattagggtgatggtggcctcatagaatgagtttggaagtttcccttcctctgcaattttctggaagagtttgagtaggataggtgttaactcttctcgaaatttttggtagaattcagctgtgaagccgtctggacctgggcttttgtttgctggaagatttctgattacagtttcaatttctgtgcttgtgatgggtctgttaagattgtctatttcttcctggtttagttttggaaaattgtatttttctaagaatttgtccatttcttccaggttgtccattttattggcatataattgctgatagtagtctcttatgatcctttgtatttctgtgttgtctgttgtgatctctccattttcatttctaattttattgatttgatttttctctctttgcttcttgatgagtctggctaatggtctgtcaattttatttatcctttcaaagaaccagcttttggctttgttgatttttgctatggtctcttttgtttcttttgcatttatttctgccctaatttttaagatttctttccttctgctaactctggggttctctaattcttccttttctagttgctttaggtgtagagttaggttatttatttgacttttttcttgtttcttgaggtatgcctgtattgctatgaactttcctcttagcactgcttttatagtgtcccacaggttttgggttgttgtgttttcattttcattagtttctatgcatattttgatttcttttttgatttcttctgtgatttgttggttattcagaagcgtgttgttcagcctccatatgttggaatttttaataggtttcctcctgtaattgagatctaaccttagtgcattatggtcagaaaagatgcttggaatgatttcgatttttttgaatttatcaaggttattagaaggtggattcttaactactggaccaccaagaaagtaccaccacattccttttttgttgcttctttatctcaagtcaatgattgatgatatccaaagctagtaatagctccaaaacactatgaattatattaggaactgagtttttcttgaggattaattcattgtttatttatctcactctgacaaaacaaagtggtctttagcaaaataaagccaattaacacggtctttaaaactgacctgaaatgttccacaagtatggtgatgtttgtaacatttgtttcctgtatgtttggatacattagctgggcaacattgcctggtattccttatattttcctattacttccttgaggccagagtaataattataatacatagggaactcccaatttggtaaaatactcagcatgtattctaggaactgatggaaactgcagaaccacacccgctgatagcctacacccatgctgattctattaggaccatgcgtgcgttaccttacttccctatactttggacctcttcacataattgtgggtatgagagtaataatgattccttgaaaagagctatacagtatttgtcaccttggatatttatttttttgtagagcatttggacttttaaatcatttaattttatcttgtatatttttaacatttttaattgggggctaattactttacaatactgtggtggtttttgccatacattcacatgaatcagccatgggtgtacatgtgttccccatcttgaacccctcataccacttccctccccattccatccctcagggtcatcccagtgcaccaccctgagcaccctgtatcatacattgaaactggacgggtgatctttttcacatatgataatatacatgtttcaatgctattctctcaaatcatcccacccttgccttctcccacagagtccaacagtctgttctttatatctgtgtctcttttgctttcttgcatatagggtcatcattaccatctttctaaattcgatatatatacattaatatactctattgatgtttttatttctggcttacttcactctatataataggctccaatttcatccacctcattagaactgattcaaatgcaagtttttaatagctgagtaatattctattgagtatatgtaccacagctttcttaaccattcacctgcggatgaacattgaggttgcttccatgtcctggctattgtaaacacgtgtctctttcaattctggtttcctcactgtgtatgcccagcagtgagattgttgggtggtacagcagttctatttccagtttttataggaatctccacactgttttccattgtgactatacttgtttgcattcccaacaacagtgtaagagggttcctttttctctgcaccctctccagcatttattttattattattattattttaaatagttaaattttttgtagactttttgatagcagccattctggctggtgtgagatggtacctcattgtggttttgaattgcatttctctgctaatgagtgatgttgagcatcttttcatgtgtttgttagctatctgtatgtcttctttggagaaatgtctgtttaggtctttggcccatttttcgattaggtcacttatttttctggaattgagctgcaggagttgcttgtatatttttgagattaattcttggtcagttgcttcatttgctatcattttctcccattctgaaggctgtctttacaccttgcttatggtttcctttgttttgcaaaagcttctaattttaattaggtcccatttgtttatttttgcttttatttccattactgtgggaggtgggtcatagaggatcctgctatgatttacgtcagagagagttttgcctatgttttcctctaggagttttatagtttctggtcttatgcttagatctttaattcattttgagtttatttttgtgtatggtgttagaaagtgttctagtttcattcttttacaagtggttgaccagttttcccagaaccacttgttaaagagatagtcttttctccattgtatattcttgcctcctttgtcaaagataaggtgtccataggggcatgaatttatccctgggctttctattttgttccactgatctgtatttctgtctttgtgccagtaccacactgtcttgatgactgtagctttgtagtatagtctgaagtcaggcaggttgattcctcctgttccattcttctttctcaagattgcttcggctattccaggttttttgtatttccatacaaattgtgaaattgtttgttctagttctgtgaagaatactgttggtagcttgatagggattgcatagaatctatagattgctttgattcatatactcattttcactatattgactcttccaatccataaacatggtatatttctccatctatttgtgtcctctttgatttctttcaacagtgttttatagttttctatatataggtcttttgtgtctttaggtagctttactcctaagtattttattcttttcatggcaatggtgaacggaattgtttccttaatttctctttctgttttctcattgttagtgtataggaatgcaagggatttctgtgtattaattttatatcctgaaactttactatatccattgattcgctctagtaattttctggtggagtctttaggattttctatgtagagaatcatgtcatgtgcaaagagtgagagttttacttcttcttttccaatctggattccttttatttctttttcttctctgactgctgtggctgaaacttccaaaactatgttgaatagtagtggtgagagtgggcacccttgtcttctttcagactttaggggaaatgctttcaacttttcaacattgaggataatgtttgctgtgggtttatcatatatgacttttattatgttgaggtatgttccttctatgcctcgtttctggagggtttttttttttaaatcataaatggatgttgaattttgtcaaaggctttctctgcgtctattgagatgatcataatatttttatctttcaatatgttaatatgttgtatcagatattatatattgaagaatccatgcatccctgggataaagcccacttgatcatcttgttaatgtgttgttagattatgtttgctagaggtttgttgaggatttttgcatcttagctcatcagtgatattggcctgtagttttctgttttttgtggtatatttgtcaggttttggtattagggtcatggtgggctcatagagtgagtttggaagtttaacttcctctgcaattttctggaagagtttgagtaagatagatgttagctctgctctaaatttttgatagaattcagctctgaagccatctggtcctgggcttttgattgttggaagattttttattacagtttcaatttctgtgtttttgataggtttgttaagattttctatttcttcctggttcagttttggaaatttacacttttctaagtatttgtccatttcttccaagttgtccactttatttacatatagttgtttacagtagtctcttttgatcttttgtatttctgtgttgtctgttgtgatttgtccattttcatttctaattttgttgatttgactcttctctattttttcttcctgaagagtctggctaatggttgtctatgttatttgtctactcaaagaacctgcttttagctttgttaattttggctatggtcttcttggtttcttttcatttatttctgctctaatttttattatttctttcctctactaaccctgggtctcttcatttcttctttttctagtagccttagatgtagagttaggttatttatctgatttttctcctgtttcttgaggtaggcgtgtagtgctatgaaccttccccttagcactgctttaactgaatcccataggttttgggttgctgtgttttcattttcattcatttctatgcatattttgatttcatttttgatttcttctgtgatttgttggttattcagaagtgtgtttttcagcctccatatgtttgtatttttaatagtttgtttttcctgtagttgacatctaaaggtgcatgatactggatgcttggggctgatgcactgagacgacccagagggatggtacggggagggaggagggaggagggaggggggttcaggatggggaacacgtgtatacctgtggcagattcatgttgatgtatgggaaaaccaatacaatattgtaaagtaattaacctccaattaaaataaatatatttacgtatataataaaaaaagaaaaggcacttgagatgatttaaatcttttgagtttacaaaggccagatttatgccccaggatgtgatctatcctggagaagggtccatgtgcacttgagaaaatggtgaaattcattgttttgttgtaaaatatcctatagatatcaattagatctaacgggtctgttgtatcatttaaagtttgtgtttccttgctaattttctgtttagttgatctatccataggtgtgagtgggttattaaagactaccactattattatgttgctgttaatttcccctttcatatctgttagtattttccttacatattgcagtgctcctatgttgggtgcatatatatttataattgttatatcttcttcttggattgatcctttgattgttatgtagtatccttctttgtctcttttcatggtctttatttcaaagtctattttgtctgatatgagtattgctactcctgctttcttttggtctccatttgcagaaaatatcattttctagcccttcactttcattctgtatgtgtcccttgttttgaggtaggtcttttgtaaacagcatatatgggaatcttgtttttgtatccattcagccagtctttgtcttttggttaggctattcaacctctttatattaaggcaattgttgataagtatgatcccattgctattcatttgttgttttgagttcgagtttataaacattttctgtatttcctgtctagagaagattctttagcatttgttcaagagctggtttggtggttctctctgcttttgtttgtctgtaaagcttttgatttctccttgatatctgaatgagattcttgctgggtacagtaatctgggttgtagatttttctctttcatcacttaaagtgtgtcctgccttctcttcttgcttgaagagtttctattgaaagatctgctgttatccttatgagaatccccttgtgtgttatttttttccccttgctacttttaatatttgttctttgtgtttgatattcattaatttggttaatatgtgtcttggggtgttttgccttgggtttatcatgaatgggactctctgggtttcttggacttgggtggctatctccttccccattttagggaagttttcagctattatctcctcaagtgttttctcatggcttttttttttttttggtcttcttcttctgggattcctatcatttgaatgttggggtgtttaacatcgtcccagaggtgtctgaggttgtcctcatttcttttaattctgttttcgtttttcctctctgcttcatttatttccaccattctaccttccacctcacctatcttatcttctgcttcagttattctactgttggttccctccagagtgcttttgatctcagttattgcagtattcattattgattgactcttttttatttcttctaggtccttgttaaactttttttgcatcctctcaatccttgtctccagactgtatctgtaactccattttgttttcaagattttatatcacttttactatcattattctgaattatttttcaggtagattccctatctcctcctcttttgtttggcttggcaggcttttatcacgttcctttacctgctgatatttatctgccttttcatattgtttagattgctgtgtttagggtggcctttctgtatactggaagtttgtggttcctctttattgtggcgtttcctccctgttgagggggtgttgaaggagtggcttctcaaggtttcctggttaaggaagcttatgtaagtgttctggtggttgaagctggatctcttctctctggaatgcaatgaagtgtccattagtgagttttgagatgtctgtgggtttgttgtgacttttggccgcctatattttaatgctttgggttatgttcctgcattgttggaaaattagcttggtatatcttgctctgaaatttgttggctcttgggtggagcttggtttcagggtaggtatggaggcttttggatgccctcttgtcaatttaatgttccctggggtcaagagttttctggtattctcaagttttgaatttaagcctcctgtctctgggtttctgtcttattcttacagtaacctcaagacttctcagtccatacagtaccaatgataaaacatctaggttaatggtgtaaagcttctccacagtgagggacactcaaagaggttcagagagttacatggagaaaagaagagggaggagggagatagaggtgaccaggagaagagggggaattaaaaggggagagagaaatctcgccattaagcaattccttatttgctctccacagtttggagccctcagagaggttcactgagttccatagagaagagaagagggaggaaagagataaagtcaaccaggagaagaggaggggaatcaaaaggagagagaccaatctagctagttatcagttccctaagtgttctccacagcctggaacacccaaagagattcagagttaagtagagaagggaagggcgagggaggagatagcagtgacctggtggagaaaaaggagagacaaaaggggagagagcaatcaaccaagtaatcacagtcttaagtaaaaatgggtactgaagattggatttttaaaggtacaaaattgataacaaatatcaaaagcaaagatgaaaaactagactagaggttagactctcaaaaatacaatattaaaaaaataaaacaaaatctcaaaaattataaaaaaatatatattaaatttactttacaaatagggtcttttttttggcaaggtaatagcaggttttaaaaatgaaaatttaaggagtaataaagaacttaaaaagtaaaaaaaattaaaaattaaaaaatgataatagtaaagtatatctaggaatatctctggagttgttgagggcagtgtggggtcagttcagtttcagatagttccttgttccagcttatacttcttcttaggtctattgcccccttccagtgtagtcaatgctaactacagggttataatctgttgcacctgtcacttccaaagcggttccctattctttgtttattttggcttcctctgtttgaaggtctcttcagtgtctaatttccacccagacacaagggggcaaaggtggtcatttatttaggctcacttgttcaattgtgctgcggggagggaggaacactgcaaacaaatatcattggtgtgtgtggggagtgcttgcagtgtctgggccacacttttttgcccccactcacagtgtgtgtactttcctggtctacactgctcgggctccaggttgctctgcaggggaactgtctaaagcaggccctgggttgtgtgcacgtcccaggtctaagccactcaggttcaggttcttgggtacttgccaaaggcacagacttggttgggcctgcgctttgtgcccttcccagatccaagcagctcaggagaccaggtgcttggtgagtgcacactccctaggtggggcggtgcatcttatcactgcccccgtcccagcctctcagtttcctgggtgcacagggggagcaccgtctcaggtgtgctgtgtgtctcctctggggagctgatctctggctgtgaccctcctggtggatgtcaaccgtccaggaccccaggaagacttggttagcaactgggagcctgctcaaagtttggtggaggatgccctctctgggaccaagtttgccccctgccttctggctctggctgttgactgcctgcctccctgcctctggtgggggatgggccagtccgctaagggctagctctcctctggtatttgctcagtcttttgttctgtgagcgggcctggcagtgcctaggttagagcttttcatgggaaggttttctctctcccacggtttgggttgctatctcacattagctccctcagattgccctcagggcattcaggcctggtcctttccctaagcaatgcagcctgcacctccctgtttagcccctgcttggtggtggcggacctgagcatctgggctacttctttgctgggaggtgtggtttggtgtgtaatctgtttgttttatttatttatcttttcctccttgttatgttgccctctgagattccaaaactcctcacagatccaccagtgagagagtttcctggtgtttggaaacttcttttttacgactccctcccaaggatgggtctctgtccctaactcttttgtctctctttttatcttttatattttgtcctacctcctttcaaagacaatgggctgcctttctgggtgcctagtgtcctctgtcagctttcagaagttgttttgtggtatttgctcagcattcagaccatcttttgatgaatttatgggggagaaagtggtctcccggttctattcctttgccatcttaggaccactctcttcttatatcttctttatagaacattttattctctttgactggttcttgtttcttggatattcaggggagccacactgtgcttcttaaatcagtttccttgagaccaggaaaagctattatgtctgttttttatcattatgttcattgttctgcaggagcatcctagtggtaaaaatcaggtaatttctgaatctgagcactacactgagattctagctgtttatttcataattgttgacttaaaaaacagtcacagcctaaaagttgagtgttttgttttagttggtgagaatttttaggacttcaagcctggaagatagcaattcttggagagaattgctctgaggatgtgaggagagaagccagcttatatagaagctctacaacaataggcaggcagtctgaatatcaaaagattattgctcattaaagaaaaccagatatcccacttaaggaattaagcactttttggtatatatgaagaagcaagagtctagggtcaccaaaataatttctttaatatggatctcaactatcctggggccagtgttctgtgtttttcacatcatgagctcccttgtgtgcaacatagggagtggcttcaatatgatgtctgttagatcacaggtattctccttcctgagtgcccttaggactcaggaactcacattggaggactaaaattactgatgactatgacatccttgtttactgtttgttttttcagttcctaaatcatgtccaattctttgtgatcccctgaactgcagcacgccaggctttcctatccttcactatctcccagagtttgcttagattcatatccaatgagacggtgatgctatctaaccatctcatcccctgctgcctcctttttctgccttaaatctttcccagcatcagggtcttttccagtgagtcagctcttctcatcaggtggccaaagtattggaacttcatcttcagcatcagcccttccaatgagtattcagggtttatttcctttaggattgactggtttgatctccttgcagtctaaggggctctcaagagtcttgtccagcaccataatttgaagacgtcaattacttggcactcagccttctttatggtccaactctgagatccatacaggattgacagaattatagcattgactatatggagctttgctgacaaagtgatgtctctgctttttaatttgatgtctagcatattatcataatttttcctccaaggagcacatgtcttttaatttctggctgcagtcaccatctgcagtgattttggagccaagaaattaatatctgtcactgtttccactttttctccatctatttgccatgaagagatgggaccagatgccctgatattagttttctgaatgttgagttttaagccagccttttcactctcctctttcacccttcttaagaggctctttggttcctcttcactttctgtcagtagagtggtatcatctgcatatctgaggttgttgatatttctcctggctatcttgattccagattgtgattcatccagtccagtattttgcatgatgtactctgtatgtaagttaaataaacagagtgacaatatacagccttgttgtacttcttacccaattttgaaccagtaagttcttccatgtaagttctaactgttgctatttaacctgcatgcaggtttttcacaagacagtaatgtggtttgatattcctatttctttaaggaagaaattgttagaaataatgggggatatttaatcaagataaataggatagcctatcaggaacatataacagagatattcataataaaacattaaaatagttgattcattaaattataaaataatttcacaatcatagaaggttttatgacacttctttgaaaattggtaaaagatctaaacaaataagtcatgaaaaccataggagatatggaaagcattatcagccattttactttaattgccattggtagaactctacatcttactgcatatacacatgataaattactaagattacaaatttcagtctaagaactacatactctgacagcaacaaatttaaatgaataacaaccagagatctggaaaaaccaatattttggaattcacaaagatacttctattcaaatcatgagtcaaagtcaaatctaagggggaaatattttaaaatgaatgtcaatgaaaatgtaacttatcaaaaaattttggatgatgctaaagctctctgagtgggaaacttattgattaaatactcataataggaaaatgaaagatctaattccagctatctaacattccacttttaagaaaatggaggagaaaaaaagagcaaaggaaaaccaaagtaaatgtaaggaaattaaagataaggtcagaatcaacaaattaggaaacaagcagacaatatatagaaaataagttaagccaaacttcgttctaagaatttttacaaattgacaaacttctacctagatagatcaagaaataaaacagcagaaagcaccaatatcgtcagtaataaggagctatcaacataaacactacaaacaataaaagaataataatattactgttaacaactttatgccaataaattccacaacctatgtcaaaggaacatattcttgaagaatatatggtcagaatagatgcttcatgtgatttctattctcttaaattttttgagacttgttttggggtctagcatgtgatctatcctggataatgtctcatgtgcatttgaaaaaatatgtatttgggctactttcaaatggagtgttatatatatatagtatttggtaatatgtcacttaaggccagtgtttcctgattgattttctgtctattgatataagtgggctattaatattccctgttaataatttgtgtctgttaacatttgccttttatatttaggtgtttctatgttgggtgtatctatatttacaattgttatgtcttgttcttggattgagcccatgatctttatgtaatgttcatcttagtcttttattacaatatttgtttaaagtctcttttgtctgatataagtattgctacgtttacacttctattttcaatggagtacttttttctatcctttcactttcagtctgtgtgtgtctttagatctgaagtgaatctcctgtaggcggcatatgtttattggctcttgtttttttttttttaattcattcagccactgtttgtctttttttaaaaatataaatttatttattttaattggaggttaattactttacaatattgtattggttttgccatacatcaacctgaatctgccacaggtatacacgtgttccccatcctgaacccctctccctcctccctccccataccattcctctgagtcatctcagtgcaccagccccaagcatccagtatcatgcattgaacctggaatggcgattcatttcatatatgatattatacatgtttcaatgccattctcccaaatcatcccaccctcaccctctcccacagagtccaaaagactgttctatactaacgcatatatatggaatttagaaagatggtaatggtaaccctgtatgtgagacagcaagagagacacagatgtatagaacagtcttttggacactgtcttcattggagatttagtctatttacatttaaagtactgataggtttgtacttattaccatcgccttaattgttcttgcagtcctttttagttcttttctttcttttttgttcattcctttgtgacttgatgatttagtttcatgcttgaatgcccttctctcttttttgtatgtagccattgtaggtttttgctttgtacttagcatgaggttcataaatatctaactatcaatctgtctaattatctatctgtctatatatgattattttaatttgatgatcttttcaatttgaacattaacattaacatattctcgcctcactcatgctttttacatttgacctcatattttatgcctttcttattttgtgaatcctgtatctacttattgtagacatgaatgatcttattacatcttttaacctttctagtaaatttataagtagtttatgtactacctttgctgtatgtttaccatcaccaatgagagtttttttcctttcataattttcacagttctagttgtgtttttttccacttagagtagtccctttaacatttcctgtgaagccactttggtggtgctaaactcagcttttgcttgtgtataaagctatgtctccttcacatatgagtgatatccttgatgggtaaaatattcttggttattggttttttccttttatcactttgtatatgttgtgccacttccttcttgcctgccgtttctgctaaaaaagtcaacagacagtcttataagaattcctttttatgtaactggttgtttttcccctgctgcttttaagattattttacttttgccattttagttacaatgagtcttcgtgtgaatctcttttgattgatcttgtttgaaactctctgtgattcctggacctggatatctattcttttccctggttagggaagttttcagctcttatgtctttaaatatgtcctctgcccctttctctcttctccttccaggatccttgtaatgcaaatattagtatagttaaactgtcctcattcttttaatattcttttttctgttcaactttgatgatttatactttatcttccagttcactgatccattcctctgtataatctcaactatggttgattccctataatgggattttaaaaaaaattttaattttttgtattcttcagttttgtttgttctttatattttctaatatttttgttaaacttcccactgtgctcattcattcttctcatttatttatcatctttgtgatcattaccttgaactctttattttctatgttttccatttcactgtagtataattgacatgtaacaatagtttccagtgtacaatatattgatttgatatttgtatgtattgtgagagttggactataaagaaagctgagtgttgaagaattgatgcttttgaactgtggtgttttttttttttttttttaaatttatttatttatttatttttaatttttactttacaattctgtattggttttggcatagattgacatgaatccaccacaggtgtacatgcattcccaaacatgaacccccctcccacccccctccccacaaatctctctgggtcatccccgcgcgtcagccccaagcgtgtcatatcctgcatcagacatagactggcatttcgattcttacatgatatgaagaagactcttggagagttccttgaactgcaaggagatccaaccagtcaatactaaaggaaatcagtcctgaatattcattggaaggactgatgttgaagctgaaactttagtactttgggcacgtgatgtgaagaactgactcactggaaaataccgtgatgatgggaaagattgaaggcagggggagaaggggacaacagaggatgagatggttggatggcatcaccgactcaatggacatgagtttgagtaaactccaggagttggtgatggacagggagacctggcatgctgcagtccatggcatcgcaaagagttgggaatgactgagtgactaaactgaactgtgaaatcatcacccactgttcttttaactgttctaccacttccaggataatataatttgaatcataccatatatagcttttcagtttggcttctttcacttagtaatatgcatttaaaatttcttccagagcataaagaatccacctgccaatgtaagagttgcaggtttgattcctgggttgagaatatcccctggaagaggaaatggcaacccactccagtattcttgcctgaaaaatcccatgacagaggagcctgccaggctatagtccatggggtcacaaagagtcagacatgatttgagtaactattcacacatgcacgcatgcatgcttgccatggctcttcatgcttgatttcttttcaacactgaataatattctattgcctgaatgtactgcagttgatttatctatttattgaaggataaatatcttggttgtttccaagtttgggtagttatgaacaaaatgctatatgcatccatgtgctgagttttgttgatggacattatttttcagatcctctgaataagtactaaggagtgtgattactgaatcatatggtaagaatatgtttagttatgtaaggatttgccaaactgtctttcaaagtgtggcatgttgaattctcatcggtaatgtataagaattacaattactccacaatgctagcagcacttggtattggtgttttagattttggccattctaataggcatgtagtggtgtttctgttattttaattttaatttcactgttgtcatatgatgtggcatatatttttatgtttgtttaccatctgtatatcttctttgatgaggtatctgttaataactttggcctattttccaatcaggttgtttgtattcttcaaaaaaaaaaatcggagtagggttgatttacaattttgagttagtttcttctatatagcaaaatgaatcagttatatgtatacatatatacacttgtttttagatactgtttcaatataggtcattacagattatttagtagagttgcctgtgctatccagtaggttcttattagttatctatttaatatattgagctctctattgagtagattgctgctgctactgctgctgctaagtcgcatcagtcatgtccgactctgtgagactccggagacagcagcccaccaggctcccccgtccccaggattctccaggcaagagtactggagggggttgccatttccttctccagtgcatgaaagtgaaaagtgaaagtgaagtcactcagttgtgttcgactcttagcaaccccagggactgcagcctaccaggctcttctgtccatgggattttccaggcaagggtactggagtgggtcgccaggatgtccatttaattcttctgaggttttctcttgttcctttattttgtttagatgagaatgtatttttctgtcttttcattttgcctaattctttctgtttatttctatatattaagtaggtcaaatacatttcctgatcttggtggaatgccttgtgtaggagacatgctacagggcccagcagcagggccctgagctatacgctctagggtccctcaatatagggtgtgttggcccttctgttttgatgagaccaacttctgtgggaatgctggtaggtgggcctggcccctggcctggctgggtaccaggtcttgccttatgtggtggttgctgacctactgatgggtcaatctgggtctgaggatcccctgaactagttctggtgcattggtgagtgagtagggccatgtcctggtacagctaacttcagggctggtggggcctgtatttggtgtctgcctgctagtaggtgggtaagcccccagcactaataggctagaaagatgattcaaaaatggtagttgtgagcaccagtatcctcatggtacaataaacttccaagaatgactcctaccagcatctgtgtcccgagggagagtctaagttatctcctacaatggaaaagctctctaaggtcagcaaatgggtctgactcaggctcttttcaaatgactccttctttactgggactcagagtatgtgagatttcgtatgcactttttacgattggaatctctctttcctatagccctttggctctgctgcatgcaagccccactggacttcaatgccagatgtttggggagatagtcttcctggagcagtatcctgaataggggagccgaatgtgaggcttggactcctcacttcttggggattacttggaggataatcacttctggactcatgattatcctcccatttgtgagttgccatactggggtgtgtgttttactgtgacagtactactgtgctgtgctgtgactgtaccactcttacccatcttgcagttcctttatatctttagttgctgaaaatattttctgttagttgtcaggttgttctcatagatagtttctctgtgaatagttgtaattatggtgtgcccatgggaagaggtgatctcagagtcttcctactccaccatcttagtcatatcccatttatgaacaactaattttaaaaaaaagtgccaaagagttcaatacggaaaggaacatcttttcaacaaatgttgctgaatcaattggatatatgtatgaaaaatgaaaagagtgctacaattaattttatcattttgtagtttcattcctatatctgcttagcagtctctttagagatgctgttttcattgctaaattggtaacttgtgacttctattctttctgtcctcctctttcttcttttctatttattagtctccattagcaggcacactttgttagccatttctctcaattgaatatttttttctattttatcattttcttcttcctttgggttaatttgttgttattttttaccttctgaaaatgaatgcttagctttcttttcatgctttatattttcaaatatgatatttaatgtcataaatttcatttgcatagatttaactacattcttccaagttattatatgtattttgattgtgttttattcattcaaagcttatttttaatttttattttgatttcttaaatcatgctcttttttcttaattagccaatttccctagttaattgtggatatgtcttattgtccttgcagttctatggatgatttatatattttgaggctgtgttactaagtatatagaaatttagaattattaactgttcatgaggggtagaaagttagaaactttcatttttttccctatcctttaatttcaaattttcttaccttatattttaaatatatctttggaagacagcatgtatttgggtataaaacttatatttttagtacagtctgacaatatttagctttttaataatatatttattccattactcttaatgactatattaatacatttgagtttaaatctgctatctttttattagtctgaccttgtatacttttattttcaatctttttttcttctttatctgagttgattaaggattatatagaatttgatttcccattttttggcagttaatattctcttttagtggtttgctaaagaaatgacaacttacattcttatctcatcaaaagacaaatattagctgttacttttacactcttcaactctagtttctttaaacaaaattactctactatatctggtatctatagattctccttcttgcatgtttgtgttatatttaaatctgttttggttatttatcctctcattcatgttacttgactacttgtactcttgactacttgatcttaatctgtggaactcctgagaggctacatttggggtgttctcttgcaggaactgcttgtgtttgcctctactggatgccaggggataattttcagcttgtttcaaggctctcagttcagggtgagaatcattggtttcaacctacaacattgctgctgcccacacttcagtacagtggttttagtgactggttggcctctgtgctaagtcgcttcagttgtatccgactcttggtgaccctatgagctgtagcccaccagggtcctctgtccaaagaattgtcaaccaagaatactagagtgggttgtcatgccttcctcgaggggatcttcttgacccagggatcaaacttgcagctctttacatctactgcatgggcagatgggttctttaccactagtgccacctggaaaaccctgattggcatctagctcaaggcaatttcatccttccttgccattcaaatctgcagctcccagccagctgcactaaacattttattgggaaaggagattctttggaaaacattacattgtcttgctaatccaataaagcctttaaagtgtactttatccaatatctatttatttgactgcagaagggagcttaagacctcttagtcccccatttggaaggaattagtggcactgatttgttgtctaatttcagtggggcagtgatatcagatcattactgaaccagtttttttgcaacctgtcactgaaacggaaggataataatgtttcatattgtgacggatttgcatcatattacacaatcatcttttcactatataaattgatggaggagacaagtgatgtatatagtcttcaactatacataaactttagtttgctgaagtgtaaaatatatattatatatttgtaactttagacttgatagaattaattattacagttatttcattcattattttataaaggaattacttattgactttttgtattctcgtattttgactttattttctcaattagatcagttagtcataaatgaattattagatgacatgttcaggtattctgaagattttcctttattttgtctgacactgttgccacagaccattgtggtaattatatgacaataaatctataaatagatagttgtctttaggcatacattaaggtgtacaccaaatacagtatgtatgtatgtgtatgtatatatagcatgtctatttcatatctagcaaaagttttaatttggcttagacctttaaattttctttcaatcaatagcatataaaaataatttttccattacattcagttttttttccaaattaaaaattttgtttattttagtaaaagttatattactataaatcaatgattattaacaagggacatttttttcctttcttttttttcctttctttaaaattttattttactttattttactttacaatactgtattggtcttgccatacatcaacatgaatccgtcacgggtgtacatgagttcccaatcctggaccccccctcccacgtccctccccatatcatctctctgggtcatcccagcgcaccagccaacaaggggcaattttgtagtgacatttttggcgctgtctggagatgtttaagttgccacactgggtcagagaaggtacaacaggcatcaactggctagagaccaggaatgctgttaaacattcatcaatgaacaggacagatcctgaaacaaagaatgatcttgttcctaacatctctttaggctgatatcaaaaaccatgctctaaataagcttatatttatgatttagttgatatagcaatcttgattgatcactgtgattgaagacccaatattttggctccacagtttttgtatgaagcctaacgaagagctgtacatatggatgggaaagttataaacttatagtcaagctgataatttcagtattttaaattatgcagcatgatgacatcacagtgaaaagcccacaatttgagaggtgctaggtagatatgtcacccctgtgtctggtttcctattggtgtttcctgtccaggatctgtcatggacagcagaggatctcatctttggttgagacaaagctggtggactgagcagaatggctcctgcacttatatctctttcatccaattctttttcctaactttttctgtaaacaattttccgaatctgtctagtattatgaaaagagtcacatgcttcacttaaatagacttttctttaagttataaaaaccatgaattttcttttttgttttctaacactgtgaggtttaaactttaaaaagaaatttgaaatgcaacttactagaaagacattctatatggagagatatttcattaaatacaggtgaacagtactcccagagagcaatcttttttaaaatgttttttatttttttaaagattgtgttgtttttaggaattaatatatgttgagctgaatatatcaatacatttatctgacctacattgttttttaatttttttacatctctgttttttaaaattggaggataatagctttacattattgtgttggattctgccatcaacaattcaaatcaaccattatatatatatatatatatatatatatatatatatatatatatatatattatcccctcactctttagcttccttcccaacatgcccccatccaacttatctagtctgtcacagagagcctggctgagctctgtgttacatagcaacttcccattagctatctatttttacacatggtagtgtatgtatatcaatgctaatttctcaattctttccaccctctctttctcctgctatgtctgcaagtttgttctccatgtctgtctctattcctaccctaaaatagattcatcactaacatttttctagattccatatatatttaatatacaatatttgtgtttctctttctgacttactttattctctataactggttctacattcatccacctcagttcagctgattagcattccttccttttcatggttgagtaatattccattttattctaacacaacttctttatccacttatttgtcaatggacatctaggttgctcacatgtccttggatactgtaaatagtgctgcaacgaacactggggtacatatgtctttttgaattctgattttctcagggtatatgcccattagtgtaattgctgcattatatgtgattccttggtggctcataccctcctggctcagatggtaaagagtctgcctacaatgtgggagacccgagttaaatctctggattgagaggatcccatggaaaaggaaatggcaacccactccaatgttcttgcctggaaaataccatgaatagaggaggctggtgggctacagtccataaggttgcaaagagttggacacgacttcactttcatggtagttttttttttctttatttcctggttctttaagtaatatctattctcttctccattgtggcaacatcacttcccaccaacagtgcatagagttccctccacaacccctccagtatttgtttgtagattttttaatgatggtcattctgaccggtataaggtgatacctcattgtagttttgatttgcatatctctaataatgaacaacacatcttttcaggtatttgttggccatcggtatgtcttcattggagaaaagttttgccccccccccttttttttaggtttgtatgttctgcccatttttcattgagttgtttgtttatctgcataagccacttgtgtattttggagattaatactttatgagttgttttatttgaaaatattttctcaaacgctcagtgttgtcttttcagttttttatattttttttgctgtgaaaaatctttgggcctcatttgtttatttttgcttttatttccattactccaggaggtaggtcaaataggataatgctgcaattaatatcaaagagtgttctgcctatgttttccagtaagagttttagttttatagtttctggccttacatttaagtctttaatacattttgagtttattttttaatatggtcttaggaagtattctaatttcattcttttaccagtagctgttcagttttttttttttttaatttttatttttactttattttactttacaatactgtattggttttgccatacattgacatgaatccaccacgggtgtacatgagttcccaatcctgaaccccccctcccacctcccaccccatatcatctctctggatcatccccatgcaccagccccaagcatcctgtatcctgtatcgaacatagcctggcgatttgtttcttacatgatagtatacatgtttcaatgccattctcccaaatcattccaccctctccctctccctcagagataaatgtataaaaagttcgttttatacatttgtgtctctttttctgtcttgcatacagggttatccttaccatctttctaaattccatatatatgtgttagtatactgtattggtgtttttctttttggcttacttcactctgtataattggctccagtttcatccatctcattagaactgattcaaatgtattctttttgaaggctgagtaatactccattgtgtatatgtaccacagctttcttatccattcatctggtgatggacatctaggttgtttccatgtcctggctatttaaacagtgctgcaatgaacattggggtacatgtgtctctttcaattctggtttcctcagtgtgtatgcccagcagtgggattgctgggtcattaccagcaccatttattgaagaggatgtcttttctccatcatatatagttgcttgtagtagtctcttacgatccttttcatttctgaattatctgttgtaacctctccctttttactgctaattttattgatttgtgttgtcctttttttcttgatgattctgactaatggtttgtcaattttatcttctcaaagaactaggctttagctttattgatctttgttattttttcttcatttatttttcatttatttcacatacatttcatatatttcatttatttttgctctgatctttgatttctttccttccactaactttggattttgttgttgttctttttgtagttgctttaagtgtaaggttgtttatttgattttttcttgttccttgagttaggtttgtatcgctgtgaacttccctcttagcactgcttttgcttcatcccataagttatagattgtcatgttttccttgtcatttgtttatagattattgttttagtttcctgtttgatttcttcagtgacctcttggttagttaggagtgtattgggcagccttcatatgtttatgttcctgttaattgatatttaatctcatagtgttgtggtcataaaaatgcttgatatttcatatatttcatttatttctgctctgatctttgatttctttccttccactaacttttagttttgtttttgttgttgctcttcttcttttttagttgctttaggtgtgatgttatttatttgatcttttcttgttccttgagttaggtttgtattgctatgaacttacctcttagcactgcttttgtttcatcccataagttatagattgtcacgttttacttgtcatttgtttctagatattgttttattttctgtttgatttcttcagtgacctcttggttagttaggagtgtattgagtagccttcatgtgtttgtcttcctgttaattgatacttaatgttacagttttgtggtcagaaaaaatgcttgatatgacttcaattttcttaaatttatgaagagttgatttgtaacccaagatgtgatctatcctggagaatctcccatgtgcacttgagaaaaaagtgtattcttcttcttttgatggaatgtcctgaaaatatcaataggttgatctggtctaatgggtcatttaaggcttacatttccttattaattattcctctggatgatctgaccattaatgtgagtggagtgttgaattctgctactattactgtggtactgttgatttcccttttcataactgttagcatttgccttatgtattgagatgcttctatgttgggtgcacatatatttataataactatatcttcttcctggattgaatccttgatcattatgtagcgttctttgtttcttgtaataatctttaatgtttattttatctgatatgagttatagtactccaattgtcttttgactcccatttgcatgggatatctttttctaggctccctttcagtctgtatgtgtccctagactgaagttaatttcttgtagacagcatatagctagatcttgctttttgtatccattcagccagtctatatctttttgttggagcatttaatccattaacctttaaaggtaactattaatatgtccaatcttattaccatttactttattgttttgggtttgctttcgtaggtctttttcttctcttgtgttctctgcctaaagaagttcctttagcaattgtaaagctggtttggtggtgctgaattttcttaacttttgctaatgtgtacagcttttgatttctccattgaatctgaacaagatccttgctttgtagtgtaatcttagttgtagtttttttttttcctttcatcactttaagtatatcctgtcacttccttctggccaacaaattttcactgaaagatcaggtgttaaccttatgggaattcctttgtatgttgttgcttttcccttgctgcttttgatatttttgtgtgtttgtgctatatgtgccttggtgtgtttctctttgagtttgcctctatgggactctttttggattactagacttgggtggctatttcctttcccatgttagagaagttcttgactatcgtctcctcaagtattttcttatgccctttatttttctcttctttctctgggactcctgtaattcaaatattggtgcacttaaagttgtttcagtgctttctgagactgttgtcatttcttctcatcctttctttttcttttttattctactctgcttcagttatttctaccattctatcttccagctcacttgtctattcttctgcttcagttattctgctattagttttccctagcgtattttttatgtcatttattgtgttgttcattgctgattgttcattatttctaggtccttgttaaacatttcctgtatcttttcaatccgtgcatcaattctatttatctgtgcctccattctgagattttggatcatttttactatcattactctgaattgtttttcaggtagactgcctatttcctcatttgcttggtcttgtggatttttaatttgccccttcatctgctgcaagttctctatcttctcattttgtttaacttattctgtttggggtctcctttccacaggatgtaggattgtagtttctcttacttgtggagtcttccctcagtgggtggggttgggtcagtgccttgaagagattcctggtgggtgaaactggtgcctatgttctgattggtgaagctggatctggtacctctgatgggcagtgatgcatccagtggttttttttttccttctgtaggggaaggggtgtctgtgagcttagtatagttcaggctatactgtttgctaatgggtggggttgtgttcattttttctagttgtttggcctgaggtgtccagcactggaactttctggctgttgggtgtagccaggtcttattgttgggatgaggcctttggaagaactttctctagttaatattccatggggtcaggagtactcttgtggtccaacatcctggattcgggtctctcacctcaaaagttcaggtccaatccattgctggagcaccaaggctccacgaactacttggcacagaagataaagaaaaagaaaaaaaatcaatcaaacaagaaaataacaggtagacagaaccccaagaaatagagcaaaagcaaaactaaacaaaaacacacaaagaaatgcacactcaaactcacaaaaagaagagcaaagaagataaaggaaacaaaaatgaagagagctattgaaccaataaagaaacccataaatgtaaaaaactagaagacaaattagcaaaaacacagcaccaagatgaaatcaaatgtggaaagtaaacttaaaaaaaggcaaagaaagcataaaacatatacaccaatcaagcaaaagcaaaaaaaaaaaaaaaaaaaaacagagaagaaaacaaaagaaaaatacaacaagcaaataaagtaaaaatagtgaaagtgaagttgctcagtcgtgtctgactctttgtgaccccgtggactgtagcccaccaggctcctccttccatgggattctccaggcaagaatattggagtgggttgccatttccttctctaggggatcttcctcctgcattgcaggcagacgctttaacctctgagccaccagggaagcccaaagtaaaaatagagaaatataaaatatagttaaaaataagattaaaaacaaagtaaaacaaaggaaaaaataacaacaaaaaggtgtgataaatgaaaaagtacagtagaaataggggaaaaataaaattaatttatttaaaaataatgtgcaagaaaagaaaaaataaataaaaagtaagaattaaaaaatattaattaaaaatcaacaataaaaaaacaaaaatgaaaaacattacatatatacatagagagagaaagagtggtagtaagaagacaattttcctgtggcttcagctgtcagtttccttgtccccacaatgagctccagccaatctaccttctcaggacgtcctccaatgtttctaagaacgtctctagacctgctgtgggcactgtggggccagctcagattctgatttggccttattctaccttgtacttgcttccaaagtccacagttgcccctgaattccacagcttcaaatatgggaacactcattgtctattgagatattccacaggtgcagagtttaccaagacaattgcaaggatttactccactactcttgtcactgcatgagcaaattcccttcatcttgtttggtcacacagctcctggtgctcagctttgcttttgtcccagttttgtttgtcctactgtttataggccgccctccattgtctgtttcctgtccagacaaaagggggcaaaagcagcagctgaggccgattagggctcacttgctcactcaggccaggaaaagggagggaaactgcagacacaactgggaagtgttggtagtgcctgtggtggcagaggtctgtaggaagttgctacagcctgaggcaaactgcattctcccagaggagctggctccaggtcacgggtcccttggcagtgccaagctgcacaggctccctggaaagtgtgggcagtgacctgtgcttgctcacagctcagtggcaatggcagtggctgaaacactcacctctagggtcagagataacagttgtggattgtactgcctctggcacttgcggaggtgtggtcctgtcatctgtgaccttgtgaagtttgagggtccctgagataatgatctcttgcttttgtggcaggcccaggctttttccttgacttcctcagctgtgtagtactagccccctcagactgtcttcgtggcaggcaaccccagttctctccctgggttctgacctctgaaacctgagccccggcaccaagcctccacctgccctgtgtgcatgcagacaacatctcaaactagtgggaactgaccagcactgacctctgtgcagagttctctcccttttcctctgcacgcctgttgctgtgctcatctctgaggctccaaagctctcctatgtgcctgcccatgaaggtttccaagtgtgcagaaacttttcctccttcatagctccctcccagaggcacaggtcccatctggattcctttgtctcttttcttatttcttttgccctacctgttttgtggagataagctgtccttgttgaaagtccgaggtcttctggccagctatcagttggtgttctgtaagaggtgttccacatgcagatgtatttttgatgtatttgtagggagcaaggtgatattcatgtcttactactctgtcatcttgaaggtctcccccacagtgatcttgcaaagaaatggccttctatccaaatttaaatttaacatggacactaatacaaattaatgtttgtattaatgcgaactggcagaagttcctgccagtgctactctgctcttatcttgaagaatcttcagtatccatatgagagtaacttatttagactgcgtttgatcttttataagcaatgagcgcccatgttcacttactttcactttaaagatatatttttaaacctttgcatatcttctcatttttaaactgattctcatcatacatttatttcttctaggcattggcacatctacacttaatagaatatgtcggagaacagactgctttgctaataaaggtacattaaatactgcaatataatgtgctccagcctcaattcctttgatttttgtagaaaaagaaaaaatatcagttagactagatctcattcattatgtaaaaagtataacggggaacctgttttagcctatgtaggctagagatggaaagagacttttttcaaggaatatataattacagatgctcgcaatttttctattagcctttagttgaaacctttgtaggaaggagaacaattgagacagtagtctcagtaagtgatgcacagaggtcttaacccaaggtttttgccaggaagtgaggtcaatgtggctagtgtgtcatctcgtgtcccatcaggtcatcaggaacagggacactctgctttctgcacccccctcaccccacactgacacaagggttagttggtttgagcatggtttggagttactactctgaattacttgtagactctgtcccaggctcctgataggagttggaaaagtccagatagtgctgtttgtacaccagagtctccgttggtctcctgtgtggaagaggaaggaccaggagcccttttgtcccttcggagtcccccatgtcctattatcagatctgctgtgtgtgtgtgtgtgtgatctgtgcagctatggtaaacagccctactcttatcttctgctttcagatggtcccagaagatcagcgccttacagctgccatcatcctggtggtctgggtctcaggcatcacatcctccctgattgataacatcccattcactgctactatggtgagtcacagtatcttccatgtgatgagggcccagatttcacttgcacataacctgggctcacccttcctttcagaggaagcagagagtgagccctgtccctatgttgtgctcacaggtttaggggacagatgtgatgaatcccaaacaacagctgggagctaaggccttatagctgctgtgggtagtgaattccaggatggctgattgttttagggtcagtctgactgggagttgccacctctcatggaaagacagtctttgttttttgtttctgtaaagaaaattcatttcagtcattcagtcgtgtttgaatctttgcaaccccctgaactgcagcacgctaggtgtcccagtccatcaccaactcttggagcttgctcaaaatcctgtccacgaagtcggtgatgctatccaaccatctcatcctctgtcatctccttctcctcctgcccttaatctttcccaacataagggtcttttccagtgagtcagttctt

SEQ ID NO: 85 - DNA, 91667 bp, Hippotragus equinus
  source 1..91667: mol_type = genomic DNA
tctttggtggttaatagaaaggaacccctccccaaacatcaactaagatcttgactctgcttcttacaattgttttcatcaggcagccacagatttactccagtggccgagaatctgtgcccaggctttggagagtcctggaaatgcccaacctgtctaatctccagggcacaggtggtcctgccctccctcacttgccttccaacatcccaggagggcagccaagttcggcctctccgcatccgccacactctccccggccgctccccctgccgctcccctctgggtggcccaggccctgacccagagccctgcagcgtcaggacaacgcccatcgcggggcgttcctggcggcgggtacgcggcaggagacttcttggaggcgctcctccctaaagccaggttaaaaacctcagcaccacgtgttgtttgcgctgtttgcaaatctccctgcggctgacggcccattactgtagagaaggcccgcgatacgagccagcatgtcggctctggtcctagagagcggagccttgggcaggaaattcagcgactttggacaggtgagcctggcggggcgggggtcgggtcttagctgcgcagggaggggagtttgccccccctcccgccgtggaaagaggtcagagcagtgttggtgttttcaactcccatcaactcaccaggacactgagagttcatttgagggggacggaaacgtttaggaagttgacagataacacatgcgctcaacacgtttcccaaggagagagcatctcttgggtgactttcagggcataagctgcaggagctggggatcggctttcagagctgccacagatggactcgctgtgtgtctttacacaagtctctgtcgccttctttttcttctgtacattggtccttaacaatctggaacgggagtaggggtccatccggatttactcttctgtgatgttttacaagtgttctcagccaggaatcaaaatggcaaaattgtaagaaattgtatcctttttttcacctttgggagaaaatgccttatgaagagattccagacttactcccacctggggaaggagacaattaaacacagaggaaaatactcgagagtcagccttgaacttggaatgtaagagaaccttaaatgtggcaagaataataaccagggtgcattctattctctagaaagtgttccctgtcccttgaggtgaacaactgcaaagtgcgttctgtaattgactggccacattcctagaatttagggttcagacttaaagcccacccctgggagaggaaggtttagagagtgtaaagtgtaaagaggaaggtttagagagtgctgtgtaacatctgtgtgttgaaagcaagctatttaactttgcagagcctcaggtctattcatttgaaaggttggaataaaaaaacccatatcctagagttaatatgagagtcaagtgaaataatatctttaaaactcttagcacactttctggaatataggagaagtgccaggggtgtctagccggaaatgatttgtttgttcaacaaaatgtgtcagaatactggcaagaggaacacacactgagtcaagcccagcggctggtggagcttctcagtggaaatgtgatggacccgggatcaggcgatgtggactctgtgtttagtttgctgatgctgtgtatcatcaagaagttccctaactggggaagaggctcagtttgggatctgtaaaacggggggctgggaggtgggggaggtggatagaaaatagtctctaggagagcttccctggtgactcagatggtaaagaatctgcctgccatgtgggagaaccaggtttgatcccagggttgggaagatcccctggagaagggaatggctacaccactccagtattcttgcctggagaattctgtgggcagaggagcctggtggattgcagtccatggggtcgcaaaaagtcgaacaggactgagctactaacacctttgagtctctaggactccagctctgacaatctacaaaaagacacatttataccttccagaagctctaacccagataagcagaacgccctaggtgtagtccagatagaaggttgatttacacatgcaagcacaacagtcctgcaagagacgtctggctggttcgttcactcaactcaacaaagacttattgagcacctactctgagccaggtacagctagctggtataaagtctgccctggtgaaacttaaattcctgtggaggagacaagactataacatttaaccaaatgaacatataatttcatgtggaggataagtgctatgaagaaaaatagaagggggtgacagattaaaagatgaaggaaactcagaaatcatagctctaaatggcacagagtcagtgttcaaacccaggtctgtctccaacaccctgtgcactcctccaaccacactgcttgctcctgtagataagttctgcaatagacaggcttttagtgtgtccacagcaggatgtctgctcttgtttccgggtgtcttacactgtagatgtgtgtttgtataatcacacatgtgaaaacacacctctgcccatgacccccaaaagcactaaggtcagcaatgagtacccatggaatatctttgctgtagattaattgcttgcagttatgaaaactgctctttttacaaatatattaacaatagaatgtatttgttagacaaaagcaaagagaacttatttctgttaagtgtatttatcagttcagtcactcagtcatgtccaactctttgacacgtgctaccatggactgtagcacaccaggcttccctgtccatcaccaactcaaactcatgtccatcgagttggtgatgccatccaaccatctcatcctctgttgtccccttctcctcttgccttcaatctttcccatcatcagggtcagttcttcgcatcaggtggccaaagtattggagtttcagcttcagcatcagtccttccaatgaatattcaggactgatttcctttagaatggactggttggatctccttgcagttcaaaggactctcaagagtcttctccaataccatagttcaaaagcatcaattattcagcattcagcagaatatagtctatattccaactctcatatccatacatgactactggaaaaaccatagctttgactagatggacttttgttggcaaagtaatgtctctgctttttaatatactgtctaggttggtcatagcttttcttccaaggaacaagcgtcttttaatttcatggcttcagtcaccatctgtagcgattttggagcccaaaacaataaagtctgtcactgtttccattgcttccccatctgttttccatgaagtgatgggactgcatgccatgatcttaattttctaaatgttgagtttttaagccaactttttcactctcctctttcactttcatcaagaggctcttttgttcttcttcgctttctgctgtaagggtggtgtcatctgcctatctgaggttattgatatttctcccagcagtcttgattccactttgtgcttcatccagcctagcgtttctcatgatgtactctgcatagaagttaaataagcagggtgacaatatacagccttgacgtactcctttcctatttgcaaccagtttgttgttccatgtccagttctaacttgcttcctgacctgcaaacagatttctcaggaggcaggtcaggtggtctggtattcccatctcttgaagaattttccacagtttgttgtgatccacacagtcaaaggctttggcatagtcaataaagcagaagtttttttctggaactatcttgcttttttgatgatccaacagatactgacaatttgatctctggttcctctgccttttgtaaatccagcttgaacacctgaagttcatggttcacgtagtgttgaagcttgacttggagaattttgagtactactttgctggcatgtgagatgggggcagttgtgcaattctcagtgatcaaaattcttttcttcttggttgctagtaaagatttttttctccctgctttctttctccttttctagtttttaaactaattttctgtacctttatgcatcctgagtgtacatttgtttttaagtcaactcacatatctatttgaagcacataattacagattatgagccagtttaaacacattctggaaaaggtttgcccaagatcccatgctggtccacagaacagtattggaatcagaatccacccaagatcacatcatttcacaaaattccatgagcttcctttcagttcagttccctcaagctttgaaaaggggagctgttgttccagttgagtcactgggatttaggttaaggattttggagttattggacctaggttcacttacaggctctgccactcattagctgagtgtccttggacaagccacttaatcttgctgagtctgtttcctcatttcaaaataataagggtggtatcatctgcatttttgaggttattgatatttctcccagtaatatatatatatatatatatatatatatatatatatatatatatgctggtatacatatgtactacagctttatccattcatctgtcagatggacatattggttgtttccaggtcttaggtattgtgaatagtggtgctatgaatattgaggtgcatgtatttttttgaaatatggttttgtccagatatatgtctaggagtgggattgctggatcatatggcaattctatttttagttttatgaggcgcctccatactgttctccatagtaggagcctgagttctcaagctgccatgcactgcctgtgtgctctcaggcgagtcactttctttggcccatagtttccctaaaatgagattgtggacaagcctatctctgtgagtcggttattctcaagtcccatgtgggcatcaggagacaaacagaatacctagattgaggagggattattcaccttggctgaggagtacagaagttttctgagagaagtactacccatggggcttttgaggaagggtaatggatttgaaaagggacaagggtgggatgcagtggatttcctgtaatgaggtgttgaaaggtcaaggacgaagtcagttttctggagaggagtttcctgagggtgaatcttaggagatgaggcaccaataagacttttgacaattcgaaagaggtattgtatattgttggctatgttgttgttcagttgccaagtcatgtctgactccttgtgatcccatggactgtagcccaccaggctcctctgtctatggggattctccaggcaagaacactggagtgggttgccactaggggatcttcccaacatagccatcaaacctaggtctcccacattgcaggcagattctttactgtctgagccatcagggaagccctaaattctgctaggagcatccaatcactgccaaccactaagggctgaattgttgtcagtgggaaccaaagaaaggcctgaccctgagggctgtttctggagaaggtcagactggcctgggtggaagtgggaaggtggtggctggcagagttccatacattcacatctgaatcgccctagtcgtaggtgacttctgtttcctggaggccaacaggagaggataatgttgccaagtgaactagaaataggaattttttgtcatttcaaggaagctgggaagaactgagggctcagtgttctttcctaggaagaagactgacatcagagactgatttgtgtgtctctggcaggattagagacagaaagtagagtccacaggaagttgtgactcatggacagagtgctggcatccagtgacatgggctccagctctggaggtgttattcaaattctctaagccttcctcttgtcatcaataaaaatggcacttggagaaaacctactttctagactgttattaaatgagataatccaaatcaagtgcttattataatgcttcagacagtatactaaccaggtggtactagtggtaaagaacctgcctgccagtgcaggagacatgagacacaggttgaatctctgggttgggaagatcgcctggaggagggcatggaaacccactccagtattcttgcctggagaatcccctggacggaggagcctgttgtgctacagtccatgggtcacaaagagtcagatatgactttataggagcttttaatatatggtagatcaaaaaattttttttagaaagatagtactgtggtcaatacaaagatatttaacagtttagtcttgctattcatctaaggctccctctaatcacactgactgataattctggttcttcccccatactgtttcaggtgagtttctgggaaaatctgaattctctgaattaaaagaatttcatcctaagggtcatcagtggccacacagggcttaagatggcaagtcactgagagcctgcccagcacagccttctcactgagataatgcaacatccattccactaatttcattaacttccttacaagagagtaattgttctgctggagtttttgttcccagttttaggtacatgatgttcatttgaaagcacacatggaactttgtgtattattgtaaaacctaatttaatccttaacttttacattttaagattttggccaaccctttctggagtggcacccctagtcccaccttaatttgctgtcacatggctggagaaaatgttagatcctagacattctttgctgtttgaagacgtccatcttccagtgggttaattgtgtgctcttatgtattctgtggctccttttcaacaattggtatctcagatcccagcatctgggaacaaattaatgctcctgtgagatctttactgaaggccaacaaatcttttgtgggtatttttagtatttccattattttgtatgcttttaataatattatatttaaaatattttctctctgtctttctttcatcatctgaatgctgttttgatagggcttggcaggattatacattagcctgatttcacacatgaagaaattaagaaggttaagctattggtcccaaagtgttctggtaggtcaatggaagagagaggattccaaaccaatgtctttggagctaaaagcctgtgtgtgttctaattttagtattttctaccctctgtttctcagtgttttcctgggacaattattgaaccatcataccacctttaagatctttttctacttaccttgcttgttttgtatgtgtctattaagtaaaactttgagctgctgatgaatggggcatcctcttattcatttgtttctttcagagccctgattgtacctcgtacttggtaagtgtcactgaaaggcaatctttagagtgactggtgacatcagtgaataattgtgtgtgtgttaattactcagtcgtgtctgactctgtgaacccatggactgtataactggccaggcttctctgcccatggaattctccaggcaagaatactggagtgggtagtcgttcccttctccaggagactcttctcaacccaggggttgaacctggatctcctgcattgcaggcagattgtttaccatctcagccaccagggaagccccagtgaataattagagttttctaaaattgagatttgatctatgcgcatcatttaatgttttactttccttgatttacttattttctcttgcacatatacttctatatagaatgtatgtagctcattgtattccaaggcttaactagaagagaaagttcatgctcgcttcttccttggaggtttcacaggactgaattgctgagctgtgaaaaaaaattttttacccattttacccaagtgcatttactcctataggaaacaaactatattgaaggcaactctgatcaaaatgcggtatcgctgatcttctcactcaaagaagaagttggtgcactggccaaagttttacgtttatttgaggtaagtgctctgttcatttctgctttaaataacgacatagcagacttctgtgttatcttctggttggatgcagtgaaaagaacatacggtctagaactggaagacttgattttcagcttaggctcttacattacacaactgtgtgatcttagataagtttttcattgtctgtgagctaaagtttctccatttcataattaggatcattcagaatcatggtttcacacccaggaagccaacattggactccctcttcctgtatcaaactttgcttgaattaattgagttgcccttcatatttacaagtcatacctccttcagattcaaccaaaatttctatctgggattggttgaatccacagatgtgcagctcactggtagagaggactgattgtattcattatactagtactgccattttatataagggtcttgagcatccagggattttggtacccatggggtcctggaatcagtcctccacggatacagaaggatgactgtactattctctcagtgttcccaaagcactttttaactgtggactacagactaacacttccatagcacttatttaccttgtgaaatgcatacattgatcccaaggattgtttattcaggcagggagccttgtgtgaatcatctttatatcctctatagactcagttttatgtatataaagtgttcagttaagaatgaaataatatatagaacctagaaaaatggtacagatgaccctatttgcagggtaggaataaagccaccgatgtagagaacaagcatgggacacactgtgggaaggagagagtgggatgaattgagggaatagcactcacatatatacaataccatgtgtgaaatagatagctagtgggaagctgctgcagagcacagggagctcagctcagcactctgcgatgacctaggggggtggaatgcggtggggcatggttggtgggaaggaggcttaagaggaaggggatatatgtatagttatagctgatccactttgttgtacagcagaaactaacacaacattgtaaagcaattgtactccaatataaagtcataaatgaaaaagaatgaaattatatttaaatatgagcaaaggaaaatagactttcaaaaatgcttttgccctggattgtaagaagaaatattttagaaccaaatgattttttacgcctagtactttagttatactctacctggtgactgaatacataaataggtaaagagacagatctcccaggcagaagaatgccaaataatttaaacagatactctggagtcaaagaaggaaaataacataactctccactccttaggtgtgggccatagagagtgacttgatgaaatggcccttcacctctgtgatctttccctgaacccataaccccagtctaaccatgaggaaaacatcagacaaattccagttaaggaacagtctacagaatacttgactagtactcttcaaaactgtcaaggtcatcaacaactagaagtgtctgggaagttgttctagtccagaggagcctcaggggatatgacaactaaatataatgtagtgccctgagtgggattgtagagtagaaagaagacatgagacacaaactaaagaaattcaaataaagtatggtctttagtttgtggaagtgtatcagcatcagttcattaattataacacatgttctgtacttatacatgacactaatattcgtggaaattggctgcagaatatatgggaattccctctactagcttcttacttttttgtaaatctaaagtttatctaaaaaataaagtctattttaaagaaattaaacctggctatccaaagtgaggaagaaaaatatctgcctgagtgagagcaagaaatgagtgtagaaaaagagagagagaggtttctgaatggcaagctgatcctgagaaagaatatatctgtaaaatacgggaatgtcacatttttgcctttgtattatatggttcataagcattttccttgtgagagtcagaccttaaggttaataaattaaataatagtaaattcacaagatgttttcaacctaataaataagtaacaagtaaccatttaccaggatgaaatgcacccaagaaacatggactgcacgggatggttgaatgccgaagtgcactgaccgtgacgggttgcttaatgtgtgcctttgtttactcatctgtaaattggaactaatgatccatacctccctaggtcctggagattttatgtgctacgtaaaatgcatggtatgactctgagtccacagaagattctcacatgatgtctgttcctttactgcttccacctgttatctatgaaacccatgagaaatctttgagactgtgtgaagaggagaaagatatgagaagcctagagatatttaggagccttgatttaatttttttcccaaaaaagtaaaaaaaaaaaaaaagaatgaatggcttagtatgtattgtgagtatttacagcaaattgcaatgaccaagagtcaaggaaggaccatttaaaaaaaaggtagaatagcatagggtggcaaagagccagacatgaccgagctagtaatcacagcacagtaagcacagcttagtagaaccaaggggttatggtggccacagtgtatttgtgtacttcacatctctcatgataccctcaatgagatggagaagtaagtgttagatacaaaacctttaaattgtctgcttagtcgctcagtcatttctgactctttgtgaccttatggactgtagtgcaccagactcctctgtccgtgggattctccaggcaagcatactggaatgggttgccatgccctcctccaagggatcttccccacccagggatcaaacctgtgtctcctgcatctcctgaattgcagacagattctttattgctgagcccagggggaagccatttatattgcatagatgatgctaaacttctggatcatataaaatgaaatcattttcttccagaaaaaagaaagaaaagaaaaagaataaggatgaatctaaactacactttagggcagtatttcctaaacaatagtctatcaagtgccgcatattattaggtgttttattagatgagagttccaagagtaaatagggttggaaaattctgcatctagattttggagacccatcatgtttgtgaaaatattaaagactttggaaaaccttgaagagtggaaacttattcagcgttaccttactcagcatttcccaaatgtttttgaccatggaaccttgttcaagaaagacatatgatcattttgcaggcactagtatcccattgaacttatgctattatagagttaggagctccagactctcagttatgagtgagatttgggaccctgaggagtagaacagcattgggattaagactatgttgcctggaaccaaactgtttgggttgaaaagccagttgtaccacctgtgaactgggtgaccttaggaaagttatttatcctcttggtgacttagtttcctcatgtttaaactgaaggtaataagatttttttgtagggccgttgtgaaaattaaatgaattaacacaggcaaagtacttaatgatagtatctgtcacatagtaagagctcaataaatgtttgctctcattatttctatgcagtatcattttggagagtcatggagcatcagagacattcttagctctgtgacagatagctaaaggattaagattaaggttaattgacttgaaaagggattatggggtaaggaaacaatagtttcattcaaatatttgaagtgccatcatggaaaaagaatggggcttccctggtgattcagacggtaaagagtctgcttgtaatgtgggacacctgggtttgatccctgggtggggaagatcccctggagaagggaatggctacccacgccagtattcttgcctggggaatttcatggacagtggagcctgcgggctacattccatgaggtcaaaaagagtcagacagaagaatagtgcttattttttgttacttcacaggcaaaaggacaaagcatgaaatgacagggagcatatttcaaatcacttaaaggcatcatctctactgtagaagagaactggaaggcactgatttcaagcattattactgtcaaaacagctagtaaaaggcagggcagaatcaatgcaaaaattatggtataaataatcttacctttccttaataaagacaaaggaaacatccattctagttcctccaaaattggcaatggaggagaaatgttatatggcggaatcacctgcacctgtgagtaccttgctacgtcctcttgcagtcacctccatccttaatgagcatgactgtcttttccgtagctgattaacaccaaagtcttcatcccactaagtggtgatacggcctgccagtgggctcatggtctattagacctcagctagtaacaacatcagaatgcaatgcaaacctggagaggtgggatgggtggcggtgggagggaggctccagagggaggggatatatctatatatctacatccatatatattggacttccctggtggttcagatggtaaagcgtgtctacaatgtgagagacctgggtttgatccatatactcacagctgattcgtattatatagcaaaagccaatacaaccttataaagcaattatcctccaatttaaaaaataataataatacaaaataaataaagattcgttaacttaaaaaaagaatgcgataggcttgatatttgcattggaaatacagaggtatggtgtttacatgccttggttgtgtggtgatgggggcagtgaggcagatggttttgtgaattgaggccaaacaattaggaatatactcaaacctctgtctgctaacccccaaaatcccactgtcctcagtacattgatctttcagttctctgcgttttccaaagttctctttatttttagcttctactcaatcatgtcctgcacctacttagaaaaatagtctcctgagagtctttattgcaagtggcttagtaatgggctataaaattagaatcaaactcctgagggaagttgcagagaagaggtctcccttcctctgccagaactccactaatcattttacctcgaattccctaaggatgggaataagccatcaggcgcatatacagagctctgaagtacatgatgagtgtggtcagttatcatcatttaactgatggagacacacaggttcagactaagcaagctgcccagggttagacacttagagctaaaaactgcttccaagttcaccctccattttcacagtagatttgaaaacaaatctgtatatatgtatatagtctaaatgtttaccagtacagtctgtatttgtcacagtcactttctgtgttccctctctgcccagatgacccatatcccaccctcataagatgctcaacgagctcatactgtctcattcatgcattccattaaccttctgtgagtatcagctgttatcagaccatatgtaggtgctgaggagaccgggatgagtgaagcggtcattcactgcctctgcagaacgtggaaaagctcaggcttccatgagcattcttaatccaggctgggggaaaatttgttaagaagtttcttgcagacataatgggttatgctgaaacctaaaggactgaccagtgagtaaaatgggggagtaaattccagaatgaagagacaaatgacttgaggggagagaatagacacatgggcaggtcccggaatccgtgaatcctttaccatccaccaacctcagtgttttctctggaactctctggctttttccatgatccagtggatgttggcaatttgatctctggttcctctgccttttctaaaaccagcttgaacatcagggagttcatggttcacgtattgccgaagcctggcttggagaattttgagcattactttactagcatgtgagatgagtacaattgtgcggtagtttgagcattctttggcattgcctctctttgggattggaatgcaaactgaccttttccagccctgtggcaactgctgagttttccaaatttgctggcatattgagtgcagcactttcacaccatcatccctcaggacttgaaacagctcaactggaattccatcacctccactagctttgttcatagtgatgctttctaaggcccactcgacttcacattccaagaagtctgtctctagatgagtgatcacatcatcatgattatctgggtcgtgaagatcttttttgtacagttcttctgtgtattcttgccacctcttctaaatatcttctgcttctgttaggtccagaccatttctgtcctttatcgagtccatctttgcatgaaatgttcccttggtatctctaattttcttgaagagatctctagtctttcccattctgttcttttcctctatttctttgcattgatcactgaaaaaggctttcttatctcttcttgctattctttggaactctgcattcagatgcttatatctttccttttctcctttgctttttgactctctccttttcacagctatttgtaagacctccccagacagccattttgcttttttgcatttcttttccatggggatgctcttgatccctgtctcctgtacaacgtcacaaacctcattccatagttcatcaggcactctatctatcagatctaggcccttaaatctatttctaagttccactgtataatcataagggatttgatttaggtcatacctgaatggtctagcagttttccctactttcttcaatttgagtctgaatttggtaataaggagttcatggtctgagccatagtcagctcctggtcttgtttttgttgactgtatagagcttcttcatctttggcgcaaagaatataatcaatctgattttggtgttgaccatctggtgatgtccatgtgtagagtcttctcttgtgttgttggaagagggtgtttgctatgaccagtgcattttcttggcaaaactctattagtctttgccctgcttcattgtgcattccaaggccaaattttcctgttacccccaggtgtttcttgacttcctacttttgcattccagtcccatataatgaaaaggacatctttttggggtgttagttctaaaagatcttgtaggtcttcatagaactgttcaacttcagcttcttcagcattactggttggggcatagacttggattactatgatattgaatggtttgccttggagatgaacagagatcattctgtcgtttttgagattgcatccaagtactgcatttggactcttttgttgaccatgatggctactccatttcttgtgagggattcctgcccgcagtagtagatataatggtcatctgagttaaattcacccattccagtccattttagttcactgattcctagaatgtcaatgttcacccctgccatatcttgtttgaccacttccaatttgccttgattcatggacctgacattccaggttcctatgcaatattgctgtttacagcatcagatcttgcttctatcaccagtcacatccacaactgggtattgtttttgttttggctccatcctttcattctttctggagttacttctccactgatctccggtagcatattgggcacctactgacctggggagttcctcttttggtatcctatcattttgccttttcatacggttcatggggttctcaaggcaagaatactgaagtggcttgccattcccttctccagtggaccacattctgtccgctggatcatggaaaaagcaagagagttccagaaaaacatctatttctgctttactgactatgccaaagcctttgactgtgtggatcacaataaactatggaaaattctgaaagagatgggaataccagaccacctaacctgcctcttgagaaatctgtatgcaggtcaggaagcaacagttagaactggacatggaacaacagactggttccaaataggaaaaggagtacatcaaggctgtatattgtcaccccgcttatttaacttctatgcagagtacatcatgagaaacgctggactagaagaaacacaagctggaatcacgattgccaggagaaatatcaataacctcagatatgcagatgacaccacccttatggcagaaagtgaagaggaactcaaaagcctcttgatgaaagtgaaagaggagagtgaaaaagttggcttaaagctcaacattcagaaaacgaagatcatggcatctggtcccatcacttcatgggaaatagacgaggaaacagtagaaacagtgtcagactttattttggggggctccaaaatcactgcagatggtgactacagccatgaaattaaaagacgcttactccttggaagaaaagttatgaccaacctagatagcatattcaaaagcagagacattactctgccgactaaggtccgtctagtcaaggctatggtttttcctgtggtcatgtatggatgtgatagttggactgtgaagaaggctgagcgccgaagaattgatgcttttgaagtgtggtgttggagaagactcttgagagtcccttggactgcaaggagatccaaccagtccattctgaaggagatcagccctgggatttctttggaaggaatgatgctaaagctgaaactctagtactttggccacctcatgcgaagagttgactcattggaaaagactctgatgctgggagggattgggggcaggagcagaaggggacgactgaagatgagatggctggatggcatcacagactcaatggacgtgagtctgagtgaactctgggagttggtgatggacagggaggcctggcgtgctgcgattcatggggtcacaaaaagtcggacatgactgagcgactgaactgaactgaactgaacctcagtgttcctgggaacagaggcggggttgcagaagggacgtttggcagataataagatgtttactactctcaagtttggactttaggtcctgactgtgactcctgggtctggtgagcaggacagcgtcaagactgaatcacgagggttccttttatccttttggccttgatccagagcagttgtggcagtaacatgtttacagggaacattccatctttaatcaaaataagaaaagcattgtgtttcactggggaaaagttcttacaacccagatgacattttcatcttatttaaacccccaaaaatagataatgatataaagaatgcccatgtaactcacttcctgtttaagcagtaaatcattacaagaatgacttaaatccctgggtacccttccccatggacctccctcctcagaagtagctattaatctgaatttgatacatattattcccatgcatctttttaggctttgttatataaagatatctattaggatatatggcatagtcttgcaagttttgcttttttgaagtaaagttgatttacaatgctgtattaatttctggtatacagcaaagcaattcatttgtatatgaacagatatactttatgtatatagacttcatattcttttccattatggtttatcataagatattatatataactctgtgtgctttacaggaccttgttgtttatccggtaagcttttaatctttatgattggaatcatattgtaatagtccatctgcagttttctttttggggagaagatgggggacattgtttttgagatttgtgcatctatttttgctcattcagttttttccctccctattttccattgtgtgactatactttatttcttattgatggacctttagcttgtttctattgtgtgtccatgcagatggttctgcctcaaacattttgtgtagatttgatgatccagttattgaatagaggaacctcaaatggaaaactggcactgttttcagctgttcacctgtttaaaaccaggcatatttgagaaataatagcatggagctgactttctaaactttcatcataaagttcagtcccacatcgtgaaaatgtagacagactgctatagtccattgacggcacatgggttgtgattgctcacgggtagcttggactgaaacaggccactgggccattttgattttatctcttcggtgccaaaaaaagaggggtggaaaggggaacctgggataggacagctctttcctgtaaagccttgaaaagagcctggattaagctgctagcctgcttcttccccaggaaaggggttccttctgaattggacacagttccaaccacatggaggggaagatggggaagaaatcacccaacaaagagggacaagatcaagggaggggaagaccaggagttgacaacagagactctcccaggggaggtgagagtgggaccctaaaaatggttcagggtgtgaatcctgaaagttagcgtgaacctgcccgagaacgcgcctctagcgtggagtggggagaatctggagctccctctagactttaattgtgctgctcctgctttcctgaatgtttttggtttcctgtttagcccagtgggtttaatttttagactcttagtcaactggggctgttactggacctcttacaagaggagatcagtaaaatacacaagaagccctgcctgtacctctgtgagacttctctatttttgtaactgttatttctcaccccagatgttgtggccatccccagacagtttctgcctttgtcccattgcagtctttctttctttctttcttttttttttttttttgatgccccaaggtttctgggatctcagttctccaaccagggatcgaacctatgccctctgcagtggaagtgcagagtcctaaccactggatcaccaggaagtccccactctattatgaaaatacctgccagagtgcttcattgaaaacatgagtcaaaatctctctctccctctgccctactacctctcatagcttattttattggagtatagttgatttacaatgttgtgttagtttcaggtgtacagcaaagggtttaagttacacatatacatatattcattcttttttcagatgaaagtgaaagtctctcggtcgtgtctgactctttgcaaccccattgtctaggccagaatactggagtgggtagcctttcccttctccaggggatcttcaatccagggatcaaacccaggtctcccacattgcaggcagattctttagcagctgagccacaagggaagcccaagaatgttggagtgggtggcctatcccttctccagtggatcttcctgatccaggaattgaaccagggtctcctgcattgcaggcagattctttaccaactgagctatcagggaaggctttttcagatactttacctttatagattattacagaatattgagtagagttccctttgcttacagtaggtccttgttgtttatctattttatacatagcttcttaatatcactccaagggaaaatcaaagttaagataatggccgataggttattcttggctacttctctgcctcgtgtcccattggccctgccccctgctcattctgcccccgtcatactggcctcactgatggtcttcagtcatattgtgaaatggctgaccccaggacccttccacttggtgttcccttatgacttgcttcctcattgattttaggtctaggcttaaatgtcacctgttcattttttgaggatttcatgaccccattgtttaaaatggcacctcaattgaacctctggaatagtctgcccctcttccctgcttgtttttgtatgttccatctgaagactgtatattttacttatttatcatagttgtcatttgtatcttccttccagaatgtaagctcccggagggcagggatttttcctgctttgtctgctcttatagcccagtgcttagggcagtgtttggcaccaggaaggtgttggattgaatgagttatgaaaggctcctgtctgtttacctgagcccaatgatgtgggccatcagctgtgactgtctttgatgttgcctcccaccccagaaagctctgaaacagacaaggacataacttcatttgagcttatgccaaggcaatagcatgtagggcgtccaagaattcaagaagctccccttttccagtctagtctcatctgaaaatacgctctccttttggaaacatactttcaggggaaaatctgagaaaagcttaaagtacagcaaatattaaaagggaagtgacttgtcaacttaatgtgtttcagtttccaggagaatatatatctgtgccaggttgagaaagttagggcatactgacttactgagtaactgtgattgaagccacaatggggctaggtgctttctctcttgttaatgctcattaagctgccagataatatgatttttatattaaacatggaaaataaaagttcataatggctaactaatgtatccaaaggtagtgagtacagaacagaatttgaactcagattagtcccaaagcccacacttttcgcattatcattcttctttccttgaggaatgaaatggaagaggaaaggagggagcttgagttcaagaaaaggtccagaagcatgaatccatttttcacagttcatcatattcattctgtgtttcatctacttgtggcaaatccccctttaggaagattttccttatggatgggagcacaaaagggtttctggtcaatccttgttaaaatagaccattcatttcactttgcctttttctggtccccacactctgttcaagagtcctgagtcatcaggttcttactctgccttcttgtatgcagaaattaactattgggcaaattgtgaaattgtctttttagtgttgaactctaacttttcctgcctctgccaaaatgtccatgaagatgtgatgagtgtgcatgggtcaatttttaacttgcatagagtcctcgtttgaaaatacaaattcagggacttccctgtctctccggtggtaagactctgtgcttccactgcagggggtacagattcaatccctgttggggaactatgattccacatgccatatggcatggccaaataaataaataataataataattcatttcttttggtgtatggcaaaacgaatacaatattgtaatctccaattaaaataaataaatttatattttaagaaaaaaaaggtaactatgatcatattcagatttggaggttcatttctaaagcatttcttagcaaccaaaattattggtatctaaggatccacactattaaaccagagaaacaccactaaggaaattgcatgctaagctagagagttaattgattcaaatgggaaagaaatcatctgaagaatttagctgggtgaccttagccagaaatttcactcacattaaaaagatatgtgaatgaaactggagcctattatacagagtgaagtaagccagaaagaaaaacaccaatacaatatactaatacatatatatggaatttagaaagatggtaatgataaccctgtatgcgagacagcaaaagagacacagatgcatagaacagtcttctggactctgtgggagagggtaagggtgggatgatttgggagaatggcattgaaacatgtatattatcatatgtgaaatgaatcgccagtccaggtttgatgcaggatacaggatgcttggggctggtgcactgggatgacccagagggatggtatggggagggaggtgggagggaggttcaggatggggaacgcatgtacacccacggcagagtcatgtcaatgtatggcaaaaccaacacaatattgtaaagtaattagcctccaatcaaaataaataaatttatattaaaaagatatattttaatttttgttgcatgggtaatggtatgaaacttttggcaaataaatggaagttacacataatcttgtcataacatcatgatacctttcattctagccttttttccttgtgttggacagaagttttaaaacataattatctatcacatacctatatccatcataagtagtttgccaaaggtctgtcatttaaaagagaaagttaaattttagtaataaatattgcttttcaaaaagttgttcataaagaaaatagagacaaaaacaccctgaggcccatcactggagttgttcagttgctaagtcatgtccgactctttgtgacctcacgggctgcaacacgtgagacttccctgttcttcactgtctcctggaatttgctaaaaactcatcactggagatcatcactgtgggagtgcctactggcactttgttttacacatgttattaatggttgcaggatctcctgtgaatgattgtacactacagtccatctaatattccactattatgtggtcggcttacaaattttggtaaaaagtcctcccataagttaggtctctagagttataaaaactgagtcacggggcatacattgtttttattttttttaaattggagcaaaattgctttgcagcgtatttgtttttgctgtacaatgaagtgaatcagctgaaagtatatgtatatcccctccctcttgaggcttcctcccaccttccctcccttccatcccacccctctcagtcatcacagagcactgagctgagctctctgtgctatatagcagcttcctcccagctatctgttttactcatggtagtgtacatacagcatacattgtcttctggctatttccaaggtaagaggcttctccctgggaagtagtgttgttaggaggggtgggatagaagtggcgaaactcaaaaaaactcaaaaaaaaaaaagaagtggcgaaactcaatcagcatagtttctgccctctagactttaaatttttttgtcactctacaccccttcccacctcctgtaccaccgccctcccttgctgtcccacaaataaacatgcccagggtacatccactcctatttcttggctttgctgtttttcctctgctcttaacaaggcaggaattggttaaagtttaaagttactttaaactttatttaaagtttcagcttaggtcaataggtggagcttaaccatttgctttcatccagagccaagaaggatgacattgctctttgcttttattaggaagtcacctctgtttgcaaagaaagctttagagcaaatgctatctgtctggtcttccttcctccacgtgatcttctctctctctggtcaagagtccccgcactgggttacctggtcaggggtgtgttcttctgcagttggtgcccatatataatggcttcatcatgtacccctgagaattatggggaagaaggagcaggaagcagtgcctgtgtaggattgcttcttattgtgtttactcccatagtgttttcactttgagggacttggcataatagtaataagaatgatgagacctggtatttgtgggatgctcatcatatccctggcaggacaggttgtgtggttaaaagaccaatgtctgaggttagagaaaatgagcttctctctctccactttttttttttaataggtatgtatttgctttgggcttcccaagtgactttcctggtggctcagatggtaagaatcttgcctacaatgcaagagacccgggttccatccctgggttgggaagatctcctggagaaggaaattgcaacccaatcaagtattcttacctggagaatctcatggacagaggagcctggtgggctatagaccatggggctgcaaaagagttggacatgacttagtgactgctgctgctgctgctaagtcgcttcagtcatgtctgattctgtgcgaccccatagacagcagtgcaccaggctccctcatccctgggattctccaggcaagaacattggagtgggttgccatttccttctccaatgcatgaaagtgaaaagtgaaagtgaagttactcagtagtgccaaactcttagcgaccccatggactgcagcctaccaggctcctccacccatgggattttccaggcaagagtgctggagtggggtgccattgccttctctgacttagcgactaaacaacactaattgctttacaatgttgtattagtttctgctgtacaatgcagtgaagcagctatatgtatacatatatcccctcccttttggacctctctgttacccggcatcccccatcccagccatctaggtcatcagagagcaccgagctgagctccctgtgttacacagcagcttcctctctggcccattttagcaaagcatctttgtctctgatttcatttttcacattttccttaacctctacaaaggattcttgagaaggtcacagaaaataatttgaaactgtaaaatgatattatctgaatatcattactgtatttaagtatcattactgtaattatccatgtgctcttcaaccatatgccactaaccatcaaggaaaaagatatacttcttgaactctaacgttgatgaatttcatttctttgcaattatagaattattcaagttaagcatttttttttctgggtatatgttgtccatttttatgtttggagaaatccttttttaaagacaaattaataaagaggctactccttgattttcttcacaaagaacagtactgtcaatgaaatcagagttttgaataggtaataatgaaaaccacacattgaaatttgagggccagtttaagtaagcgactctttttactgatgaactccgtaagggctaaagtataaagtatcaccagctagagacattgaagttgagaagctgtattaagtgactattattttgtggcatttaatgcacatgagtcttcccttctcaatgagacttcacgtgtccattcagtctgccccattgcactccaagactgcctgttcccttcaccctgctgtgctttgcattttcccctagactttatcattctaatacataaatcagttatcttttttgtttgttatttgtaccttcaaaacttgaatgtaaactctattaaaggaaaatatctttgttttgttcactattgtatcccagccacctagaaagtgaccagtacctggaaggtgctacatatacatttgtggcatagctggaatgaaaagtaattatataaaaatatgagtggtatttatactggataattttaactgagcatgtattagttacctggtagtctgtatgtatcatctcattcagtgtttcctacaaatttatgaaccaggtatcatgaatacctggagaagggcatggcaacccactccagtattcttgcctggagaatcccatggacataggagcttggcaggctgcagtccgtggggtggcaaagagtcagacatgaccgagtgactaagcaccacaaatacccacaaaattacagacggagaaactgacagttagaaatataaaagtacatattctaaggtctcatagctgatatagtttagaactttgatttaaacccaataagcctgactcttgtggactctatccaagcagaacagcattgcttctgtgtaccaaactgaaatcttatgtttgcaattctaggccttgagcagatttccacgtggttaaattctgtgacatttgaactatttccccaacatatgatttgttatttggttttgcagaagaaaaagtaaacaattttgctgtgttaaaggctttcttctactcttatattgacaaaaaaaggaagaaagaaaaaaaaaagaactcttcttcctcacttctccacatttccttgtgtttgctctggttttgcgtgtttggtctgtgtcaattccagttactgtccccttcatactcccttaacttctcttttctaggagaatgatataaacctgacccacattgaatcaagaccttcacgtttaaggaaagacgagtatgaatttttcactaatctggatcagcgcagcgtgcctgccctggcaaacatcatcaagatcttgagacatgacattggtgccaccgtgcatgagctttcccgggagaagaagaaagacacaggtgagagacaggaatttcacaaggtaaataactctacatcctcatcataaaatgacggcaaagaaggacttacctgggagcccagtggttaggacattgccttccaatgtagggggtaccagttccattcctggttgggaagcggggatctcacatgccttgtggccaagaaaccaaaacataaaacggaaacaatattcaaacaaattcaataaagattttaaaaatcatgctggtgctaggttgcttcagttgtttctgactctgtgcgagcacatcaagaaatctttaaaaaaaaataatttcaaaggtaatctctaccacgaaagaccaggatttggtgagaggatgtagtttagggatgcagaatagtggctgtcacagttagacatttaatagctgttccttttcccttcctcaagataactgtttcttatattagttgtctttagttgcctcctactgcaatttttatacattttccattggtggatttttatgctttcaaaatttcccaatctctagaggtaggatgattagggtgtccagggtgctttctgtttaaatataatgtcaggacaaattctttagtaatctctattgcatctcatggtctccccatgtgcttctcatgagctggagctctttggttccttgttcttaggactttcattgtctcttccactagattacaagctccttgtaggcagggagagtctcttacctacattaatatccttagagatacatagctctcagcaattatttgtgcatgaatgactaaacagagcagttgtcaagacttgctctgcccacttgtttacttactgaaattgctaccacatccaaactggttctgttctgtcacatgatggaccagtaaatcaggagacaagttattggggacaaggactagtgactttattcagaaagccagcagactgagaagatggcagactgatgtctcaaagaaccatcttaccccagtcagcatttgggctattttactaaaaatagcccaaattatatttttatgttaaaaagaggagttagttatctattgcaaacttcttggtgcaggaatcctttgttcttacagtgtccctgtaggtcaggtcatgatgttcctgtgaatctccaacaaaacaaatgctattttctgttttgcaactttttacccatatatgtataaaggccagagccctgagaatgggctatcctgtatattttaagttctaggcaacattcttttacaaaaggtggagagccagtgtgactaactgctggcagcagagcacaaaggttaaaataaaagaaacatctaatatggagtcatatttgttcttccttattacaaaatattgccctggagaggagttagggcaatagagtgtaggaatttcatgggcttggctttggagaggcttcagttcacgccctactttttccacttattggctttgagacccttgacaagtctctttaacagccctgacctctatttttcacaggacttctgtgaggattaaatgagatcttgcatagtcagtgcttaaaacagtgcccagctggataaatgatagtatgtggtggttgttgaactgatgagccatgctaataggtgactattaactaaagaccagagtttccattagggataatgctttgcattgtatagttctgttgattttgacaaatgcataatgtcatgtgtttgctatttcatgtcatacagaatggtttcagtgctctcaaaatgcactgtgctccacctgcttatccctctctccttcccctttctcccggtcaccacccatctttttactgtctccatgattttgacttttctggaatgttatgctatatgaatatggaaccacagactatatattctttttaaaaatatttatttatttggccttgttgggtccttattaggtcttagttacgttatgtgggatcttttgttgcagactctctagttgtggcatgaggccttagttgctctgaaacatgtgggatcttagttccccaaccaggaattgaacctgtgtcctgtgcattgcaaggcagaatcttaaccactggaccaccagggatgtccctatatccttttagactgttttgtttgtttgtttcatttagcaggtttccttcatgcctttttgtgacttgatagctcattttttggtaatcactgaatagatgtaccgcatctcgtttatccattttgctcaatctattgaaggatattttggctgcttctaaattttggcaattatggatgaggctgttaaatattcatgtgcaggtttttctattttcaaagttttcaactcatttgggtcactacttagaagtgattgctgagatgaactattttttcctatataatcaaaattttttttctgttgtaaaatttaaaatcaaaagctttttttggccacaacattaaagactagcttaagaggacttcagtcttcgcagttgaagataacatgttaataattactgcagagatgctttaaaatgagacataagactgaacactcccaccgaaccccccaccccacataaaaagactcctctgaaaccatcctaggggatctcttctcttcctgcccttgctctcttgtggctgtaaccaagaccaggaagtccatcctgggtgtctgcccttgctgagagtggcagccatgcatgcaggctctggtcaccggtggggaggggagtacttggaattcctcctcaaattaaccctatctgcttcccttcttcttctaccttctaagtgagctgcttccctgatgacctcctcttgcttttccggccacctgctcccaacaggagcctcaggccctcagggcaaagggcctgccggatcctggggcgagctctgccttgctgggagcaggtggaagcccggccagctggggccctggggtagaaattcaaagcaattgacaggcaggcaggcagcccctcagggaggcagggaagatgtacatagatcagctgaagggctggcagcctgaactggaggctcaaaaaacagatgtggaagagcagttaggagcccagactccggaaccaggacacccacttggtgtgattttgggcagattattgatcatcatagtttatcactgtattgaattcaagtaagaagtctctgtcttacaagattaatgaactaacaccagtggtgtattgaggacagcccagagcacatttaagggcttaatagaggttcactattcttagtgttatcatcattattataaataatgacttgagcacaggagccataaaagccagccggtacacaactacattttcagaggttctgggaactggaaaatgacctcagaggtcatgcagcccaacatcctccttaatttttcatccgataaaatcagaggccacaacttgtcttcaggcacagagtgaattctgtgcagttgtgggcaagcgggtgtcgagcacccttctatgccgagcaccatgcttggagctggagggagagagagagctggcagggcctgtccttagggagctcacaggctgacgagggcagctgggcagccaggtgaatgcagaagaggggtgggtgctgtgatggagacatggctggtagaattcggcctcagttccaccttaactctgaggacctagcaagtgtgaaagtgaggaagcccacactctgacatcgaggcaccacgtcatcaatgttgggctcatcagaggtaggatgtgacacaggtctgattccctggtggggcccaaagtggcagggtgttgagtttaacactgggtcgatattttacctagtgaggaaaacactgctcagactaaccctccaaaacactatgtgtctcaggacccttgtttctttggatggttcttcaccccggcccatatttgttgcccttccctggcatggtttcctgatccttgcatctgctgaaagacatggccctttgggtttctgggttagtttttgtgaactggagtgtgggcccagaaacagatttttttttttttaaggggaaacagccatccctttgcagaattattctttctgtcaaactccatgggaggatgattagaagaaagcatcttcatagatctgaacctttgattctttcattcaataaagtgccctttctattgaggggctcagatctcaggggcgagtctgacaacaggctgaaggagggggagatctgaacccctcaaatcaattgggctaaatcactttccattctagtggttaaaccattcaaaaggccgtatgggtgctagaaaatgaaagttttcagtttcttaactgctaaagttccccacccaaaacagcttaagggaaggctaattatggtgacaggttaaagaaaccccaaccttctcaaatggctcctggctgataggaatttaataggattttaatccatagagtcttttgaatacttgaggtctattctcctgtccccctgtctcctgatgaactcaaatccttcttcaacccaacatgaaagagtgttaatatcttccatcgattagtctcctaatccttttacctttctctttgaatcttttgcatgacattacatttagctgggggcaggggatgtaaaattcctacatggagccagattgcagccaggagaagcagatagacaaaatgtcttggctagacagaggtgtaggatcatcacctttcgagaaatttatctgtttggagttattttccaagagcaattggacttgagagttattttccaagagcaattgggtagattttgttcaaattgggggtgattataagggtctcggtgtggaaacaaagcgtgtccagattgccaggacaactgtattttctgtggggagtagaaaggctatttatttacttcttcatctatctactacctatctagcctggaggtgcttatgattttgtcttttttatttggattaattcctgaagcaatgattcaagtggaaaaattattgcagaagacaaaataacattatatttattccctccttcttatacattatatttattcccccactcttctatgccccgctcccctcccaacccacttgagtttttctcttttctgcttcaacatcactgctctgaaaggcagtgtcatgataaggctgaagcttcagatccatcatgggaggaagaagggtaggattcctgggaggagtctgaatagcccctaggattgtgggcaaaattgtacatgtgcacctgcttgcatatattttaggagagaggattttcaaaggggtcatggttctcaaagagttgagatcctgtagagagaagctgcttagggcaggagggggctccagatggtcgtgatatttctccatttctaccacctgcacctgcctttcctctggctcttcctctgctctactcttccatcatcttccctttatctccccctcacttctgaacctcctcccttgcatttcacttggccccacatgtgtctcagggctggagatgctcgtggacctgggtctgatggagacctgggatccgcatgttcgtaaagacatacaggattgattgacagccttttccagtctacctggatgcttgctacctgtggcaacatcactctaagtcctctggcagctagggatgggacttttgtttcagtagcctgcctcatcgctacaagcatagccacagctaaaaggacaaacctgtttgtgaagagatggcagcagccctgaagctggaggctggcctagggcttgccctcttgcaagctgtcagaagcatgtctattcacggtgagggaagatcctgagtaaatgcggtttctgaggccagtctgcttcccaggttccagggcttcaagctgaggaacatcataagattataaacaggctttcattctaacaggaattccttatttgcgggccaaatccaaaatattttccccttaggttgtctccctgacgctttgcaactcaaccggccagagtaagcagataacctgatttttattctccatattaggaaatgaggcagaggtacacttgaatggcagtgtggattttggagtcttcatttttccagttagattcctgggctgtagttttatggccaagttgctcgccctctgtaggcctagattttcttgtctgtaaaatgaagatatctgtgtgccagtgcagttgtgtaaattctgtgatatgattgtacaatgtgcctggcataaaggatccatgcaaaaaggtcaggaaactcatgcctagtcttttctaaggatacccaatgaatctcatggtggagacagagtcagaatctccaaagtcctgatctttgataaagaaaggctaccatgttgtgctatttggatcaatccaaaagatggtgaagattacaaagaattagactgagaacaccctttctctctgtacagatgtgttccctcaattgaaggaagtaaaaagagaatatgaaatgcttataatggaatgtcaatttgccattgatgctgagttgagggagcagcatagcaagtaaaaaagagcaactacttgaaaagagtcaggagccaggatgtgaattcctattctgtacgatgccagctaggcttgaatcccatctgacttcctgccagctgggagacctcattacctctccttcttcatctgtaaaatagagccaagatccactctgtcatcttctgggtcttacaggggaatcatgcaagatactcagtatgttaggatgtttgatggattgagttgaacttgcttgagttgaagaggcccttgatcttagatatccttaagcgtcagtaaggagggagctttatggtctgttgctgttgttcagacactaagtcatgtatgaccctttgcaaccccatggactatagcctgccagtctcctctgtccatgggattcaacaagcaacactggatttctttctccaggggatcttcctgacccagagatggaacccatgtctcctgcattggcaggcggattctttaccattgaaccaccagggaagcaaccacagcttagtatcaggctatttgctaccaccagctctttggggtggacactcaccaggctaatgacaaatagagagttggtggcagccactccttcactggggctagccccatctagaagccagggagtcaacttcctgtgtgggatgatgtgagggcccctgggaatgatctctcattcacaaagatgacttcctatgaacatagcttggatgtttgatattatccatgtgactctgtgttatattggagatagcactggtctaggagatggaaggccagcttcacattcagatttcctgccttttcctctttgttcttcttttcttccctcctttcctttttttccttctcttcttcctcatccttctgacaacattcattaccaaaagcagtagcctctttttttgttatcttcctctttgaaatatttgtaacgtttgacagcacttttctccctggaatcctctctctccttcatatttgctaaatcacatgggtcttacttattaaaatcctgacgattggggttttcttcctttttcttttacatcttctccagacccagagtctgctttaccaccttcttgtcgttcattcacatttatgccctaattcagtggatcattcatccatacaactcatatatattgaatacccattcagcagcagccacatggagggatgcattaggggaaatcagtcacatggtgtcttgactcatgtgtcttgtgttgctgttcagccatgtctgtgtagggataggggaatgggtgtgtgccaggcacaccaagaatctacactgaggccagtcttgggcatggtggggagaggggagcaagggttgaggaggggcttctgtggggggacagacattatatggaagaggctttagatgcattctgtttgcaccaatgtaggttgaccataactccagaggcaagtagctggtaatcagatctcactgcaatgtggtattcagtatttgggaacatagtgaacatccccatcaagaagtaattaataagataagtgacatcttaaaatggctgttgggaggatagctccagtttagatttgtgattggaatacacacccttttctttgttcatcatttcactggcatctctcactcattccatgcatttattcattttgacaccttttcagtctttacttcctggtagatgccttttggagaaggcaatggcaacccactctagtactcttgccaggagaatcccatggatggaggagcctcgtgggctatagtctatggggtcgctaagagttggacacgactgagtgacttcacttgcacttttcactttcatgcattggagaaggcaatggcaacccactccagtattcttgcctggagaatcccagggacagaggagcctgttgggctgccatctatggggtcacacagagtcagacacaactgatgcgagttagcagcagcagcagcagatgccttttactcacctggtttcatattcattttgatacgtggatggagggatcacatgttttgtctggcctgtcagtgataagtgagccctgcctccaccatgcttctgttcgattcaggaggagggaactggcttggtaccatcatctgcatttggctcacccattcttgccaagaccttcacagagagtgttctttcttcagaaagaaaatggaagctccttaaaggagaaacctaatgccctcaaaggcattcatccttctctgctgggctggaggccatggcctcagaaaagacatccaggagcctcggaagggggaggagtgaacagccttctattttgggcctcggaagccgaggatttattgctctccctgagacaggctggaggcagaagtctggggcaagcctgggtgccttgctggctacaccctggggctggtgagcatctggtggagggaggggtcagatgggattcaacctgcaccttgaactgctataaatcttcctggccaggaagcaggctccagccaggcctgtcgggggtggggtggtggtggtggtggtggtggtgatgctttttgctcaggagcacccctgagccagccgcccctcggcgtccaggctgagcagttgaccccgacttaatgagactacaacgtgggtgtccagggccagctctcccgtgggctgcttcccttggagtcaaatcaatatttattaatgatctgcccccctcaccccacccccggatgcctctggcttcacagaggccctctgttgcaccagcctgctggagccattcattaactgctgagccccgccgcctgtgaggccgtggaggggctcacagaggccagcccaccgcggaggtatttgcaaaggtcattaatgagctaatctgatttcacttttccaaacagaagcctgggtcgctggggtcagtctctattcccagctttgtgagtgagtctggttgggacgggagaggcctgtgatcatcactgaagaagagaaagggaataggaaggggtcttggaagaacctagaacgtgcatgttaaaaagttaccacttctaaagccagggtgcctgatggaaggtgggggaagacctggggctgtcctagggattttctgtcagcccctctaaattcctgtcttagtttgtcatttcctccccctctgtagatgggagaacagaaatctaaaatcaagggtcccccaccctcactttattctaagccagcccagtggttcagtgcacgagctgccccagttctgattccagtcctgccagctctgtaatcttgaacaagtcacctcatctctctgaccttcagtgtgctctgttaataatgcaaaaataatcctgtctatccccagggcttccctggtagctcagatggtaaagaatctgcctgcaaagcaggagacctgggttctttccccgggttgggaagatccctggagtaggaaatggcaacccactccaggattcttgcctggagaagttcatggacagaggcgcctggtgggctacagtccatggggtcacaaagagctggccatgactgagtgactaacacaaacacctgccagggttactctgagaattaaaacagacagtagaagtcaagtgcttagcacagcatttggtggccgggaagctctcaaaaagtgtaactttaaaggaaaaaagcagttactgtaaccttgagactgggaaaattggaagaacccataagttgataatggggacataggtaagtgtcctatcctggccaacagtggcctgcgggaccttacttaaccagacaagtgtgttctgagccttttctgaatgatgatggggcccagaagctaccaggagcccctggacttggatgagggccccatggcctcacactgccacctgggtctccctgacagtctccctgacggagtcctagggattgttaagctgcttcaacctttgtcttctctttgccaagacttaacgcctgggggatttccttgtggctcagacggtaaagagtctgcctgcaatgtgggagacctgagtttgatccctgaatcgagaagatcccctggagaaggaaatggcaacccactccagtattctttcctggaaaatcccatggatgaaagagcctggaaggctacgtacagtccatagggtcgcagagttggacatgactgagcgacttcactttgccaagacttgaatcctttgagtctttgcaaccctctcaagttctctgattttttttttccccaccaagaggcctgaaccaagccatgtgacccaagtacagagtgttttccttttggaggagaggaaacgagaaaaggagagaagagaagagaaaagaaaaggagaggagaggaaacgagaaatcagccaaagctgaaagtaagctggttctgctgccctctggcgttcagctggaagctgaccagcacacccggctctgaacccgggtggggacaaagaagcttgtttctggagcacagccttgtttctttgggaaacagtagggtcaggcatttggggagctgaagaaacacagtaactgtgcttctaagaacaagtcaggctgacacatagattgactgaaagtgtattttcatgagtcccctagccagcgttagccctccacataggcatatgaaaccccaaaaagatcatagcagctgtgaatgaaatgcaagggtctacattttttgcaggggaaactgagcccaagatcagaaaacctgttaacatcagagcagagcttgtctgagaaggtgcttctgactccagcctcccttctttcctcccgttccctcccctcctcctctcccttctctccttcattcgtctcctcctcctttttcttcttcctcatcaccactgaactttttccatcctagtggttaacaccaatgcaacacttcctgtggccagtctctctgctaaaatgtgtcccatttcctctagcatttaacacaagtgtgtgcgtgctcactcgtgtccgactctgagaccccgtggcctgtagcccgccaggcttctctgtccacggaatttcccaggcaggaatactggagtgggtgatcgctgcctcttccagaggatctgctgacccagaggttgaatctgtggctcctgcattggcaggtggattctttaccactgagccaccttaacgtttgcaatgaggcagtaatatggaaagacagttttaattcattttctggttaaagaaactaaggctctgagagataaaatgcttgctgagttacacaactggatggattcctagcctcgctggaagactttatgctctgctccctgtattatattaagggcagagtaaaaacaaaagcaaagtccccggagtttgtagctgaacagtcccaatgcagacattcctcttctatcgtgctttgctttaccaggcttcacaggtactgtatttttaacaaatcacaggtttgtgaaagccctatatggagcaagtccatagccttcatttttccaacagcgtttgctcacttcctgtccctgtatcctatgctggtggttctcacaatatttcagcctatctcctgattgtatttgtcatggtgatctgagatcagtaatgttactactatgacttgctgaaggctcagatgatacttagcatttttagcaagtaaatatttttaaattaagatatatacattgctttttcagatgtaacactattgcacacttcatagactacagcgtagtgtaaaaacacaacttttatatgtcctgggaaacctcagagttcatgtgactcactctactgtgatattctctttatcatcatggtctggaaccaaacccccagtattccccacgtgttaagtgcttagttcctgcagttgtgtctgactcttcgcaaacctatggactatagcctgccaggctcctctgcccatgggattctccaggcaagaatacagaagtgggtttccatgccctcctccaggggatcttcccaacctagggatcgaacctgcttctcctgcattgcagatggattctttactactgagccatcagggaatccctatttccaacatgaatctgtatttattatgtgccagactctgttctcaacagatcacacatattaactcttttaaacttatgtgttcctataaagtggtactttattatccccactttattggtaggaagactaaagcagggttaattatttgtccacttgacttcacattccaggatgtctggctctaagtgaatgatcacaccatcatgattatctgggtcatgaagatcttttttgtacagttcttctgtgtattcttgcgaccttttcttaatatcttctgcttctgttaggcccctaccatttctgtcctttattgagcccatctctccatgaaatgttctgttggtatctctaattttcttgaagtgatctctagtcttttcctttctatgttttcctctatttctttgcattgatcactgaggaaggctttcttatctttccttgctattgtttggaactctgcattcaaatgggtatatctttccttttctaatttgcttttcacttctcttcttttcacagctatttgtaagccctgctcagacagccattttgcttttttgcatttctttttcttaggaatggtcttgattcctgtctcctgtacagtgtcatgaacctcattccatagttcatcagccactcgatcagatctagtctcttaaatctatttcttacttccactgtatagtgataagggatttgatttaggtcaataagaagctgaagttgaacggttctatgaagacctacaagaccttttagaactaacacctaaaaaagatatccttttcattataggggactagaatgcaaaagtaagaagtcaagaaacacctggagtaacaggcaaatttggccttggaatgcacaatgaagcagggcaaagactaatagagttttgccaagaaaatgcactggtcatagcaaacaccctcttccaacaacacaagagaagactctacacatggacatcaccagatggtcaacactgaaatcagattgattatattctttgcagccaaagatggagaagctctatacagtcaacaaaaacaagaccaggagctgactgtggctcagatcatgaaatccttattaccaaattcagacttaaattgaagaaagtagggaaaaccactagaccattcaggtatgacctaaatcaaatcccttatgattatacagtggacgtgagaaatagatttaagggcctagatctgatagatagagtgcctgatgaactatggaatgaggtttttgacattgtacaggagacagggatcaagagcatccccatggaaaagaaatgcaaaaaagcaaaatggctgtctggggaggccttacaaatagctgtgaaaagaagagaagaaaaagcaaaggagaaaaggaaagatataagcatctgaatgcagagttccaaagaatagaaagaagagataagaaagccttcctcagcaatcaatgcaaagaaatagaggaaaagaacagaatgggaaagactagagatctcttcaagaaaattagagataccaagggaacatttcatgcaaagatgggctccataaaggacagaaatggtatggacctaacagaagcagaagatattaagaagatgtggcaagaatacccagaagaactgtacaaaaaagatcttcacgacccggataatcacgatggtgtgatcgctcatgtagagccaaacatcttggaatgtgaagtcgagtgggccttagaaagcatcactatgaacaaagctagtggagcggatggaattccagtggagctatttcaaatcctcaaagatgatgctgtcaaagtgctgcactcaatatgccagcaaatttggaaaactcagcagtggccacagggctggaaaaggtcagttttcattccaatcccaaagaaaggcaatgccaaagaatgctcaaactaccgcacaattgtactcagctcacatgttagtaaagtaatgctcaaaattctccaagccaggctttagcaatacatgaaccatgaacttccagatgttcaagctggttttagaaaaggcagaggaaccagagatcaaattgccaacatccgctggatcatggaaaaagcaagagagttgcagaaaaacatctatttctgctttattgactatgccaaagcctttgactgtgtggatcacaataaactgttgaaaattctgaaagagatggggataccagaccacctgacctgcctcttgagaaatctgtatgcaggtcagcaagcaacagttagaactggacatggaacaacagactggttccaaataggaaaaggagtacatcaaggctgtatattgtcaccctgcttatttaccttctatgcagagtacatcatgagaaacgctggactggaagaaacacaagctggaatcgtgattgccaggagaaatatcaataacctcagatatgcagatgacaccacccttatggcagaaagtgaagaggaactaaaaagccttttgatgaaagtgaaagaggagagtgaaaaagttggcttaaagctcaactttcagaaaatgaagatcatggcatctggtcccatcacttcatggcaaatagatggggaaacagtggaaacagtgtcagactttatttttctgggctccaaaatcactgcagatggtgactgcagccatgaaattacaagatgcttactccttggaagaaaagttatgcccagcctagatggtatattcaaaagcagagacattactttgctgactaaggtccgtctagttaaggctatagtttttccagtagtcatgtatgtatgtgagagttggactgtgaagaaagctgagcgccgaagaattgatgcttttgaactgtggtgttggagaagacttttgagagtcccttggactgcaaggagatccaaccagtccattctgaaggagatcagccctgggtgttctttggaaggaatgatgctaaatctgaaactccagtactttggccacctcatgcgaagagttgactcattggaaaagactttgatgctgggagggattgggggcaggaggagaaggggacgacagaagatgacatggctggatggcgtcactgactcgatggacgtgaatttgagtgaactccgggagttggtgatggacagggaggcctggcgtgctgcgattcatggggtcgcaaagagtcagacatgactgagcgactgaactgaactgaactgaactgaactgaatgatctagtggttttcccctctttcttcaatttaagtctgaatttggcaataaggagttcatgatctgagccacagtcagctcccggtcttgttgctgactgtgtagagcttctccatctttggctgcaaagaatataatcaatctgatttcggtgttgaccatctggtgatgtccatgtgtagagtcttctcttgtgctgttggaagagggtgtttgctatgaccagtgcattttcttggcaaaactctattagtctttgccctgcttcattgtgcattccaaggccaaatttgcctgttactccaggtgtttcttaacttcctaattttgcattccagtcccttataatgaaaaggacatcttttttggatgttagttctagaaggtcttgtaggtcttcatagaaccattcaacttcagcttcttcagcattactggttggggcatagacttggattactgtgatattgaatggtttgccttggagatgaacagagatcattctgtcatttttgagattgcatccaagtactgcctttcagactcttttgttgactatgatggctactccatttcttctgagggattcctgcccacaggagtagatataatggtcatctgagttaaattcacccattccagtccattttagttcactgattcctagaatgtcaatgttcactcttgtcatcatctgtttgaccacttccaatttgccttgattcatggacctaacattccagcttcctatacaatattgccccagagaccactttcaagcctaggttgtctgcctgtgtaatcagggccttaaccatagctagattgtctccccctgagaaacgggggccctgatctgggctggggacaaactctggctattctagtccctttgagccatgcgtggaaaggtcgtgtcatgtctctctgaccttcgccctggggtctggagccatgagatgttatataaaatagtatcttcttccttttctatttcctggcactgcttttttcttcttcaaggacttcctggcattgttatattttaaaatttacttatagcttattccttgtccctctctctcggatgtgagccccacaggagtgaggaatccactgtattcactcctcaacgtccagagcctggcagtataagtgtttaatacgtagtcatgaaaactcctctgggaaggctaagggtcccccaagtcagaagatggtgcagggaggaaaggctggcttgctgtatccccaggggcagctgttattgccagagttatggataaatttctggcaaaatagaggctgtgaatgagcagggacaggcagccttggaagggaagggacggggcagcaacacactagagaaacagggaggctcttagagggggtcctgagtcctgactgactacaataggacatccttccttatgccctcccagacccatggagggaacagacccattttcagtgctgacaacagagatcctcatgcaaggctctggattcaagaagaaagaaaagcttggagagaattcaagtgacaaagtgggaagtcaggtctcatcttcagtgagctgaatgcagggctgagtcatcccagactccaaagtccagcacctgggacagcggaggactgtagagggacctttcctccctgcccctcggtctcctcttctgaaaatgggggtgataataataccatcctcactgggctggtatgagaattgggtgaggaagggtatgtagtgtttaggacagcgcctggcacgaaataagagctctgtgagtcttaacctggaattactgccacaaggtctgttcctgttattattattgtagggagcccaccttgagaaccaggctggacttaggggcaggcagacctccagatgggaaactaaagaaaatcaggcagtcaggctccagagccagcccctctgcccaacctctgtgctccccactcccatacctgaaaggttggattttgtggtccagacctgagaccacagcatcattcaggcccaagtttgaatattgaatccactgtttccaacagtgtgtgtatttgggtttatcacttaacctccccatatcccagttttttcattttgaatatggggatatcaatagtaccaccaggctttccttgtggctcggacagtaaagaacccacctgcaaggcagggtttgatccatgggtcaggaagatcccctggagaagggaatgacaacccattccagtattcttgcctggagaattccatggacaggggagcctggctgcctacagtccatgggtctcaaagaattggatacaactgaacagttaacacacacacgatcagttcagtcagttcagttgctcagtcgtgtatgaggctttgagaccccaaggactgcagcacaccaggcctccctgtccatcaccaactcccggagtttactcaaactcatgtccattgagtcagtgatgccatccaaccatctcatcctctgtcatccccttctcctgttgccttcaatctttcccagcatcagggtctcttcaaatgagtcagttctttgaatcagatggccaaagtattagagtttcagcttcagcatcagtctttccaatgaatattcaggactgaattcctttagaatggactggttggatctccttgcagtccaaggactcttaagaggcttccccaacgccacagttcaaaagcatcaattcttcggcactcagctttctttatagtctaactcttacatccatacatgactactggaaaaaccatagctttgactagatggatctttgttggaaaagtaatgtttctgcttttgaatatgctgtctaggttggtcataactttccttccacggagcaagcgtcttctaatttcaaggctgcagtcaccatctgcagtgattttggagccccccaaaataaagtctaacacttttccattatttccccatctatttgccatgaagtgatgggaccagatgccatgatcttagttttctgaatgttgagctttaagccaacttttccactctactctttcactttcatcaagaagctctttagttttttgctttctgccataagggtggtgtcgtttgcgtatctgaggttattgatatttctcctggcaatcttggttctagcttggacttcatccagtccagtatttctcatgatgtactctgcatataagttcaataagcagggtgacagtatacagccttgacatactcttttcccaatttggaaccagtctgttgttctatctccagttctaactgttacttcctgaccagcatacagatttcttcaggaggcaggtcaggtggtctggtattcccatctcttgaagaattttccacagtttgttttgatccacacagggctttggcatagtcaataaagaagaagtagatgttttttctggaactctcttgcttttttgatgatccaactcatcgaagagtacccaccaatagtacccacaccaatagtagacacacacacaatagtacccaccaataatacaaatactaagtatttggaattatactcagtgttagttagtttttattattaacagaggaggaagaaagattagcatctcagatctatggaaaggaggctgttaagtggacctttattacttgtgttcacataactatcttgttttgatggaatgcagctgtttcctgtctgaggctctaatgtgtagaccatgggtgacagttccccagtatgaccactagatggcacgcatgttctttcctgcctgacgagccaagccagacacaatagtggaaagctaccttttatcatcctgtcgctgggctgcaacctttgcctacattctcatttactcctcacagcctcacagcagtccccagattaaaggacatatttcaccaaaaatgctaagcacagttcctggcatatgacatgttgctgctatttttacagagttgggactgagacacaggagagagtgagtaggcagcaggagcctgggttctaaaaggtagacccaactggctgcaagtttagcatcttttcccctaaaatttcctccctctgttccctctctgcacatagaactacagtgcagtctgtttcctgactccgtggaacttacagtccaaaatgtcctcatctctgttcattcattcctgggacagttctgctctcagtgtgccttctttcttgaaggccacagagatctgggtgctgccacctactctgcaggacccagtcactgtgggtcacaccattcagaccccacgttctctcccactgtactgctactgcttcagagcaagcccgtgggtttttaggtactgcacagcatcttcaaatcccaaactgctggatggtgtttattccatgtcaccatggctttgacatcaaaatattttgcaaggtttcctggaggcccttgggagggagatacatgaaaagaagatgggtcgcaagagaagagttcttgggcttaccgctgcttacaatagaaggcttcccaggtggcgccgaaagaaagtgaaagtgaaagctgctcagtgctgtctgactctttgtgactccatagtccatggaattctccaggccagaatactggaatgggtagtctttcccttctctaagggatcttcccaacccagggatcaaacccagttctcccacagtgcaggcagattctttaccagctgagccacaagggaagcccaagaatactgcaatgggtagcctatcccttctccagtggatctttctgacccaggaattgaactggggtctcctgcattgcaggtgattcttcacctcgtggtaaagaacccacctgccaatgcaggagacataagagatgtggtttcagtgcctgggttgagaggatcccctggaggagggcatggcaacctactctagtattcttgcctggagaatcccatcagaggagcctggcgggctaaagtctatagcgtcacaaagagtcagacatgactgacatgacttagcatgcacagaatgaatattccagaatatatctggaacatatatcacatgaaatattctgctgctaaagtaaaccatcaaacaccactccactgtgccatgataggtagacaagagatgaattttgagatcattcagagaaaatctccaggaaagggaataggtgagggaacatgttttaagtgaaataagtgagacagaaaaaaaacaaaaaacatactgaatggtatcatttatatgtggaatcttcaaaaagaaaaaaaaagtaaactcatagaaacataaagtagataactggttaccagggtcttaatggtggggtaatagggagaggctggttaaagggtacaaacttttcagctataagatgaatgaggtctgagacttccccagtggttcagtggttaagactctgtgcttccagtgcagggggcatgggttcaatacctggggacgaaactaagatcccacatgcagtgtggaatggccccgaaaacagatgggtcaggcctgaggatctaatgtaaaacatggtgactgtagtcaacaacattgtactgtattgttgaaatttgcaaagagaatagaaccctcaaaagataaatatgtgtggtgatggatgtgttaattaaccagatgaggggaatcctctcacaatgtatatgtctatcaaaccatcatgatatatgcttaagctatcgtcaggatttgttactggcttattcaacttcaatgttgaataaatcgataaatatatacaatttgtttccaaggaaaatgagatttgacttttgagtaggaatttgggggttatctgggaccccacttgccagcaccatgggcttgcctcattggaattgatcccctgcttctgatcttggtgagacctttggccacgttacacccatctggtaatctggcctttgccctttctgtgttgcagtgccctggtttccaagaaccattcaggaactcgacaactttgccaatcagattctcagctatggagctgaactggatgcagatcacccggtgagccctcggccccgcccatgaggctccctcagttcccccctccaccccctccaccccctttggagcaatgtgtctttgtttgcttgtatgacaaacatttattgagcgtctacttagacatcatcattatcatggttatctttgaagcaaatacagatcaccatccagaaactattatttatttatcatatatgtatgtaagggatgggtattcacatatgcacaaaaacacgtgcacatatgtaaatcacctttatttctgatttggtcctaccacagaggtttaaatcaagtgctcgggcgacactaagctactaacaactccaccggctacagtggggcagtgggggtggtgacctggaactggatttcaaagcctgagaagatgctggtcatataaggaaccaagaggctctgtgagccaagggagtagcatatgcaaaggctcagagtcctcagtatctggaatatttgggcatgagtctgagcaaactccaggagatggtaaaagacaggggagcctggcgtgctgaagtccatggggcgcaaagaattggaaacaactcagttactgaacaacaacagcaatatttggggaatggctgagttgatgtgttaggcgtgagggtgagagtgtcaggagatgaagctgggtggtgggttatggtcagattttaaaagatctgatgtgtcagatagagcatttgactgtatcctgtatccattcatatttttaagtagaggaccaaggttggagtcttactctcctttttagggtggagaactttagaaggagcagccttctagaggctgagaggtgaggcttctagaggtgagaaatgccaccattgcgttgactgtcatttactcgccgaccaggcaaatggttcctcagtctttaaacgacttggaggctgttttcactggcgatggttcctgtaactcacttagagcctcttcattttatcaggactctgttttctcctccgtctcagctatgtggtctttaccgctgagcaggttgtgaatgtgctcttcacaaaggctcttttcagtaagcaaagctgatgttcccattgtactgacagagtcactgaggcacaacaaaagtaaatgagtcatccctaagtcagcctaaactttggatccttcgactctttcatctgtgctcatagtacctgaggacagaagtctaaccagtgtcagaaatccaggccctttcacagagacaaagagcaagctatttgggcaggcaacccactccagtgttcttgcctggagaatcccagggacgggggagcctggtgggctgccgtctatggggttgcacagggtcggacacgactgaagcggcttagcagcagcagccttttaaaatatgaacagttgttgcttgttccaattcaaatagtaaaccccttagagtggactcaaaagtgcagaaaagcatgaggaagaatatgaagatcatccctaatcttagttatttctcttttttctcttggttctattctgcacttttttttaacttggagaaggtgttttataagcagaagcaaaggtgaatttcctccagttcctatacttcaaaacagaaaaaaaaaatcacctgttatactgtccaaaaccatcaatattttattaattcatttatttagacacgcgtgagtacacatggcgcttcccaggtggtgcagtggtagaaggaaacgggaacccactccagtattcttgcctggagaatcccatggaggaggagcctgggcggctgcagtccacggggtcgcaaagagtggtaaagaatctgcctgccaaatgcaggagatggagcagactcgggttcgatccttgagtcgggacgatccccggaagtaggaaatgacaacccactccagtattcttacctgggaaaccccttggacagaggagcctagtgggctaccgtctgtggggtcacagagtcggacacgactgagcatgcacgcacacagcatggttatacacattttaagtcagtgccatcaggtcctaacgcaccccccacaggaagcttgtaggagggttcagtctttcaggatgattcggcagtgaatcctcctgtctgtgcatctttaagtgaacttcccagagcttctctgattctcatttgtgaaattatttaaggatagaaaccggatttcgggctcctcatatctattacttaaacacctgctccctgcaaaaactagaggtacagttgcagcatttggaatctcgtcccatcttcctgggtagaaagcaactgagcggagcccggggaagcgggggcacacaaggagatggtctacatgccccgtgacacgtcttgggcagacccactttgccgcctgcccagggagacgagcatctccaaagactccgtttctcagaaatgctgtctggccaccctgcccccgtccctgggatgttttctcctcctcccaagctccccgcctcccgcccagctccgtgtcccttccgctggccacgtgctggctccctcggagcaacgggggaagaggccagtcctcagaaacggcccgttccctctccttacccttgtgtctcctcagaggcactcggggctggtcttaaaactccctggaattcattttctttacagacccagcccatggctttggctccctgacctctctgtgtcatgctttttatcataaaaatgcgatttatcaggtacacggtccccctgacgaggaggccaggctctctgtgttcctttctgtgacttttcatcagatctggggaactcgcgggccaaggacagagtaaaccctccagggtgcttccccgcagcctccaggccccgcagggcctggcctcgccgcaaggggtggctcgggcgttcttcccggaaggaccctctgttcctcccggtcccctggtgttcaggctgaccccctgcccttggcagtgtccactgacagctgagccagcatctcacttcagggctttcaaaaccgcccctttgaggaatgaggccaaggaagacttgttcccgaaatgcagggtagagggtacctgcctttcagcggcaatgtggaagcccttgccctcttctcctggctctctcccgccttcccccacaaccccgccttccttccacaaacactgattaagcaaataacatccacagctaatgtttctccagtgaggactgtatgccagatgctgtgctgaatgctttacccacattttcaaaatttcaatgttataacctccctgggaggattgaattttctcattttcagaggagacaactcagacaagcgggctgtgtagcctcacgtgtatgtggactgtgtcccaggctgtggagaggagaggggctgtaaatgattagtgagacctcgttccttctgccctccacaggccttcggtcatggggtagagtggggaggggtgtccagtcctcccaaacggatgccagagggggctaggatacagcctcgcaggcggaattcaaatgggtctagtttttgtttttagatcattaattaatttggttgctttgggtcttgtgggatctagtgccctgaccagagatcaaactggggggccccctgcattgggaacacagagtcttagccactgggtcaccagggaagtatcccaaattggtctgattcctgtttctaaaacggactctcctttctctgacatctcccagcctctgtgctcctgtccctgtcatttcctttctctgggatattttttcttattctctcacttctttgcctgctggcaaacctgtcttttcatcttttaaggcccagctcacatatcttggcttccctaaagccttcctcctgaactctttctcctggtcaagtttttcatactgatgctgcagagctatgtgcacggggttttatactttgaacacagtatcagctcaaaataaattcattgcctcagaggacttctttaatggtcatgtgcacagttcttaaattgtagtctttgaaaaaaattctcatgatcaaggaataaagtctgtattttagactctcattttaagcatctataagttccattatgtcactagaggctttggaaaatcctataaaaatgaaaccaattcaacctaatgttccttaaatttctttacccatggaacccccttttcatggaatacctagccacactatcttgaatggtagtgttccatggaacatagtttgagttcagtccagttcagttcagttgctcagtcgtgtctgactctttgtgaccccatgaactgcagcacgccaggcctccctgtccgtcaccaactcctggagtccacccagatccatgtccattgagttggtgatgccatccaaccatctcatcctctgtcgtccccttctcctcctgccctcagtctttcccagcctcagagtcatttccaatgagtcagttcttcgcatcaggtggccaaagtattggagtttcagcttcaaaatcagtcctaccaatgaacacccaggactgatctcctttaggatggactagttggatctccttgcagtccaagggattctcaagagtcttctccaacaccacggttcaaaagcatcaattcttcatttggtaaaatcataacacacaaagtacatggttaaacatcaggtttaaagagtcagatagtatatactatcagttctaaggtccctgtggactagaatggtttggaaagacttctggaaagagggaggtctgaggtgagccctctagtaacaaggtcagtagttgttgttcagttgctaagtcgtgtctgactctttgcaaccccatggactgaagcacaccaggcttccctgtctttcactgtttcctggagtttgctcagattcatgtccattgagtccatgatgccatccaaccatctcatcctctgctgccctcttctccttttgccttcaatctttcccagcctaagggtcttttccagtgagtcggcccttcccatcaggtgaccaaagtattgatcagtagggccaaatgcttatcaaacaacccccaaatctctatgaattaacccagtaaaagttcatttccagtgtaggtcaaaagggaaatttcctcccacagtcctgcagagatcaagtctccttcgacctagtggtagcatcctcatctgggtcctgggagccatctccattctgccaggcatgggagaattgctcctgggaggtttctatggtccaggatgaaaggtgactcacatcccttcacttcagtttcactgcctgcagctcagtcacagggttgctgctccctgaaaaagagaccaggaacagtggtttagcaatgctgtctgaaagcgagaaggcccagatcttggggaccaccagcagcctctgccacacagaccctaaccccatagattccctcttccagttttcctggcgcctgtacctgcttctaaactgaagatctgcctgagggggggctttctggtggggaaacattagccaatacaactgcttttctgtgtctctttctacttcttgatttaaatctctcaaattgcttttcaatatttccagaacatagatgctgagtttccctgctctccaagaagagccttgttctttcctgaaagcaggactatctttccaatatttctctttcccttttcctttgcccatccaaccttctccatcccagggtcctgtcaaggtctgttctaaggatcagtcagagagttgagtcatcaaagtctccttgtgcttctactaagctgctctgtcaaagtataacttttaaaaagttaagaacaactgtcatacaggtagatagtgaacatctctcaaagatctatgaactctggagtaagggaatcaataacatggcaaggacagtgcaaaggaagatataagagatgaaaacataaggtcattgaaaaatgggatgctggaatgagattacaaagatgggtacgtgtgattcagttcagttcagttcagtcgctcagtcgtgtccgactctttgcgaccccatgaatcgcagcacgccaggcctccctgtccatcaccatctcccagagttcactcagactcacgtccattgcgtctgtgatgccatccagccatcccatcctctgtcgtccccttctccttctgcccccaatccctcccagcatcagagtcttttcccatgagtcaactcttcacatcaggtggccaaagtactggagtttcagctttagcatcattccttccaaagaaatcccagggctgatctccttcagaatggactggttggatctccttgcagtccaagggaccctcaagagtcttctccaacaccacagttccaaagcatcaattcttcggcactcagccttcttcacagtccaactctcacatccatacatgaccacaggaaaaaccatagccttgactgaacggaccttagtcggcaaagtaatgtctctgcttttgaatataaacgataaagtcacaaccacgagtgctttctattggacagaagccatttgcaacttgatcataaaataaatgtttgcaacttactaatctgtaagggcttccccggtggctcagcggtagtctgcctgcaattccagagacacaggtttgatccctgggtcgggaagatcccctggaggtgggcatggcaacctcctccaatattcttgactggagaatcccatggaagagaggaacctggcaggctacattccacagggtcacaaacagtcagacatgactgaagtgacttagcatgcatgcattctttccagaagtcaaccctactgaagcaaaatcatactattcaacaccccaagtaaaaaaattgctgagattaaggcgagagattccaggtggactgcgggtgatgttacaactttgctcctatagacttctctcaccatcttcccatccactatgcctctcttctgactccccccaccactccttcaccaacaatatattttcctgtcaaaacatacttggttacatgcagtgcaatgaaaattgctgctattagcttaattgagacagggtgattataaataaattatgtgcagtcctacagaaattgctgctattagtccaaattgagatgggatgattagtcatcaccaactgtagcttaattcagagtgtcttccgcgtggtcacagagccctgtggccacctggcagcccagggaatgcaaggccaaatgcctgagaggtgggcttcaaggctgcagatctctattgctggtaacagaacaaaagtctgtgctgcctagttggcagggttcctttgtacattgagaatgaacttcttagaaacttgaagttggaaaagactatagttagaaaacttgccatatagaaaatttttgtaaaataatagtatacataattatatagataacataatggtatataaaatattatgcaatataaaatataataatattatatttggatgtgttgatacagctcactgtatcaatcttctgtccattcccataatgatttgagatgcatttttaatattattttactttttttctaattataaaaggggtagagataaattgggcttccccagtggctcagcagtaaagaattcgcctgtagtgtaggagacgctggtctagtgcctgggtcaggaagatgccctggaggagggcatggcaacccactccagtattcttgcctcgtgaatcctgcggacagaggagcctggtaggctatagcccatatgtttgcaaagagttggacacagctgaagtgactgagccaagataaattttcaagttgggattaacatatgtttttgtttaatcactacattgtgtccaactcttttgtgatgacctctctcttttgtgatagtagcccgccaggctcccctgtccatgggatttcccaggcaactggagcaggttgccatttccttctctatgggaggttcccgacccagggattgaacctgtgtctcctgcattggcaggcagattctttaccactgagccaccagagattgatatatacacactgctatatataaaatagataactaacaaggacctactatatagcacagggagctatacttaatattttgtagtaacctataatctgaaaaagatatatgtatgtatatgtattcagttatacatatatataaatgtataactgaatcactgtgccatataccagaaattaacatgattttgcaaatcaattatacttcaaataaataaataaaaataaaatgataaaataaacccaactgtaaaaaaaaaataaaggagggaaaaagaaacccacattcacagtaaaaaaaaaaaattactgtgtatttttacacattaaaagtacatttagaagcctaaatggcacagaagaataagaattcccatttcataccattgattggatttgggtgtatttattttatcattgtttttattctatttaaataatccctctgatatagttgctacctaccagagatacaattttatgttaagctttttttttttttttttattgttggaaaaatctttaaactacctagacaaaatacattgaaggtaaaagaaaaatgagccaaatggttagagaaactgtcatgggcatcccattctggagacatcataataaagtggaaatccactggttaagcgaatttgaattcttcactcctctccctgggtaactatctcagacttcaaaccaaaactcaccacctggctaggacaagaaaacctaagtggaggtgctgtttctgcagttaagggccccttggcaaatggctctatgggcttcactttctgtatatctacatcaaaatataaaaatagatattctccaaggcaactttacaagtgcaaatcctatgctttgtgtttagggactggaaagagccatgaccattaactaggacttgtagtgaggatgactgactgacaaacgttgaggttaaattttgagtctttaagtttggagatatgttcttcatttagcccagtagacaggttcctcaaagtgtttgttagcgctgcttggaaataaaatgatagagtccaattttctttaatttatttttatttatttttggacaccccacagggcatgtgggattttccctgaccagggactgagcccacggcccctacactgaaagtatggagtctcaacctgtgcaccgccagggaagtccaatagcgcccagttttcttactgtattgtcccaaagcaacttactttcatccagaagaactgggttcagcagtagttttacgttttcagattcctaagctttcctgcctgtagttaatgatttaaaatcattcagtgcttgagggaaaacactatagttatacattgtaataactatgttatggaatcttttctaagctgaataattgcttaatttgagatttagttttggaataaaaaactaaataatatggaaattttactttactttttcagtgtgaaacatttagatttttctttttctcaaaaaaacctataaatatcctaggaaacaagctagggaactccttcctcccttcctttctctccccctctatgtactcctccctccgccttatccttttcttccttctctattttaacaagtgttggtggttctttccatatgccaaccagactctgtatgctatggatacgcaggtgaaactacataatatacatggacccctggctctttggaattactggtagagttgggttttataaaacaaatgaacacaataaccaaccaaccaatcaagtgaagcagaaaacaatatctgaaagtcagggaatacttatcctttaaaaagagtctttaaatattactctccatggcataaacctttgttgtttgttcattaatgccttggtttggagggatggtggaacatagaaattgcaagctaaagtgatggatggtacagtttattggtagatgcttggagggaacaaagcaaggttctagagtgatgacactggtatcttgtttaactaaaatacagattacaatcaaatttttctggaaaatggtcttttttctagcttttttgaaatataattgacatacagcatcatgaagtttggatttacaccatgctgatttgatatgtgtgcatattttaaaatgattaccatatgtgattattataaacatataatatgattaccgtatgtaaggtcagttaacacctctgtcttttcacataagtaccattcttttcctgtggtgaaaacatttaagctctactctcttaccagctttcaagtataaagagtagcattttaactatagtcatcatcctgcacattagatccctagaacttgttcagcttgtaacttgaagtttgaccctttaaccaacatctccctgtttctcccactctccatcctctggcaaccaccaatctatcctttgcctatgaatttggcctttttagattccacatataagtgatgtcatacagtacttggtctttctctaacttatttcacttagtaaaatgctctcaagtttcacccatgttgtcagaaggtttttccttctcttttatggatgaataacatcccatcatatatatgtaccacattttctttatccatttatctgtcagcgaacacttagtttatttctgtatcttgactgtttgaatggggatgcagtggacatagaggtgcaggtacatctctaatagtgagtttatttcctttggatatatacgtacaagtaggattactggatcatatggcagttctatttttaattttttgaggaacctccgtactgttttccaaagtagttataccagtttacattcccatcagtagtacacaaagggttccttttctccacattcttgccaacactcatctttttgataatagctattctaacagatatgaagtgatagttcatggtgattttagtttcatcttactgatgattagtgatgttgagcatctcttcatatacctgttggccatttgtatatcttctttggaaaaatgcctgttctgatcctctgcctatttttaaatcagactatttgatttctgtctattgagttgtttgagtttcttgtatattttggatattaattccttagctgataaagagtttgcaaatgttttctcctattttattgattgccttttcatttggttaattgttccttttgctgtgcagaagcttttctgtttgatgtagtcccacttatttacttttgcttttgttgcttgtgcttttggtgtcatattcaaaaattcattttctaggccaaggtcaaggagcaatcctgagaaagaacaaaactagaggaattacatgccctgatttcaagctatattacaaagttatagcaatcaaaacattttagtatgggcataaagacagacagatgaactaatgggacagattaagagtctgaaaatagactcatgcacgtacagtcaactagtgtttgataagagagtgaagaatactagtgggggaaaactggatattcatatgcaaaagaatgaaattagacccctgtcttacaccactcaaaaaatgaacttgaaatgcagtaaattaggacctgaaatgataaaactccaagaagaaaacataaagaaaatgtccttttaaccagttgtgatcatctccaactctaggatgtgacctcccccaaccctcaacactgaaagacacacttggcctcttttcactcagaaatgtttacaaattgttgtggaaagtctgtctgcaagtcagcctcagaggagaaactagtatcatcctggttatgccctggggcagaatcttagttagtcaggcccctgccaagttttaaaggttgatatttcctgaagtgaagtgaaaagagtatggaactgagtgattcaaatcctaactttactggactactcttctctgaaccactgtttattctggaaagaaagggatcatcacactggtttaccttacatgtttcttgtgagagttataagttcctagcatgcacagactggcacataatagacactgaataaatggtattttttaaattgcaataccagtaagcatttacctattagtctattaagaagttagaggcagtgctggactcatacctttggtcaggagttgagtggctattgtatatcattttcatagacatttatcctaagaactctgcctaatttagcacatttatagattagaaatgctatagatgagatttctttaaaacccagacaccatttacgcttaggaatcccaagcgagagctcacattgaattgaaagtgtggctagtaatgtgtcactcatgatatcttgtgggacaatttattctcagattaactgagactttatttccagaatataatcaggggaaggcgagatgaagtgtcagtggtcaaaggcccccattcaaagcatgtgtagataggccagatttcaaagcctgaagaaatcaagtgtctcctttcttcctagggatttaaagatcctgtataccgagcaagacggaagcaatttgctgacattgcctacaactatagacagtaagtctgctcggcgtgttggtgggggatggggagaagaccatactctcctttgcccaaagttggaaaataccagcttggagaatccttccctctgtgtatgtttgtgtatgtttaaatccttcctttaataacacacattaaaaaagtcaccatgagataaaacaatattaccccctacaccagggcccagctctctcccaagctttgttgtgtaattatgcagtgacatctgacataattataaaaggcctcagtcctgaataaaagagcctctggtgtttctgcattaaaccgggaaaaaggagaaagaagtatttacattcaagaaggagttggctgctttaccgaattagtgaatcattggaggtttcaggagagccaagcctcagggttctacttttatctgatctgacccagatgcgaagggcaattttagaatgagtttatttttttctctctgggattccgccagattttagctagaggaaaatgcaaatatcaaatgttatttgggaagagaattgttttgctattttgagttcttgggaactacagaaatgctcccatgagaaacttagtgtttggggacctgagctccattcccgagttaagggtgtgagaaaagacgtgctcaagaagaaaaatacagggtttagaacatgaggtgatgggactttaacagctttgctagaatatgggggagataaaggagatgctactgctttgtatacagaataaaaacgaccttcacaagggaaaggcttccagagaaaattcctttatctgaatgaatcctggtagtagcaggatccagaacagcgctgaccttagtcatgtctagacccagctggactttggcttgtggcaagcagggatcacagaatgtggtgatctctctccccgtccccatcatggccccagcatggtcaggtggacacatcaggcacagacaagagtccttcttcagacagtcaataataataggtcatttttaatctccttgctatgtctggggctttgctaaatgcttaatgtacataatttcatttagtcttaataataactctccatttttcagatggaaaaactaaagctttagaacagcccagaaaataacttgctaaagtcatagatctggaaggtggcagagcctggttttgaactcaagcttttttaaccacaaagtcattctcaaccacttccttgagtgtctggggactctccaagtcaggagacaacacttctccagatgtcccaggagctgcttacggggtgcactcactccttcttggctcttgggacttgagggagagaaactcaaaccacctcttttccataaaaatattatacctggtgaagaagtgtggagttggttgaatgcttcctgattctggatggtcatgagttaaactggctactgaaaactatccagagatggctgatactcaaatgcacacgagatattttcaggcaattttacacctcatgttcagttcagttcagttcagttaagtcactcagtcatgtccgactctttgtaaccccatgaactgcagcacaccaggcctccctgtccatcaccaacggccagagtctacccaaacccatgtccgttgagtcggtgatgtcatccaaccatcctttgtcatccccttctcttcctgccctcaatctttcccaaggtcagggtcttttcaaatgagtcagctcttcacagcaggtaaccaaagtattggaatttcagcttcaacatcagtccttccaatgaacacccaggacagatctccttaaggatggactggttggatctccttgctgtccaagggactctcaagagtcttctccaacaccacagttcaaaaacatcaattctttggtgctcagctttcattatagtccaactctcacatccatacatgactactggaaaaaccatggccttgactagagggacctttgttggcaaagtaatgtctctgctttttaatatgctgtctaggttggtcataacttttctttcaaggagtaaccgtcttttaatttcatggctgaatcaccatctgcagtgcttttggagccccccaaaaataaagtcagccactgtttctactgtttccccatctatttgccatgaagtgatgggaccagatgccatgatcttagttttctgaatgttgagctttaggtcaacttttttactctcctctgtcactttcatcaagaggctctttagttcttcttcactttctgccgtaagggtagtgtcatatacatatctgaggttattgatatttctcccggcaatcttgattccagcttgtgcttcctccagccctgcgtttctcatgatgtactctgcatagaaggtaaataagcagggtgacaatatacagccttgatgtactccttttcctatttggaaccagtctgttgttctatgtccagttctaactgttgcttcccgacctgcatacaggtttctcaagaggcaggtcaggtggtctggtattcccatctctttcagaattttccagtttattgagatccacacagtcaaagactttggcatagtcaacaaagcaggagcagatttttttctggaactctcttgctttttcaatgatccagtagatgttggcaatttgatctctggttcctctgcctttgtaaaaccatcctgaacatctggaagttcacagttcacatattactgaagcctggcttggagaattttgagcattactttactagcgtgggagataagtgcaattgtgtggtagtttgagcattctttggcattgcctttctttgggattgaaatgaaaacggaccttttccagtcccgtgggcactgctgagttttccaaatttgctgacatattgagtgcagcactttcacagcatcatcttttaggatttagtgaagagaaattcacttcatgtagtgaattcacctcatgtagtgaagtgaaattaaaagacacttgctctttggaagaaaataaatgacgaacctagacaacatattaaaaggtagagacattgctttaccaacagatgtccgtctagtgaaagctatggtttttccattaatcaagtatggatgtgagagttggactgtaaagaaagctgagcactgaagaacttatgcttctgagctgtagtgttggagaagactgttgagagtctcttggatagtaaggagatcaaaccagtcaataataaaggaaatgagtcctgaatattcattggaaggactgatgctgaagctgaaactccaatactttggaaaagaccctgatgctaggaaagattgaaggcagaaggagaaggggaaatgacagagggtgaaggagaaggggaaatgacagagggtgaaatgattggatggcatcactgactcgatggacatgagtttgagtgaactccgggagttggtgatggacagggaagtctcatgctctagtccatggggttgcaaagagttggacatgactgagtgactgaactgaatagtgaagtgaaagtcactcagccacgtccaactctttgtgaccccatgaacctgccaggctcctctgttcatggaattctcaaggcaagaaagctggagtggtttgccattcccttctccaggggatcttcccaacccagggatcaaacccaagcctcccacattgcaggcagattctttaccagctgaggtaccagggaatcacctcgtatagatgaaccccaaatggttaagtgacatactgaagggcatgtgtctcattagggactgaacttgtcctccaatttaaagcctgtttctgacctcatctccgctcatctcttttgaacttctgatgctgttttccatcccttccctctttgcttttgtcttttatctcagcatctgttacagttgattctcattctttgaaggttacttgcttacattgatttgagaccccagcaaacacagggcatttccacattcatccccagatatgtgcagagcaagggaaaatgtgagtctcctgatgtatcagttcccaactgaggtcaaacaaggcaacactgccttcttgttttggcttttctactgtaaacaagtgtttcttttgcggtctctttagagccatgttgttgactttttgttcttttggttggtatttttgttgtttaaaatggccctccagcatagagctgaaattctgtctcatggtcttgagtacaggatggctctgacacgcctaatggggaaaatgtgtgttcaatatccttccttcaggcctgggctatagtgctgctggctgtgagttcagtgtgaatgaatcaaccatatacattaagtaaggtgtctttaaacaaagccatatgcaagacaaggttgggattatgagttgaaatgtgatctgggtcctgcacttcatgtaggagcaacggttcagggttcacttgagttcatggtgtcttgatggagcagaactgctatcagtaaggagaataaactctgttctactctctgaagttttaccttcttcctccttcaggcttcatctcagtctcctctgccctcctcctcctaccccaaaaatcatcatgcctttcaagacccagttttgaccctcttccatgggctctgccagcctccatgccaacagccccacattctggcctccagcaccttcccagtcctcctcccacatggaggtcaaaatcctgcccctggagtcatagattcacaggatcacttgatccaatgtgtttactctgttccaggacacatgccaagagcaagaccaacaaactccatgtcctctggggattattgagaaagacagacaatgacaaaaagaacaatacatgctatcggtatgaccaaagtcaaaacacgggtgtcatgaggccagataattaggaactttaattctgactggagggtattggttagaggaagtgacatttagactgagaactgaagatggagtaggcatttatcagcccaagagaatgaggaaagtgaacagaagggcaggtattgttagaaacagggcttttgttgtaagatgtatatttgggtccagaactgaattactggaggcagtcagaaagcagctaaaccctgttagcaaccttttcttggcccatccaccatgtgatgctctggttcctccctaagaatatttagcaaaagccttaaaacatcagtttgaagaggcactgacaaattactcttgtgtttaggggcaccaaattatttgccttggtaatgattacatgtatggggacttggtgtaaaataagactgagtgaggaagctgatactttcctggactataggtgctatcttgaatgccatctttggctggtggaataatgtaaaaccaggatcttctccttaaaatatggttttgtttttgtgggttttttttttggaagggagatcccaattggctgaaatcttatttcaagctaaattgataatttttatttcaagccaaattaatactttccctcaaatatcttggtttattttacttcctgagatcatagtttggtaaaacaattgatgatatattcaaagactgaggatcttgtgtaacctaggtctcttggtagaaggagaagatgaaagaaaatgcgcagaatttaattcctaagtagaccatggatggacagaggagcctagcaaggtcacatgatttagtgactaaacaacaataaatattcccagaacatcatgggtgttaaataaatatttgttgaatgaatgcatgagcctaggagaccctatgacagtaaagattcaaagtaccaagtcagatggagctagagattgtgtctagaaccacttagaaggcagctgctgcagagtttgattatgtttctggagtggggttagactttagaattttatcaaagaatatgctaaatggactataagaatttttatcttttagccgcaactgaactgaaacaaaaggggtgttttattggctcctataagtgcaaagtgtaaagggaatcgttgaggtggatctaggactccacttccattctccttccttccccctgactctggcgtcccctgtagtgatcttgctcgaaggcactggcctcatctctctcagaagtggacccagcacctctaggctgacaccacaatctggccagaggttctatctcttttcaacagaatcaataacatttctttcactgagtctcattggctctgatcaggaaatgggcccatctctcagccaatcactgtggccagggaaatgagacactctaattggccaggcctggtcacatgccccctctgaaggtaggaggggtggagtctcctcttatttgaacctgcagactgagagcggagaagggttctttactggcagaatgggaatgggtatggaactctggaacagcaaatgtcaaccaaggggatatctcattgtctagtatgttacagtctcttgaaaatgtgctgctgttatagcagagactttgctttctaaatgagaatctgttatggtgataatttccaactatccagtcgtattgtttgtcagcaccagtgttaggtactttatacatagtgtttcacttacctctccaccataccctccaaagagttacttgttattagcccatgtcctggctgtataggctcagagaggtttactaaattgcctgaggttactcagccaatggcagagcaaagcagtctacttacctctgaccttttccaaagcctgttctttctcttcgtcagcacttaaccctgaaacaatggtgcctctgtaggcaggtctttcgaggtgttcttttcacagttcctacaccattatagaccctctgggcttttaattcttaagcaaaaatcagtcttttccccctaccctctgcccatcactccatggaacataacagtgactttgttttcatgtctttggaagagctacaactctgaaagggaaagagggacctagtttggagcctgaagacaatccataattctaaggtaaacagtcttgccttgtcccagacactgtgtaccctgttaggaaacaggccggcagcccagagaacagtcatgagtctttgaagtcaggctttgtttggttttcattttttgctgttcagaacatggctcactcttagctggttttcaaaaggaccttttgaattaatgacgctcggataatagagtatcagctgggagtatattggaatccagaagcttgggctctcccctcccccacagttcagttcagttcagttctgctcagtcgctcagccgtgtccgactctttgagaccccatgaatcgcagcacgccaggcctccctgtccatcaccaactcccagaattcactcagactcacgtccatcgagtcagcaatgccatccagccatctcatcctctgtcgtccccttctcctcctgcccctaatccctcccagcatcagagtcttttccaatgagtcaactctccacatgaggtggccaaagtactggagtttcagctttagcatcattccttccaaagaaattccagggctgatctccttcataatggactggttggacctctttgtggtccaagggactctcaagagtcttctccagcaccacagttcaaaagcatcaattcttcagtgctcagccttcttcacagtccaactctcacatccatacatgaccacaggaaaaaccatagttaaacttttccaaaaaactttagaggaagcaacatcccaaactcattctatgaagccttcattgacctaaatcaaagttagacaaccatactaatcaaccaatcagtggatatcaaggtggcaaagtaggaaaacatggaacccacctttggctacaaacacagcaaaaacacatctacatgaggaaaatttcttacaaaaaaaccacctggaaactggcagaagatctcttatacaaccaaagctacaagaaagatctccacataaccagtgggatcagaaaaaaaaaagaatagaccaatatctctgataattgttgatataaaacttgctaatactaccaaatctaattcagcagaatgtttaaaagattatacaccataaccaaatgatttcttcctagaatgcaaggatagtacaacctgaaaaaaatgaatgtaacatgccacattaacagaatgaaggatgaagttcagttcagcccagttcagttgctcagtcgtgtccgactctttgtgaccccatgaactgcagcacaccaggcctccctgtccatcaccaactcccggagtccacccaaatccatgtccattgagttggtgataccatccaaccatctcatcctctgtcgtcctcttctcctcctatcctcaatctttcccaggtcagggtcttttcaaatgagtcagctctttgcaacaggtagccaaagtattggagtttcagcttcaaaatcagtcctaccaatgaacacccaggactgatctcctttaggatggactagttggatctccttgcagtccaagggactctcaagagtcttctccaacaccacacttcagaagcatcaattcttcgatgctcagctttctttatagtccaactctcacatccatacatgaccactggaaaaaccatagcattgactaaacggacctttgttggcaaagtaatgtctctgctttttaatatgccatctaggttcgtcaccactttctgtccaaagagtaagcgtcttgcaatttcatggctgcagtgaccatctgcagtgattttggagcccagaaaaataaagtctgacactgtttccactgtttccccatctatttgccatgaagtgatgggaccagatgccatgatcttagttttctgaatgttgagttttaagccaactttttcactctcctctttcactttcatcaagaggctctttagttcttcttcaatttctgccataagggtggtgtcatctgcatatctgaggttattgatatttctcccggcaatcttgaattcagcttgtgcttcatccagcccagcgtttctcatgatgtactctgcatagaagttaaatatgtagggtgacaatatacagccttgacatactccttttcctatttggaatcagtttgttgttccatgtccagttctaactcttgcttcctgacatacagatttctcaggaggcaggtcaggtggtctggtattcccatctctttcagaattttccacagtttattgtgatccacacagtcaaagcctttggaacagtcaataaggcagaaatagatgtttttctggaattctcttgctatttccatgatccagcagatattggcaatttgatctctggttcctctgccttttctaaaaccagcttgaacatctggaagttcacggtcatgtattgctgacgcttggcttggagaattttaagcattactttattatcatgtgagatgagtgcaattttgtggtagtttgagcattctttggcattgcctttctttgggattggaatgaaaactgagcttttccagttctgtggccatggctgagctttccaaatttgctggcatattaagtgcagcactttcacagcatcctctttcaggatttgaaatagctcagttggaattccatcacctccactagctttgtctgtaatgatgcttcctaaggcccacttgacatcacattccaggatgtctggctctaggtgagtgaccacaccatcgtgattatctgggttgtgaagatcttttttgtacagttcttctgtgtattcttgccacctcttcttaataacttctgcttctgttaggtccctgccattttggtatatatagcaattaatgcacaaaaatcatttcacagaattcaacaacctttcaatgtaaaaactcaacaaactagatacaggcgaaaactactttgatataaaaaattaaaattcacaattagcattgtactcaatggtaaaaagctgaaatctttttctctacaatcatgaacagacgaagatacccactgtctccacttctattcaacacagtactggaagtcccagacagcggttaggtaataaaataaatcaaagtcatccatatgggaaaggaagaagcaaaatgatctctatttacagatgatataatcttatgtgtaaaaaatcctaaacattccattgaaaaactgttagaataaatgaattcaaagttgcaagatacacaactaatacaaaatcacatatgtttctatacactaaaaatcagttcgtgggtcattcacccagcagtaatgggacttattttatcatgattatgcccctcctacagtctcctgtggcttctactttatctttggacatgaggttgtttttctttctttttttttttttttaaagtgagttccagcatcctcccctcccccacaggttcaggatataaggggtaggtccaacatatgtacttcagcaaactctccatagttttgttatgtcatagcaacagattctgagtaagcagatcttatacctagcatgcatttaaatactcttataacatcctggggcagaaacaccaaatccagcaagtttatgcccactcaacaagggatctcaaactcatggtgcatatagtaaatccacttgagcccacaggtatggttgctttagttgacaatacaaaacactattgttttgcttgagcttggatgcttttgttcagaaagaggatgtattcttcacttgtctcagtccccatcctcctattatctatccctgctactttacacattaaatgctacatgttaaatgcacttctgaatgtaagtgcatttccacactgggtagagtaggatatagaagagcaggaaagcccagtagttccccatgaatgagaagaaatccttggtgcagtgggtaaggttgcaagcttctgtccttgcttaaccaagtcacatgaatgtttcctatatcaagaagtggaatttttctctttcagataacttatgaaataggaaatccactgtcgtctggggtggcagctcatggactctggacccatgtccctctccccaagctccttcaccctttcctctgtacctgccctgctgctgacaaatatttcatgtctgtttcctagcgggcagcccattcctcgagtggaatacacagaggaagaaaagaaaacatgggggacggtgttcaggaccctgaagtccttgtataagacccatgcttgctatgagcacaaccacatttttccccttctggaaaagtattgcggcttccgtgaagataacattccccagctcgaagaggtttctcagtttctgcagagtaagtgcacatctgggtcaaaaggttgggggctggggatggaaagggggagagaaggaaatttaggcaagtgtgagtgtgttcgtgctgatgcaggcaggttgattctcccaggaaaatgagtatttcactgctgggctctgcctccctgccaggcccccaaaatccagtgtggattttgccatgtctatatccctgaaaggtttttttaatgctcaaagcccaaggtgcctagtcagggttctccccgcagctcctgctatgttatgagctggctgcagtgtgcatttgtgtaagacatgcactatttgtgccaagagatctgagccctaagtctattcatctggtctctggaatcttgttttgatcctctctagttgggagaaccttccttagtttagtcatttgtcaaatggagaccatccaccatttagtctttctcatagggaaattatgagaatgaaatcacatactgaaagtgaaagcctagcgctcatgtatagtagatgctcactgagtttgggatgcattgcaatctgagtaattcagtaggtaaacaggtgattgaactgacctgcccatcatttcaggggagaaaagtgttttcttttctgccaggagctgttgactcagcaaaaccaagataaacagtcaacacatgttaaacacctactatgtgctaagtaaaatgcaggaaattagggaggcagaccacagggtaatagaaggaagagttttctatgcctcagagctacacagagacggtgtggccagctctagggcaagaagccagggaagctacctggtcgggagggaagtgggagctggactagatggggagtgagttggatgaccttttgaatccctcctatttagagtctttactattcagatagagaggagcagggctcaaacaaaataaacttcaacctgagggtctaagatacataaaccaagggacaaaggagtcttaaagatattctttggctagttatccatgttgctatggccaataacaagaagaatacaacagtaatactagtagttgtgtgtgtgtctgtgtatgtgtgtgtgtgcatgcacacacatgcatgcatgtgctcagttgtgtctgactcttttgcaaccccaaagactgcagcctatcaggctcctctgtccacggaattttccaggcaagaatactggagtgggttgccatttcctcctccaggggaccttcctgactcagggattgaacccatgtctcctgcattggcagctggattctttaccaccaattgatggggtggcaggtgggggtgggaaagaaatgtgtgctaagtcgttccagtcgtgtctgagtctttacaaccccataggctatagccctctaggcttctctgtccacggggattctccaggcaagaatactggagtgggttgccatgatctcctccaggggaccttcccaacccaggggtcgaacctgggtcttcagcgctgcaggcaaattctttaccgtctgaacaaccagggaagccaatgactatatactgcaccagtgcctaggagagaagtccagttcagtttagttgcccagttgtgtctgactcattgcgaccccatggactgcagcatgtcagtcttccctgtccatcaccaactcccgggcttgctcaaactcctgtccctcgagtcagtgatgccatccaaccatctcatcctctgtcgtccccttttcctgccttcaatctttcccagtatcagggtcttttccaatgagtcagttcttcacatcaggtggccaaagtattggagtttcagtttcaacatcagtccttcgaatgaatatccaggactgatttcctttaggatggactggctggatctccttgcagtccaagggactctcaagagtcttctccaacactacagttcaaaagcatcagttcttcagtgctcagccttctttatagtccagctctcacatccatacacgactactagaaaaaccataactttgactagataggcctttgttggcaaagtagtgtctctgctttttaatatgctgtctaggttgatcatagcttttattccaaggagcaagcttcttttaatttcatggctgcagtcaccatttgcagtgattttggagcccaagaaaataaagtctctcactgtttccattgtttccccatctatttgccatgaaatgatgggaccagatgcccattggagaagacaatggcaaacctcttcagaattcttgccttgagaaccccatgaacagtagaagagaagcatcgagtagtgattatagaaacagactctgaagccagagtgctggtagctgtgaccttgggcagagctttaattgctgcgtcttctcagctcccccatctgtaaagtgcagagaataggagctctatctcctagagttacaatgaggattaattcgtgtatataaaatgcttaaacctgtgtctgacacatggtgggtattatacagcattaactattactatcatgatcatggtcgttaccattctccttccaggtctgaaattagggagattgagagacagatacaagagccagaggatgggtgatcaaaatggtatcggtattttattaccaatagaagctgcttcgagaatgtggtatagatgtgtaggcaaaatggactttctaatgtttcacccctggattaggtaaactaacttgccagttaattcactggcacagtatctagtccattggctggccaagagccgactagaatgtgttcctgtgtggacagtcaagagagaaagggcagagagggtgaagttgagaatattcatttcctcttctcaaatcttcagtcagagaagtcactgttcctcatggggtgtacctatatgtgctatatggaaagcactacagaaaagctagaagtgctcctttcatattcttccctcctgggaagcagaatgaaaattccctgctactctggaaacttgagaagtaaggaataagtgttccaccctaacaaacaataatgaaagtttaaatttattggaagtttccatgtgctaggctctaagtcttttatacttattagctcttctgattctcagaataatcttaagaaatatctccccacattttgcacatgagaaaactgaggctcagagaggtgaagttacctggcccagatcacccagctagaaagtagtaaggcatagatttgaagtcacttctgcttgacgtcaatgtacacgctcttggacagttgaatgtactgttttcctccctaacggtcttctcctctggctccctgtggtgggctctgagttttctttctcctttgcttcgcaggttgcactggtttccgcctccgcccggtggctggcctactttcttctcgggatttcttgggtggcctggctttccgagtcttccactgcactcagtacatcagacatgggtctaagcccatgtatacaccagaaccgtgagtactgtccttttgctatcagtttctagccacaatgagttctgtctcacccggctctaagaacagggctggtccacaggactcattgcctgcattgtttgatatagtgcagccagggaatttcatctcttctggggatttcccccatctaaatagactctgtcatgactggagtttaggcatcttttgaatcaaaggttcagatgagagaatgagagttcacattcaaattccaaagagattgtagaaaactcagagctatgaaatgccaaatgggaataggaacaagtgacagccaggctgtctcaacacttcctgattcctggatcacctctagatgattctcatctctctttgcctaggttgggtctcagctgaagatacagaatgtctggccactatgcttcttatttttgcatgtagccatctccttagacagctagaactgaagtagtttatgtgaacagtcagcaggataccccaaatgatctttcccagcctgcaaaattcattactagaaatcagaaaaggcctattcctagtaaatctggcacctagagtgttaaataaatgtaagctttcttctgtaaccagtgtcagccccctccaggataaaacaggagtgtcactaatattattattgttgctgttattattacttctactattattattatttagttctcatggagaataactgagcatattgtatctgcccagggatgtcaataccaaggagaaaacttgggatgggaagtgtttgtgatccactgttcattcgggtgtatggctgcccataggaatactggctcttttgttctacatcccacggggcatacactcaaaatcccctggccactgtgttctgtcctgtcccttacatttcttttcccttcttctttttctcttgtatcttgtttcaactgataccaagccttacataccccttattcttaggaatgaggttataagactgaatgagttccttgttgctttctgcccattcctcgtgtagaaagactgagtcctgcatagcttataaccctcctcccctccaagctctgtgctttttgtttttcagggacatatgccatgagctcttgggacatgtacctttgttttcggatcgcagctttgcccagttttcccaggtgagcaattcatttctctagccttctagttacagggtgagacctggattgctcagataaattgaaccaatggaggggccctcatgtcctctgcgagggtggaatccaggtatagttctgtgaccccatcacaggtgggattgtggtcccatggggctggctaattaccaattccaggaaccacagcctggagctggtgatttggtcatcctaggaatcgtgtgttattgacttagctaatttcacctgttctactggatgtagtttaagaaccttttcatctgtgaaaacctcccagatccccatgcagaagtaaccttgctttcttccaagttcttgtggcatctttcccctcatattttgggtctttgccactttctaccttatcaggcaatcatttttgtatatgctttaagtaagtaagatggcatttgccaagagtctagtgccaatagcctgactcatggcaaaaaataaagagccagttgccttctcaccatcatcaaggcagcaggctaaactttgattcatctattatagtggtgagcaggctcaaaaatgctttttggatgactgaaagaatttcacaaattctcttctggcactgagaggcagccccaaaccatggtgggcaactggaatggtgggagagtggaatggtagtgctgtgtagcccggagcaagtcgccacaccaccctgcatctcagcatagaggtggatccgtaaagagcccttcctgatagtctccttcctcacaaggaggaatagtgatcaaatagaatgacctatgagcaaatgctgggccaaggatgaatttcacagtaatgggattgtatgtgaatcacttaagcatcttcctttagccagaaagaaagaactatttctactcttgaatgaggaggctgctacatgatagctgaaacaaacagagagcaaaattaactgcttactaaacaaggaaaaatggtacttgttagacacagcctctctaaacaaagaaaacggctgctttaatgtatgttagatgctcagtcgtgtctgactctttgcgaccccatggactgtagcccaccaggctcctctgtccatgggattctccaggcaggaataccagagtgggttgccacttcctcctccagggggtctaacaaaccgagggactgaacccctgtctcctctgcctcctgcattggcaggcagattctttaccactgagccaccttatgtgggcttgggggaacggcgaagttcagaaattgttggacttttagaagtgggagtgtttagaaattaggtgaacctttgctgtggaagtgtcaccacaggagtagctgactttcagaagtgtggttcctgctgccaagatgtcatagattgctttcaaactaggattggaagtttttattctcattactaaaagttttgcttcccagtcagaggctaaatggccatcctccgtaagccattttcaatttgggcatccccacagaggggttggaagttacctgaatcagcagacaggagcttctggctcatccgtgttcctggttccaattttgacctggacagttccaaagcagggagttattttgagttccctgagcatattcttttttgatctaaaagcaggactagtttcccactggagtgcaggatggagtggggatgaagcactttgggttccttgttttaggcaagatctgggctcacaaagaatagtggctatgagaacagggaaccctttccaccttgcatttattgatgatgacttctgttagacaggcttcccaggtggtgctagtggtaaagaacccgcctgccagttcaagagacataagagacgtgggttcagcctctaagttgggaagatcccctggaggaggacattgcctctccttaaagagatttttcacaggctgtgcatttgacctgtacaatgctctttcttcagctatcagcagagccaataacagcctcacttccatcaagtctttgctcaaatatcacctttccaatgatgcttttaaattgtggtgctggagaagactcttgagagtcccttagactatagggagattaaaccagccgatcctaaaagaaatcaaccctgaatgttcattggaaggactgatgctaaagctgaagctccagtactttggctacctgatgtgatgagctgactcattagaagagaccctgatgctgggaatgatcgaggacaggaagaaaaggaggtgacagagaatgagatggttggatggcatcactgattcaatggacatgagtttgagcaaattgagtgaagcacaaggaagcctggaatgcctcagtccatgggttgcaaagagtcagacatgacttcgagattgaacaacagcaacagagtgatttttaaaaatcattctggggccttatttaaaatcacagcctctggacttctctgatggtccagaggttaagaatctgccttccaatgcaggcatttgaaggttcaattctatccctggttggggaactaaggtgccatatgctgccgagcaactaatcccgcatgcctgaactagagagcctgtatgctgcacctactgagcctgcaagcggcaacgaagacccaatacagcaacaacaacaaaaaaaaagatgaaggatagggcaatcaaagccccggaccccacccctgcttctctggcactctggatcccccttgtccctttctccttttgtttcttctttccaaagaacttatcacctttaacatgcttattatttactgtctatccacttaaatgtaaaggtcagggatctttatcaatttcgtacattacctgtcacatagaaggcattcaataaatatttttggaataaatgaatgcatattagtaggaaataaatataatatataagcacacacacatattatatttgtatacatatatgtgctctgtctgctgcaaatcagtctggagcaaatgctgtaaaaagagacagagaccacgaggggtttctgacttgggagctgtgataagaagtggccagtgacatctcagactctccagctatgcatatacctggatagatgtcaagcacttcacagcaagtctcctatggtatcttcaggggacttgatgaagtcccatctggtgcaccaggaatattccacttgaactgtggaaggataatcaggacttgaaacattagacacaaccaactgtgtgaccttgagcaggtcatctcttttctctgtgcctcagttttctcttttgtaaagtgaatagaggaccaagtgatggagaaaggcttcctccatcctcgagatctgtgattctatgaagtgtggtcagggaagccttgacagaacagttaagagtctacctgggcccttctgaaggtatctagctgctcttcctgtggtcaaatacgaggttggatctgagggtcaaggttgaaggtcagcagaccccagccatgtcagtgccggtttctctgccgttacaggagatcggccttgcctccctgggtgcacctgatgagtacgttgagaaacttgcaacagtaagtaccctctctccctggtggatggtgggaatgtctcgggtctttgaaactttgctgttttcctgaaagccagatcatttgaaaaaagaaaaaatctgaatgccttgcttacatttgcacaagtgacatttcacattttgatttcttagtggtttgattttgaaatcaactacatgtatatgtttacatgtaactaaacagtatgtcttgaaagcaccaacaggctgtaatgatagtcgttgaaaatcgccttgagtgggtgggaagtagtctagattcgcatctttgaaaaggaagatatttactttctacctgacactgcagccagcattgcatctttcctttcttagatccaaggtgggagtgggaactgacttttcccttctaaccaaacactctcttccccaggggtgtgatgactgtcatccatagataccatggatgagcaactctgcacagaagctttccttcctgtagactcctttccaacttgagtgattccctccctaacctctaagccacattttttaataatgtgctcagcttggaagataagaaatgaaactttataatggaactagggacttcagattaatgcacacatatcattcagctcagttcagttcagtttagttgctcagttgtatctgactctttgcgactccatggactgcagcactccaggcttccctgtcatcatgatatatcagtttagaagtttgtgaatttaatttaagagaaggttgaaacctcccagatcctttctcactgcccagctgctcagagaccctgggcaagtagcttttgcaccctcacctctaaaaatggatacaattgtttatatcatttccatctcaacagtacaccatgaggatcttgaggatcaaaagggttaaatttgtgtggatgtaagtttttaaatgccagatgctatggtgatacaaaaagcaactttcaaggaaactgcagaacttgatagaatctctcatttgtaagaaaaaaataataatcacagagcattaagttacctgctgtaattgtgatacaagtattcattaccaacctagcttctcaaaaataatcttattattgatatactgatctgagaatagtcttgggccccttgctctgcccttgagatgctgtgtcactgtatgtgtgtaacttgacctctctgggctaaagatgtctcatctgtatgtgaggagctcagacttactcagttctgacagccttcccaggtttcacattctctagtgcaataaacagacttacctagaaaccctgggctggaagaagcacaagctggaatcaagattgctgggagaaatatcaataacttcagatatggagatgacaccacccttatggcagaaagtgaagaggaactaaaaagcctcttgatgaaagtgaaggaggagagtgaaaaagttggcttaaagttcaacattcagaaaactaagatcatggcatctggccccatcacttcataggaaatagatggggaaacagtggaaacagtgtcagattttattttggggggctccaaaatcactgcagatggtgactgcagccatgaaattaaaagacgctttgagactccttggaaggaaagttatgaccaacctagacagcatattcaaaagcgagacattacttttccaacaatggtctgtctagtcaaggctatggtttttccagtggtcatgtatggatgtgagagttggtctgtgaagaaagctgagcaccaaagaattgatgcttttgaactgtggtgttggagaaaactcttgagagtcccttggactgcaaggagatccaaccagtccatcctaaaggagaccagtcctgggtgttcattggaaggactgatgctgaggctgaaactccaatacattggccacctcatgcaaagagttgactcattggaaaagaccctgatgctgggagggattgggggcaggacaagaaggggatgacaggatgagatggctggatggcatcaccgactctatggacatgagtttgggtgaactctgggatttggtgatggacaggaaggcctggcgtgatgcggttcatggggttgcaaagagtcagacacaactgagtgatactgaactgaactgaactgagaaaccctgggccttggctttctcttggccctatgcagtacgaaagaaagtgaaagtcactcagtcgtgtctgactctttgcgatcccatggactatacagtccatggacttctccaggccagaatacaggagtgggtagcctttctcttctccagggaatcttcccaacagggatcaaacctaggtctcccacattgcaggtggatttttaccagctgagccacaagggaagcctgagaatcctggagtgggtagcctatcccttctccagcagatgttcctgacccaggaatcaattctaggacgttatttcccaagccatctatctgggacatgttgcactgggagctactgaaagaaaaaaacttggttatttgggaggctgagtgcagtgaccgacagggttttagcacagattgttggatggtggggatattgaataataaccttagaactttgaggccaaataaggaagcagataactcaataaaatgcagtgatgaagtttattgtgggtaacttatacacaggaaagggcaggtagatagcagccagaggctttagcaaccacactctatgccatgaaaaggatatgggaggttaaaggggccaacactactaagatccagtgcagccaaattaaaatttattagttaattaattaaaggggccaaagctaagaatagaatctgattactaagggagaagcaggttcacactgtcaggagttaggggttttttcctccccctggaaggtctcatgaccattatttcttgtgaggcattacccatctgcctcagcaaaagtttttatatgtcagacaaagtttttatatcagataagaagggtaaaagttgatgaggaacttatctggttcattccttgtgagtagactaaagttcaaccatgcagaaaaggatggggttaagactttaggcttagatggagctgacaaaatggagctggtgtggttcagccacacagatgacaagatactccctcactgattctatcatgacccaattccctacctcccactgagcctgatgggattgtctggtaactccagccaacatgaaggagcaactccctctagctgatgccatagagaagaaagtgggaggggtggaggagttcctgtcatagagagtggcttgttggggtatcctttgggggcttccttaatactctcccacaacttcccatcattatcttgcattcagttcagttcagttcaatcactcagttgtgtctgactctttgcaaccccatggactgcagcacaccagcttccctgtcatcaccaactcctggaggctgctcaaactcatgtccatcgagtcagtggtgccatccagccatctcaccctctgtcctccccttctcctcctgccttcaatctttcccagcatcagggtcttttccaaggagtcagttcttcatatcaggtggccaaagtattggagtttcagcttcagcgtcttgcattcagccatcttaattcaacaggtaactggataggataagacagaatacaaaaccatgaccccagatcaggctgattcagagaacagacctgcacaaactcccacctgggcaccttgtctctggccctgggtcacctgctgcttccttgtgtagactttgaacttgactttccatttcagatttactggtttactgtggagtttgggctctgcaagcaaggagactccataaaggcatatggtgctgggctcctgtcatcctttggtgaattacaggtatgaaccaaagagaaaccaaggatggatttgtgagtgctaggtacagcagaccattcattttccctttgtgctctcgaaaccctcttatatccactttgaaactgaacctcagagtttctccttaagtgattgattgacctcttagcagctatgatttggtcatgactgtgggttttagagattgaaattgaactgcagatacacaggtctccagaccagaggggcctcctgaatctagggatgaactgtgcattgggacataggcaaacacatgccagaaaatgtggctgctcccacaccgtctgttgatcacgttacctgaaaatggttggggtaaaatattccttttgatcctgattgctgtctagtatgtgcaaaataatttagttcacctgcattgggactaggctatggaagaaatcaggataaggtgggaggggatacacaaatagcctaggggttgtggcagggaccagcagccctgacttaaccatgacgactttccatttgggacccgcagtattgcctatcaggcaagccgaagctccttcctctggaactggagaagaccgctgtccaggagtatacgatcacagagttccagcctctgtattatgtggctgagagttttaatgatgccaaggagaaagtgaggtgagatggtaaccacgctgggccagcagcccttgggacctcctgacttgacctggtgctgccggtgtatgggaggttgggcaggagaatggactccagggcctacagcagcagcgtgcatcagacagtattctctccccaccctatctctttctgctggggtccagccccaatggatccagggtaatttgaaggggagatggagtaggcgtcctaggaaaaagctatttaattagaaatataaagagagattagaaaaggatagtgtagtaggaaatattagtggagaaaaggagctgaataacttggtttacatggaaaaccaataaaaccttgagacaagaggtttgcaccatctacataggccaccggtgcccacttgaatagcagaagggccccaccttgggctccctctcgtgtgggtcttagaagcgagggcaagtaagtagacatggcaagcctccacctccagatgggaattcagccagaaggggagagaaagaacgacacgggggaatcagtctttccagaaactgatctgttttctttattttcaggtttgcttatatactttttgttacacatagagatagaatacagagtcacgtggggtcagcaatcctgacccttgtcaaaatcaggtgcttcatataaatgtatacaaaggtcttaggggttttacatcatcttctggccatgaggcctgctgacattttatggccctttctgataacggcagtcaaccagaaaacttattttttccaggggtgattttttcttaaaccaggcgccaccctccaaaggtaccagatagagttgcattcctgtagggtgagggtgtagtgggttacaattaagaagagaatttatttagcctaaggtttaacatgattaatcttaaaggttaatacttatttctcctatatgctagttatattcattaatgtgtataagggcaaggaatatggagacttaacagcaaatattggcccaacaaatgaaaacccttcaccagtataatttctaatcaacccactatactaataatttctaacttctcaaaagaatctgtatttagaaagtttaaagcatctcatgcctctcactgttgggaggctgtaaacaatcacatgtggccagacaaacctgttcaggcaggctagagaaccttcagtgcattggagaaggaaatggcaacccactccagtgttcttgcctggagaatcccaggggtggcggagcccagtgggctgccatctgtggggtcgcacagagtcggatacgactgaagcaacttagcagcagcagcagcagcatagaaccttcagaggagtttgtaagttgaaacattcttgtcacgcccaggaatttttattgactggagctgcaagttaactccttctccgatagaagtggtgggggacagcgccccgtaaagtcagaggtataggtgaaagcataaagcagtaaagtaggcagacgctggttttgggggtagacgctcgggaacagggggtctcctgaggctcgatgccgcctttgcgtatgctgtgcctccttcctcatgacccttgccacgggcggagttcctcacgctggctcccggcatctttccactccctgttgagagaagtgccttcctttgcaggaccccatttcatagcttgctagccgaatgtgatgacccctgtagaaaggcctaccaccctatccttgctcagtgtggccatcaggttcacccctgaactctcctatgttcagagcggccacagaggtacccccatcaaagagccctagatgtcttctcacccaaggaagtcccttgtcacttaaatctcccatatagttgcataactcacccctcccctctcttcagcctttacccacatttaaccttttttgtgtgtctttctctaaccaacttacttaaaatcaccacccagccctgtccccccagtactctgtacctgctctgtgatttacttttctccttagcacttattaatgtctaaaatcttgtatgatttaaggtccatgaggataggggggtttgtcctttctgctctttccctccacttcaagaacagtgccagacacatagcaagcactcagtattgctgttgttcagttgctaagtcatgtcaggctctttgcgaccccacagactgcagcacaccagacttacttgtccttcactgtctcctggagtttgctcaaactcatgtctattgggtcgtgatgccatccaaccatctcatcctctgaatcagtgagtaattggcaaatgtgccaatctcagaggcaattcagcaccaggctggtggagtggtaccaggactctgagactctcagccctccaagattgccctgccatcagcctgctagagccacactgctcccagcgggagatatgctgggcagagggtctgcttagacagggcaaccacgataccatttttaccacttcttttgttatatcttagcagtgatgcataataaatgtaagtcttacaggcttctgggatcccatgaagctgggcatgtcagcttcgaatgtaccaggcttaggtaaccaacagtaaaatggtagcccacaaatgtactttctttgatccccaatgacttcctttactcttttctccagggcccttaggtccttcctgccattctttcccatttttctcctaaattttcacccttactgggaacctagtcttcctgtagccctgaaggttccactctgccattcctgggactcctttagggttatggattttcatgagttcatgcattatgccaccaaggtaattataggtacaggtaaggtgactcagacagtaaagaatccacctgcaatgaacgagacatgggtttgacccctggggtcgggaagatcccctggagaagggaatggctacccactccagtattcttgccaggagagtcccatggaccaaggagcctggtgggctatgtgccatggtgccacaaagagttggacacatgtgagcgactaacactttcacttttcgagatgcctggtagctattttgtaccaaacactgttctcagtgcttttcagatattaatccatttagtcattaaataagaccacaaattgaaaataggagtacagaaacattgaaggggtaagtaactcactcagagtcatacagctagtaagtggctggcctagggtttggactcaggcagtgggactcagagccagtactattaactgctgagtcgcactgagattcccatatggacaggcccttcaggaagtgatcagccccaggccaacagggaagaccttgccaggacatgggcctctctttgaaatcccaccagctctgctagtgtccacttcccctggtgactcggtggtaaagaacctgcatgcaatgcaggagacacgggtccattccctgggtcaggaagatcccctggaggaggaaatggcaacccactccagtattcttttctggaaaatcccatggacagaggagcctggtgggctatatagcccatggggtggcagagagtcagacatgacggagcatgcactcactcattgttagtgtctagagcccagagaagatacaaaagctctcatctgctgagagctggctcacagaatgaaacagaattctaaagaacacagttcaaaaaaagaagggatctgagcatctctgggataccctcagagcatcccgactaaaagaaaccgttgccaaccattttcaatttcggtattcaagttctagcagagacggggctgagtttgttcacacacctgctgcctgacctgaggagggcagagtgggcctcagactgacggcccaactcttatacctccagtgggggaggtcgattccccaaagaaaaaacaaggtgcgcccaggaataagagggaagaggggaagagtaggcagagccacaggcatctactacttggttcatgtcaccagctggactgagaaagctttttccaaagaacagatggggaaagatacttaaccacttactcttcatgcatctgcagtcactaataaaagactcctcctaggcccaggagtggtgccccagggaggcagggaagtgaggggtccaggccagattcacactacctgtgtcctttcctttctttataatgtattgccagcatggccttagtagttatttagcttcctcaagcctcagtttcctcatcataaaatgggaatagtaaaatggtaccttcctcttaaggtttttatgaagactaatttagtgataatagttgttaagagtataaaacagttgaaacttgttatggttctcaaacataggaggctctcaatccatgctgagtttcattcatagtgttgtcttcaactttggaaaccatttttctttctttgcattgatggtcaagcatctcagagctttttttttcttctataacattctttggctagattttactttctccttttattttatttaatgataagaacttggccttatgtgcttttattgtaaggtacttctgacattttggaggcatgtgcataagtgtgtttgtatatacacagacacacctaccacatacagaggcttcctaaagaggacctaaaactccatttcacttctcagcccagtactaaagcccctggtgatgtttcagtgctactaataaccaagtgaatgccactgaaaaatcttttaaaattatttttccccaaatggtagccttcactcagacctatgattttggtttcaggaactttgctgccacaatcccacggcccttctcagttcattatgacccatacactcaacggattgaggtcttggacaacacccagcaacttaagattttggctgactccatcagtagtaagtaacatatacccttttaggccattctctcataggggattgtgttttcctaccttcatcagagtaacagtaagaaatgtattaaatatttaagaaaagcatttccagggaagccactgacttattgagagagaaaaacttagtaataaaaagccagaattgccttgagtgtcctttctgctttgaccttcctggaccccacgccacctcctatgacccaccacctttccacactggcttgttgctgccacattcctctttctcctttgcattttcacccctttccctctaagtgtccactggaccttactctgcctggaataccagctcctaaggatagattttatctactttatcaaccacagagtagttcatccattggccttttattttttctggacaacaagaatattataatagttgttcttaaaaagtcattgtgctattgtgttcatctcccaattctttctaaccttcaaattcccttcgagcaacattgaccagcccttagttcccatgccttcccctggcctttgcccatacagtttttgtttaaaatactctctttaccactcccatttagggaccccatcccagtttatcttttaatcgttcatacatgtctcttcttagggtaagcctggtttgggtgtccctcctaggttttggccttcccatagatccttctctcagagcacttatcataggttttttattttgtttttattttataattgtttgcttgtctgtctccccaactagacttgagcagagggccatgtcaggtttgctgtcaaatccccagcagttttccatattcctaaaaatcatattaggtactcaagagctattgaatgaatgaacaaaaccaccaaaggatcaagcttaaagggagaagttctagtccaaggggtggggagtttctatctgtaaaaatgtgctaacaaaggccggaagggctggtggacttggcgtatccctctctacccctgtgatgttgcctgagaccactgctaatgtgtagaactagcccattatactcattcctatcaggtatggcctccctcccataatgagccattttgataaagtccaaagctgattccctcccatagatgccaccttgaacactcagctggaataatttgttcactgaagaggccagccaagggctctggaggctggggtgtgagagagaagggttaggccatagctgttttctctctctttttcatttcccctgagaaagtgacaataatttcaaagactattatttataagaggatggggggctatgtgaaccctacttttaggttctgtggcttagccccttgcaagcatctgtggatggtcatgtgaaaaggaaacagaaaagctagtgatttccctggggagaaaaccattaactccttccctgagaaatggactatggaaagaggaagcttaattacattaattgctctttagcacttcctacaacttggaatcatctgtaatggctcagattttatcaccctaactaagctgtcagctccttgaaggttggggtagtacctagtgcatccacacaccccactgattccctagccttttacacactgcagacacttgaagggtgtttgtttgcagtatgagtggctcctttgtttttctttgtaggtgaagttgaaatcctttgcagtgccctccagaaactaaagtgaagtcatggacagaacctaaactgagaatctctcaatggaaaccgacctacttcttttatttcatcttaaaaagtgtaaaaaacaagccttaattcaaaatgacagccttaaatcctttcgagagcaagatggcgggtcaacagataaaatcatatgaaatgatagcatgttaataataccccaaagcataatggtagatcttttggggtcatctacgatttagagatgataatctcatactctggattgaattaaaaatcaataacctgtcacatttcatcaaagttaatgaaaatttgggacctgttttattcaaacttcctaaataatttcattatttgctgtagaggattcctaaagggatatatatccctcactgtgaaacacaagcctatcagaattgaatttctggatttaatataaattttaacctacaaaagtaattttctgtttcagggaactatgattttacttactgctttgttattttgcctatgtag

SEQ ID NO: 86 - DNA, 76666 bp, Hippotragus equinus
  source 1..76666: mol_type = genomic DNA
ttaaagtttcagaaattctgataacaggcaaacattaaattgttacataagaaacacaagaaaaattcaccagctctaccaatcctttccagataaagaatgtatccaatgtgaggccaggagagtcacaatctatgagacactgtttgcttaagggcattgtcagcaaacatgacaacccattgttcaaccaatctcatctccaaccatacatttgttctcagacctttgaaatgaaatctagatttcagcttatgtgaacaaaatacttgcgcaatttcccagcccacggttagctaacttgtaggcatcaaaagccaaagtgcaaatccatggagtttcaacccttcagctacagatggcctacccaacctcagaactgaaaggcctttgcacactgtggcgaatgtgacaaagaaacagaacatgtagctgacttgtggtcctttggttccaagcccccttttcctcctggtccatttcagagtatgtgcttcatttcagcagttcagacccaagcctgtccagtggtctggcaccatcaggaaatatttgtccatggcttcacagaatctagtcctgtacaactctggagagaccacagttggcattttacctaggattacaaaagggtaaagagaaaaaaaggaagctgttacataactgaccagaccactgacttcgacagctatgttctttcatgtaaacgaacaaaaaatgccatgtcctgtaaacacacacactatgatgggctcagaaaaaagggagggtgctcactgtgcaacatgacaagggacaggtccttcttggtaggacttttttcttttaaaagatgctcttgcctagtaatgagaaatgtctgaaagcaacctgttgctctcagtggtcagagaacttgaagtacttcaagcgttaaatcaggacaacctcctgttcaggaactctggcctttctttcctttaacttttcattttgagaacctctggtttcttaacagagtttcccagatgatgcagtggtagagtccacctgccaaagcaggaggcacaagaggtggattcgatccctgggtcggaaagatcccctgaggtaggaaatgataactccagtattcttgcctggagaattccatggacagaggagcctggcaggctacagtccaaggggtcacaaagagtcggacataactcagcatgcagcaggtaccgcatcttaacacatatttaagatcccatatttccccatttaaacaattccttttattatctgatcattttggaaatgatgataaggtcaaagataaccagttatgttttataattttttctgaagtatccatttgttatatgttaactgatgaggaagataatgagaacagtttaaagagtaaacagaacaaaaattctgctcaccttgtcctcctaaaattcctgttgattttacaaccatctcaagctttttgtcccaggtaaatgttcggatataatctgttgcagggggtgagattagcagtaaaagctctcttaataaatataagcagataacaatcacaattaccactgctattacttctacattagttaacactgagtgctggcaatattgcaggtgcagacaatatgccaagggctgtcctaagggttttttaccatattaattcttccaaacctcataacaacctcacaggccttcatcttaagtaaattcctgaatacatatattttttggtaatgaaaatggaaatgagaaatatgaataaaagtactagaacagaaaaactattatttttaaaatttcaaatgagtttgtgaaaacattcaataagctattactacaccaggttctgtatagtcttcaaagattactctggcttcaatcatgaactgcacataagacatgctcattgacctacctataattccaactactagctcattgctggtatcgtctcgcccaactagcaaagaatagtctataatgaggtggctagaaaggaagtgggagtcgctccggatcgaggctctcagcacagctttggaatgagaacggatatacagagggttgtctcgaaccatctttaagagattttcatccagaagaacgacatcacagctctctttcccggtatcggtttttacatttcgattcctaagtgaacccttcaagtcaaaaacctagcagaaagaaaattctctgtcatttatgtgagttgctacaaatggttaattaatataattaaatttaaaaggcagacagcttccttgtagccactatccttaaacaatttaatatttaactttaaaatttataacttatgtaagtcactgaatgcatacactgtaattgtataatacaaaaagcacatggcgatataactgtatcatatgaaactaataacgaggttcccaaatattcaaatatgtcagaaatatactgacccatttaatcaactataagaaacattaacaagtaactccaaaaatatattgctgaatcataaagcagtttgaaaaacagacgtaaacaaagtcttaggaaatttcaagttttgatatcaaaactgtgcaattataaaggacaatacagaagcaacagtatttctaggaatttctagacagtaggaaaagcaatgctagtcaggggacttgggaactagacaggtggaacctgaggcgtattctacagaccactgctagtcagttgctcctgactcaagatgaaagagaagctgatgccagaatgtaaactgattatatcattaaacctacagtttagttcagcagctgcttttgctacacaagactttctcaatgaagaaagcagtacattaaattacattctaaaaaaaaaaattacattctcgtacaagctcctagctccacagactggaaacagttcaaagacctgcacattgaagagcactgttctagaatctagaccaacttgaattctaggaagagctgtgagaccttgataaagtcctcaattcctctgagcctcagtttcttcatctttaaaatggccagacccattggatctgccttcttactctgtaattctgtgtttctaggatattggttatgttaaattttaggaccagaccaccatattcctctttattctttcagtaactcaaaagttaaagctgacccagtaaccaaagtttaatatttactatcaaataccatgtcattctctaatcatcatgttcaggaaccagaagaatgaagggatccagcagctaaatagtttgtgtggttcattatccttacctgtgccatctttctcccatagaaaagattttccatgacaaggagatctagcttcttctcagtgttgttctgagaattcttataaccaattctgtaaactccaagaatcttggccaatgcagtaggtctctaattcagcaagagtaaatagatacaaatgaatgtacatgcaaaacagaaacagacttaagaaatataaaacaagcctgtggctgccaacgcagagaaggaatggtggagggacaaattttttctatgagaataacaaactactctgtaacaaacagaaaagcagtaaggatatgtcatatattaacacatagggaattacagccattatcatataataaatcataatgaagaataatctgcaaatactaaatcattattttgtatacctgaaactaatacaatagtgtaagtcaactatatttttaaaaaggattatttataatttaatatcaatatctggattattcatgtattatccagacatgattttctattaatatgggtcaggagaccttaaaagatattctgaatctatgaagcaagtaaagcagcaatgccaataaactttaatattctcccaagggataatccttcacaatttctaaaattcacaaattttattatgacttaatttttccaataaaaggcaacaaaccaataaatggaaaaaaaatctacatgactccttcatattctcactggaagggtctctgtttaatgacaagtgggcaaactacacacacacacacacacacacacactgctttccgccacacacacacacacacacacacacacacacacagctttccgccacacacacagacacacagacactgacacacagacacagacaaacacagacacagacacgcacacagacacgcacacacagacacacacacagacacacgcacatgcacacagacacacacacagacacacacacacacacacagctttccgccacacctcaaaagcacaattctgttcacttactaccatagagaaaactgcccttaggactttcagaaggtgaaatggaccagtaaactctagttacagatcagggtttaggtttctaccttttgctgaacggcatttgtaatgtaattgaagtagtgtggtgcgaagtcaaggaaagactggacttccagacgaggcatttgcttcaaaatgaatctgtcatctaagaggcaaaaatttcacgtttattcggttgcaatatttactgaggtaatctaaaataaatcattctaagactcctaaatgacttgctctcttcatattttgaagggatatttttaatatgataacaccgagaagattttgatcagaatatagttctcaagttgaaggtttggaagggcttttgagaatttatatagtcaagaaaactctacatttgacagttgcacacttgaagtcatagctagatgatgtactttttaaaactaccacgtaaaatgttacaaactcctttgttagcaatccaggaactaacagttatgaaagtgcttatcaagcacatctttcctgatgcattttctcaattaacttcattttcagtgagtacggagaactcaaacatgtagtacaaatggtcaaaatctgctgtaaacttctgcaggttaagaacttggccttccagttttcaagtcaaatgtttcaatttttgtctttctcccatcagctctgaggtaccttgtgagttttctagaagttctgttactatttacatgtggaaaacttgggactagaaagaatttagtagggatttgatcaatacttgtctttcattatacactgtacaccatgtattttttcaatgttcttctttcatcctctcaagcataaaaagaaaaacatgtttgctaaatgacacatcacattacctcagttcaagggattcataaattatccaagggaaaaaagatggatgctgcttaattatcaaatgatcaaaaaggccttggagaaggaaatggcaactcactccagtattcttgcctggagaaattcttgcctccagtattcttgcatggagagaggagcctggcaggctaagtccatggggtcgcaaacagtcagacacaactgagcaactaaacaacaacagcaaaaaggcctaccttcagtagcgtaaaaggcagctcctgatttgcctcctcgggcctgccacggagaagagtgagaaagggaacgaatgaaatcttcttcgctgctgcccagaatcacttctcgcatcttatgaaactctcccgcatagtagagccgacaataaaacttggcgttggcatccgaaaattctataaacagaaatgtttttagaaaaaagctcttctgaatcagaaatatcttttccttcttgcccactctccacccccacaccaaatgcaagcatttaattttctccatgatagtatttttcatgttaagtctactacattcctgtttatcactattgtgttatcttaaggaaggattaagagagtaccttaggaccacccttacatatttatagaaaaaaaaacaaacaaaacaagactcggttctaattttatgctggtgactgcattttcatcattgtatggttatatcttaaatttcactgtgttactatcctgggtaacaaaacaggcacacacaattctagatgccttggtaaggtactgtggctctaaattatacaggaacaaactatttaaaccttacacatctaattaaaatttataaattaaattatatttaaattacatttacaaatagatttcctttaaaattaaataatgtatactttataaactaaatctagatgaaacaaatgctcatcagcacaaagacttagtattcatttcaagagataggatatttgtctagtgtgaagctacgagtttcaaataatgaagttgttcaattatagtcctgggtccccaaaccagagatttatctcatacgtacgaagctccacatgaggatttgtaagttgtttcttctgtgtatctcctccatccacttcatctaaaaaatttaacatcattagtaaagccaaagttttaggcagttactcagtttattttgtgtgttctttttccctgatataaactaaaaactaagtcaattagtattatcctagtcaagccatgctcaagcaagcatcatgtatacaattaactataaattattacaataaaaatgtatgtaccttctgaaagatcaatttttagattaaaaatcagagaattcagattgaagaataatttttcttatagttaaataatccctatgatagcaataaacttactcaattctaacatcaagactttctgtggctattttaccagagtttatgaccagttttccctgtgtataaagtaatgctttcccaatattctgagacgctttctttatcatacactaagatatatgttcactatagaaaatatactaatatctacatcagagctgttttttttttaatttgactaatgtgtctggcaaacttattgccagacaattattgtggagttgtaatatattttaactctaattacagtaaagttgtaatatattttaacatctagaagaacaagtcatcctctaaggttcccatttcaaaattatttttttcaaagcaccaatgccttctaaggatcacagcctatagaatactaaacacagatcttaattattaataaaaacgtgtcatgcaatttctatttcttaaactactaattcatgctgtaatccaggggttgccaaactactcctctaaagggccagatggtaagtattttactcagttgccactactcaacttgccaatataatgggaaagcagccagacagtaagtaaacgaaaggatgtgtctgtgttccaccacaactttatttacaaagacaggtcagcttagttatctgactcctggtctaaccctgtattcaaacaccatcaggtaggtgtatttttttaaatacctaaatgaagctgagtatcagtagctcccaccttacagagactggaaaagaaaggggatgtctgggagggcaatgtggtgacctcatttgaacatatactgtgagctacacagtgagacagatgtgtaatgtcacttagtcctcagtgaaccttggaagacactgcttttccactttatcggtacagcaagtaaggatttctgattcctccactcggtaagtgagaacagtgatacgtgaaactagctggattctcccagcaccaggcttttcccagtctacccgaccacggtgtgagaggagcgggaaggccctgatttctgcagtagaagcatctacttaaagctgtaagaaacataaccaactgaagtaagtaaactgaagcctaaaacaagcacattggtctccttcaacacaccttgaggctcaatgccttgattctccgtcccctccttgcccgtctgccccacttggtagtaagcactatctgctccacgtaaggtctctctcttctgggaagagaggtcagggcttttccctgctgtccctcggaagaaggacaacattccagaagcctttttggctaaaaataagaggtaacatattaagtacaggtcactgcacgtagaaaaataaaaattttcaattcattcctgtgtaagcagtaaccattatatgaaagtaataaataagagtaacactgatagatttatttgcacagattattattcgatatggtttatgggggctttaggggggcaatcaagcactcttattatcaaaaacagaagaaaagcaatgttcagatagctacatatcaaaatgtgagaaattattaaatatagagaaagactttaaaaaatttctttccaaggctgtcatagtatcttaagcaacaagtttaagatagggctaggttcttatagtatcacagtacagctcattaaactaatacagaacagtattccaagctacgaggattcaaagttaaaagtaacatatttatatcgtctgtgttccatattttaacacagcaaaatatataatttgagttttagcatttttcaaaaataagtagtacaggatgaccaaagatatcactaaagcttgctctatacatttattcttccttttgagcttcatcatatcattaatgatcctaatttgggggtagcctttcactcctccaagggatcttcccaagccagggatctaaccgaggtctcccacattgcaggcggattctttaccagctaagccacaagggaagcccaagaataccggagtgggtagcctatcctttctccagcggatcttcctgacccaggaattgaacctgggtctcctgcattgcaggcagattctttaccaactgagctttcagggaagccctttgtacatttaccattaacaaaatccacaccaaatctcaatcattaagtgcttagggtggcagacactatcacagcctcctcaatatccaatcccaccttgctcttgctaacagagttgcaattttctttagggcagcagcatgcagagtcccaggaaaataatcatgatttgtataaactggccaggacaatgatgctcaccactttctcagtctcctttgcaggaaagggtggccatgaggctcagttctaaccaatgagactgaaaaggaaagggaatttcctaatgaaaggggaagagcagaagcttgtacctcccttccttctgcctcaaatgcagacattagagtgggacatctctgaccatgagtaaaatttaagagaaatcaaagagaaactaacccctatgttgtcatgacaaagccaagtagctgaaccaatgccagcaactgcccatttgcagatgttgctattttagaaaaataaactgtccttgatttaagccccagtagatttgagttttctgttcagttcagtcactcaattgtgtccaactctttgcaaccccatggactggagcatgccaggctcccctgtccatcactaactgggttttctgttacttgtagggaatattcctaactgacaaagtcaaaaaaatacaacttcaaatctctgctccccactacctgtgtaaccttgagcaaagtgcttaatctaagtcttaacttactttctgaaaaatggagatatgtcaaatatggggttattgtgggaattaaagaagataagacatgaaaagttcttttcacaatgtcaacaatgctgcaaaaacaaacaaacaaaaaaactgacgttgtatttcttatgttgcatgctttaaactgaaagctctaaccaagaaggccgatcctgcttctttttgcatgaaacgcttctaggcatttcaaactcaaaaacttaaaaatcaaagaaaagtgaaacatacacaaaagaagagatataaaaattttacatccatattatatttcaaagatcagaaacaataaatccttgccagatggcacttcttatctaatgtgttttcttcttcaaaccacaattacaaacaaaagtacttctccagttgtaatcttacttggttgtggttctgcttctactgcacggtttgtctgtcctccactgatctcaggtaacctaattgggctgctactctttggtctgctgtctaaagtactaaaatgagaaacagaagaaaagttggttttatatgattcagacacaaactaacaagtactctaattcctatattaatctactttccacctaaccccacctacaatatcagaaatctggttcataattttatataaacacaggttcgcatggaagaaaaagtcttgaaatgtatactaggcttttaagaaaaagaaaatgttaaagctataagactatagggtcttaaaatatttttctcaggtctatcagaactatattatagcacccataagtcaatggtgacaattatgacaatttctgtctcaaatacctaaaataacaaaaatacttaaaacagctggtttggcaggggtttgctttgttttttagctgttaagatctttaatcattatggaaaattcttaaattatttaaagtacaaagctaggcagtagtttaccaattttagaagttaatatttttttaatgaaagcagcaaagagaacttaaaaacttaaaaatgtaaatatgcaatacactttgaacttccatgacaagaaaactgtaacctagtagactttttaaggtcttttgctatacctgaattttgttctgtcaattactggctaaaaaatgagtcccactgcttatattctagaaacttttacatcaagaataagctgtaataaaactgaaacaggaacacctagaaaatgatatagttcaattaaaataaattttcctcaatcacatatcacctgtttgttggaagcccttcttcagcactgttccgctgagtggctttggacaattcctctaaggcattccggtattctttacaacttaagataaaatcaggttgaaatatgttaaacattaaggtcttcttttatagtaaatcatatgctttagaataagctctgcattatagaaacacaaacattataagcatccatatctaatgtactttggacaaattaagttacctaacaaaagttatcaagtagaaacttcatgaagaaagtcaatatgttcaccaaaaaataacagaatataatccaacatgccagccagacttaatatcctaaacaatgattgtgaaggccaccatactaacatttagatcaaatgccttcaggggttgaacagctcattgaaaagcatgaaacttcaccatttagtgtaatagagaggaaagggacttgagagtgcttttcaacttaaaagtattgaactttaagaaaaaaacatttttctggttgcactgtccaacaaaatccaactggcagcctgggaatcccgatttagataaatcagatgtgagcatgtattatttttccaagatattacaaaaaaggagatgtcaactagaaaacttgcttcctaatattacaaaacacatttttttcgttgactttcctgcctttcttatctattcatgtagcatgttcagttcagttcagtcactcagagtcgtgtccgactctttgtgaccccatgaactgcagcacaccaggcctccctgtccatcaccaactcccagagtccacccaaactcatgtccattgagtcggtgatgccatccaaccatctcatcctctgtcgtccccttctcctcctgcccccaatccctcctagcatcagggtcttttccaatgaatcagctcttcgtgtgaggtggccaaagtattggagttttagcttcagcatcagtccttccaatgaacacccaggactgtctcctttaggatggactggttggatctccttacagtccaagggactctcaagagtcttctccaacatcacaggtcaaaaccatgaattccttctgcgctcagctttctttacagtccaactctcacatccatacatgaccactggaaaaaccatagccttgactagacggatctttgttggcaaagtaatgtctctcctttttaatatgctgtctaggttggtcataactttctttccaaggagtaagcgtcttttaatttcatggctgcaatcaccatctgcagtgattttggagcccagataactaaagtcagccactgtttccactgattccccatctatttgccatgaagtgatggggccagatgccatgatcttcgttttctgaatgctgagctttaagccaactttttcactctcctctttcactttcatcaagaggctttttagttcttcttcactttctgccataagggtagtgccatctgcatatctcaggttattgatatttctcctggcaatcttgattccagcttgtgcttcctccagaccagtgtttctcatgatgtattctgcatataagttaaataaacagagtgacaatatacagctttgacatactcctttcccgatttagaaccagtctgttgttccatgtcaagttctaactgttgcttcctgatctgcatacagatttcttaagaggcaggtcaggtggtctgtattcccatctctttcagaattttccacagtttattgtgatccacacagttaaaggctttggcatagtttataaagcagaaacagatgtttttctggaactctcttgctttttcgatgatccagcagatgttggcaatttgatctctggttcctctgccttttttaaacatctggaagttcccggttcacatactgctgaaggctggcttggagaattttaagcatcactttactagcgtgtgagatgagtacaattgtgcagtagtttgagcattctttgggattgtctttcttagggactggaatgaaaactgaccttttccagttgactaaccaataaaaggagaagcaaaaacttcatgaacatcaaaaggcaatgataaaaaaaaatgtatcatatggaatcttctaaaggaaaaaactccttattatccaactagtaactctaaactctataaatgctgaaatctataaatctatcttgtttaccacttatacccagtacccagtataccacacattgcaacattcaaatatttgttgaataagtggacaacttgtaaccaatattaaaaataaaattttaatttcaatatctttcaatagggaaaaaaactttattagatatcctagattctacttaaactaggtactatcactgccaagacatcattaagattaaaaagctttgttattttagacacaatatataaaaatttctaaacaggggtccttctttaagacacataattgtgagcatgtaaatgagttaaggtataggaacagcattactctagggaaacttgaccttctatgtgtgggaagcaggaaggaaataaatgaagaatacaaaaaagatattcagaggattaaaggcagatatgttccaagtattatatcaataaataaaccaaaggaaaggatacaatagacacgtattataatatagagaatggacagaggatataagaattagcaagtaatttgcctagttaacttaattattaggagcttgcttaagaatcatcctgttaatacttcggcaaacagtacattaccagatacaaaaagaataaactgtggcacccaaaggatatatattctgtacttatatttactactttacatttacttatattttgctctactctatgtaacagagctcaacaatacagcaattaattaataaatacacataaaatataaaaatacaaacacaggtgaaaaagccctatgagtaatacctgagagcaaaagcaatgatggagctgggctccttctcacagactgcaatgggcactcgttcatgttcatacattaaatagtgtttatctggatcgctgttcaaaaacatgtaaatcagaacaaaattagcagaaaatcacatatacaacccattagcacaattacaagtaaatctcaggacaattttaagttaactaaataatgcacaattacatgaacataattaagccaaaatgtatgcagaacttgaacaaacagtcaaggaaaacagatcaacagaaagtttttaaaggcaactgaaaatgatcagaactgtttttcaaatcagagggtcctggaatcatcaaacaaagttttccacgttggcaagatgttgggtcatatttatctcaaaaaatacttacaatgaatagcagaagtttaagagattttgttctactttaagtttgaaagaaaagtcttttggaaattgtggaaatgtaccactagtccagcagtaaatgacataaactattcaagtctgaagcagagaaaacagaggccttttatacatttacaccacagaacatacagctcaagacaagagctcctgagagcaggagtttcccttactgatctttctctacgttctgaggcactaaagctgccacttaaacattaactgaataaataaatacagaagtcaattgagaacaaaatctgtattaacatatctgtttcactggagcaagcatcatcagctgatagccagacatgtcaaccagtggaagaaaaactctcacattcagcctgtatttccccccattgtgagaggacctggtacacacaagatcacacaaaaacttcaatgggccattgcaattcatcaccactgttagaaacacaccatgtcccagttaagcaccaggtcagtaataccctcatatacaatcagcaatatgtttttatgatcatgagatcaattgttgttgttattcaatcactaagtcatgttcgactctttgcgaccccatgaactgcagcattccaggttcccctgtcctttactatctcccggagtttgctcaaactcaagtccattgagtcagtgatgctatccaaccatgtcatcctttgtcatccccttccccttctgccctcaatggagctgtatatcttttaaaatgtatgtgtgtgtatatatatatacatatatatataagcaactctttattaatctacttatctactgttaatatataaagactaaatgttccacaaagtacattatacaaaaagacaccgcttttatggtaatggaggataattttggattgagaaatacatatataaagttaaataaacatatttaaatatggagagtatatccatagagaaatctttaaaatgaagtgaaaataaaaccacccaacagccactggcttatataatacttacaaaggaaatggaatagggttatagctatttcctggaagcaaatttgcaaagatggctttcatggttgatttttccttcacctggctgtctgtagatcccagcaaatgtccatcaaatacatctagaatgaaaaatattctacttatatattcaggaagagtaaaagtataaagtgtcaactatatttcttttcctttttggaacacagacacgggcacaccataattaccaattatagtgtaaaatttttgatctaggaataatgactatctaacaggaaacaaccatgaagcatacacagctctgaccccaaggggcttatttttgttacatttcaacatgtttgaagttgagatcatcctgcaatcaacagcctcttaccctcaaggggctaggcaacagctgtggtgaaattactggccaaccatgcatgaactcagtcccagctgtttctattgccacttcaactcagttatgagcactgtggctattatatctgagcttaattgcaatttaaaagttacatttaaagtttacactataattaagtagtcagcgcttaaacagaaaccaaggcaagagagggaaaaggcatacgtctattatcggcgaaacaaatgtttgttgttggagaagcggttgcaattttatccttctttcttagaagggaacaatcgtgtgctttatgagacttaagaaaatattaataatacccccagaaagtagataaagctgaatagcattttgttactgagacagtcacatgtcaagcagtgcaactgaagaagggatatggtaaaaagctacatctaaaagagcattttcaacagtacaaattttaaatcccaagggataagaaagcattgtgccccagcactcagagcgtttgtctctactggacgaagtacagaaatagtgacttgacctgtaccttcagaactgctggcagtatcgagttcggggggccctcccatggcctgctcaggcacgccttcaggagaattaggcagctggagatggggggaactggtggagctctgactggacagggtggccaagaagcggtcctctaaagaaaaacaccgtgcaaatgagtcactttaaaacattatgtccgtttctacctaataacaatgctttcaaaatgccaaaacctttttctacttcataaaccaaaacattttcgcttcttaaataaagtcacatgggtcatttcacaaatgaatttcagaaattttagaaatggatacaaaaatccagacaggttatatgacttgaccacaatcagatcttagtgacagcaggatgactggcaaccaagtctagtaccactccagtattctttgcatcagaccataatgcctgggcttccttagtagctcagctggtaaagaatctgcctacaatgcaggagaccccagtttgattcctgggttgggaagatcccctggagaagggaacggctacctactccagttttctggcttggagaatcccatcaagtttttattttaccccatggggtcacagagagtcagacacaactgagcgactttcacttcacaatgcctacttaaatattttgttcattcaatttaataaggaatgaaattatgatactactgaggggaaaaaaaaaatcacatgtttattctcaagggggaaattcacttaattataattttaaaaatgccaaaaattccaagttgagtttctattctaccaagatagtctaagtaaatttcccttccaactccctagagtggcaccaagttattcaatgaaatattgaggaaaaacaggcttaagtctagaaaagattttagcaatataaaaatatcaactaagctttgtccgattttttttcctacgaaaccaaggacttaactgtaacacaattaagagagaaattcagtttccttttatctttctgttcttcccctaaaaagcagccttctctaatgatcatctggcttccctggtagcttagctggtaaagaatccgcctgcaatgagggagacctggatttgattcctgggttgggcaagccctggagaatggaaaggctacccactccaatattctggcctagagaattccatagtccatggggttgcaaacagtcggacactactgagcaactttcactcacttcactattgatcatctatttctctatcctaacttaggcaatgtattttataataatcttaaactgagactgcttacaaatgctttacagcaaggaaaaaaatgtctctgaccaactgcatcagaaaaaattctcaaaatttagtgtttaaaacaagttctagactaagaaacgtctttaaattcaaagacaggtgatcaacactcaaggaccaacctttttctccatttggaagtcctggagaagcattccgtggagacgcatccactgcacttatctgtagagaaggaaatattctgttcttaaggaaatgttaaaatcacactaaaaaaaattttaacaaagtaaatcttacactttcaacctcttaagaattattaatattgattcatttaaaaataataaaaaacccattacctattactataaacaacacattttaattaaaaacagattttttttaattggtaaaagagtggcattgttttatgcttttacaaatatttcaatgtctagaagacattaaagtcttcttttaatagaagagagttaaattcctctctgacttctgtgtttaatctgttgagctgtattattataatggaacttataaagataatctagcctcacagagttacgcagttgaaaatgggaaatctctcagacctcttgaaagggtctaggacctccagggtccttgaactacattttgagaatactgttctaaacagtagctcacagacccattaaaatatccaggaactacttatgattatccattaagcccagcaaccttttattatccattggactttctcaagtcccataatccattgataaaatatatatttaaatgactgtcagccctgtgtacaatgtcattaaaagtcacttctcacactgctacttacaatgtcctttgatttgctcaccctagcagagactgccctagtcctcctatataaaataactcatcatcaccaactccctcggcattactctccatttctcgttaattttttcctcacagctttgtttccactcgttttttaaatgttcattggttcatctgtttattgtcagtctcataaacaaacattccataggaacggtaactatggcctccatccacaaatgtgaactttcgtgttcatgtttgtgaaccctgagagccctgcactcagaacagtgtctaaaagcactcaataagtatttatcaaatgaatgaatataaacacaaaggcagtgctacagattttcaaatcaactttcaatctttcaaaaagaatatcatctattaactgattttatattttcaattccatgtcttacagcactagctttgcagtttcatcagcaggcaaacagaaaggcctctagcagtgtgtgagagccattaacggtcccagactacttgaaaatactaatgaatcatcttcataattcttactctcacccaaactttaaggaaaagtgattcctacacagttatttatgagacagaaagtagaattcagtgacagtgttcctaaataatacaaagatctaaggcacttgtacccatcattccatgaaaatactctgttgtaagtattatacacttgtacaaaaagaaacattctctcaaaagtcctcatgctatcagaatattaagtccttaaaatatactgacattaattcatctgttcatggttagcatagtggcagaatttcgtgagacacatacacacacataccacacataccttcaatcaaacatgaatccagatacggctgtgaagggattctaccatgtatgtaagatcacaaatcagtcagccttaaactagggaaattaagcaggtgggcctgacctaatcatgtgtcctttaaatctgtgtccagaggttagacacagaagaactcaagagatctgaagcatgagaaggattcaatccactgctgtaggctttgaagatgaaatgggccacatgcaaggaatcaggcagccacgagaagttgagatttgcctctagtcaaatgccagcaatgaaacggggacctcagtcctataaccactagaactgaactctgtcaacaacctagatgagcctgggaaaatatcctgagcctcagataatcacctcggccaaaccttcatctcagccgtgagaccgagcaaagaacccagccatatactctgccagagtcctgacacactgtgagataacagatttatgttttaggtcattaagtttggagtaaggtgtaatacagcaagagaaaactaatacagttaggaaaggttaattaaatcaccatatagaactaacccggtgtggcctcttaagaaaaacttctcacttaagcacaaagaacacccaaagttcatagtaaaataggactctgttatacaccaagtacatctacaccttctcctttacagcacctattgcctctgtgatgctaccttcaatgatgccagtagacagcagcttttgataagtatttcaaataaatgaattataatgtattttatttcaggcaaagataaaaaaaattaatccaggtcacaccaagaaacctgactgcttcaaaattaaaaatgctaatattatcaataaagtatgcattaaactaccacttctaagtgttataagagaaattaattctatttatcacaatgaaggccccaagacaaaacattaccttgctttcttcaccttgtctcagtcttccaggacttggaggaactgaaggccgcttcctacccttttcttgttggaaaaggtcttgtagcctacaattaaagaaaaaaaggaaaagtgaaaagaagaacatggttttctttctaatatcctgaataatgcacacacatattctccttatagctttgaaaccacaaaaattaattttcctatttcaaatgcaatagattttacagctgtacataactaagagtaagttttgttttatttctaatcaactaatcagttgttattgatatgatcatggttagaaaagaagagcaagttataatgagacaccaacagaccaaggcccaaagcctagctctgaaaatcaacagctatataacttgggcaaatcccatagtctcatagagccacagtttcctctgtaaaatgaaagcagtatatacacgtgtgggactcaaaatcaaataaaagagtgcatgtccatctggtgccttacttagtgcctagcatcatccaagtgctcaataaataaatgctatactaatccaagtgaacttttcaatatgcattaaaaggaaacatttccccaaataaatatttaaatacaggtataaaatacacaaaacaatcagctgaaactcatggcctaacacccagtaattactccatggtttactagtacagacaaattagattcagttagcacacatactatattagaaacagcaacaaaggctattctcatcttttttttgtatctttgcaaactgcactttaaaggatgaaagaagtggagggtggcaggagcgataaaaataaaacctcctacaacttgagagtaaaaggcaacatccacaactaacaaggatatttaaatcaaaaacatcatggcagagcacattctgcaataatatgaaagaaacacctgactgcagagtcacacctgttattccaagcttgcagcacctcacagaggctttgtttcttggcaatgagtgactcgaagactgactgcagttgctgaggggtctccatggaggaagacaggagccgtgcctgcatcttctcagtccagctcttgaactcgctttcttccatctaggggaacaaaaggcactccagcaatctgagacgcatcccaaaaggaacttctaacaagttcacaactaactgctgggtttctgtcagaaaaatgaattacctccttttgtgcaaagatatcttccattttttcctctcttgatttgctaaatgtatcagttttcaaagacgcgagtctttcatcgacagcaagatatacctgtgaaactcttaacaaacattaaacactttagaaaagttagaatcaaactgtctaatctcacacaagtagaaaaaaggtgggcaaaaccactataatgttgtgaagtaattagcctccaattaaaataaataaattttttttacaattctgtattgattttgccatacattgacatgaatccaccacaggtgtacatgcgttcccaaacatgaacccccctcccacccacctccccacaacatctctctgggtcatccccgcgtaccagccccaagcatgccatatcctgcatcggacatagactggcgattcgattcttacatgatattatacatgtttcaatgctatgctcccaaatcatctcaccctctccctctcccactgagtccaaaagtccgctatacacatctgtgtcttttttgctgtcctgcatacaggatcatcattgccatctttctaaattccatatatatgtgttagtatactgtattggtgtttttctttctggcttacttcactctgtattatcggctccagtttcatccatctcatcagaactgattcaaatgtattctttttaacggctgagtaatactccattgtgtatatgtaccaccgctttcttatccattcatctgctgatggacatctaggttgtttccatgtcctggctattataaacagtgctgcgatgaacattggggtacatgtgtctctttcaattctggtttcctcagtgtgtatgcccagcagtgggattgctgggtcataaggcagttctatttgcaattttttaaggaatctccacactgttctccatagtggctgtactagtttgcattcccaccaacagtgtaggagggttcccttctctccacaccctctccagcatttattgcttgcagatttttggatcgcagacattctgactggtgtgaagtggtacctcattgtggttttgatttgcatttctctaataatgagtgatgttgagcatcttttcatgtgtttgttagccatccgcgtgtcttctttggagaaatgtctatctagttctttggcccattttttgattgggtcgtttatttttctggaattgagctgcaggagttgcttgtatatttttgagattagttgtttgtcagttgcttcatttgctattattttctcccatttggaaggctgtcttttcactttgcttttattttcctttgttgtgcagaagcttttaatttttattaggtcccatttgtttatttttgcttttatttccagaattctgagaggtggatcatagaggatcctgctgtggtttatgtcagagagtgttttgcctatgttctcctctaggagttttatagtttctggtcttacgtttagatctttaatccattttgagtttatctttgtgtgcggtgttagaaagtgatctagtttcattcttttacaagtggttgaccagttttcccagcaccacttgttaaagagattgtctttactccattgtatattcttgcctcctttgtcaaagataaggtgcccatatgtgtgtggatttatctctgggctttctattttgttccattgatctatatttctgtctttgtgccaataccatactgtcttgaaaaatatatatacagaactttactaatatcgtatctaattaagaatcacatataattttgcagaataaaaagacctgaaaggacgtacataaaaatttaacagttgttatgcttgggagggtatgacttcttttttaatactttggtgtattgtctacattttcccatttttacatcagacatataaaaaatacaattaggaaaataggttatttctgttttcaaagaaagctgaatgaacaaacaagatatttaaagtaatttagatttcaggcagtactaaacaaaaacaggtgatcaaagaaaatgaaacttacttttgaaagaagtccttcagatcctgaagaagggacacttttaatgggacttgacgtttaatgaatattttgggaagtggaacacacacttcaagaagccgaataggagaataactgagaggagaaaatacaagtaatagtagaaaagtgaaaaatattttaatattttgagtagaagtgtatcatgacagccaactaagtcctatgggcataagagatcataaagtttctataaaatggcattttcaaacaaccaaaaatactgaagaccacgttcaatcattaccaatatccttcccagttttaaaaagattttgttctgtgttgttttccccctgcattgtgctatcatcagttatcccgaggccaccctcgtgtgctttaaaaacaactgaatgggatagaaacctccatgaagggagaggaactccttcctacaattagcttagacacaggtattcactaccttctcagctcccaaggattcttcatgagtttcctttccaccagaagttcatgttgtctagtaaacactatatccaacctaggccctaggttcatgattgatagctcttgcttaaaaaaggaaagaggttcaattaaaaatattttctgaggacctattatgtgtcagatgctgttttaggtgcagaacaagggccaaaattcctgctctcatgattcaggaacaagacttgggcaataaataaaaacaaatacttaaaacatacattatgccagagagtaggtgctacagggcaaaataaagagcaaaaaagcagcaaggactgctaggggtgagagggagtcagggcaggtgaaatctgaacaaagatctgaaaaaagtaaggaaaaataagcaaatgtctagaagcacaatggaagaacaatgagaggctcccaggaaggaggctacctggcataactgaggcccagcctggaggccagcgaggctgaaagacggggagcaaggggagaggagtaggggtgagaagcctgagtatgaggggtttagaggcccataaatggactctggttttcactcagggtgaaacagacacttctggaggctccagagcacaagtgccctaagctgattttcatacaataggaccactcggactgctgcgctgcagggggaggctaaagggaagctggttgaggttattgcaataatctagggaaggacaacagagattcagttcagaaggggagtgctggaggtggtgagatatgttcagattctggatatatatggctatgctgggtctttgctgctgtgagtgggcttctcactgcagtagcttccttgctgctgagcagaggctctagggggcaggcccagcagttgtggcccacaggcttacttgctccacagcacgagatcttcctggaccagagatcaaactcacgtcccgtgtgttggcaggcagattcttaacctctggaccaccagggaagtccctagattctggatatattctgaaggctttctcaatcatttaaaaccattctttgaactagtgatttcagctctatccagttctatccaattatccttatgctaagtaatgtcttagcaaaaattctgacaggctctcagatgcaaaagtaatggttaagagtcatacctacaataatagcaaatctaccagtttatatcatgactccatcacttgctagctctatttgtagctataaggtctctaagtaagggtaatagtaacacatttcttaaaggattaaataaataatagcactgaaagctcttcacagagtatggccctgtatttgcaaggctgatgggtggggaacaacatacaccaaaagtgagttcaatctagtaacagtggaaatgcttcagagccttccagggagtatgtgtctgtgacaaggttgctcagacttcttacctgaaagatgccaccatctggttataggagaaatactggtgataatcatggtggatggagtgaccacatggctcagcattggctctgcgggtgtactggtgcccgtaaaacctaagttccaggtattttgcaaatgacatggaccaagactcattggaaagagcgacaactggtgttacctgaaattcagcataaattgtttgttatctaatcacatactgagaacctcttttttaaaaaaaatgtattttcttctttagtacaagcctagtatattctgattgcagaaaactagaaaaacaaaaaaaatatgtaaaggtaggtggggtgagggatggctacagaaactgtctcatcagtaatcctaccaccaccatcaatatgctaatacgtttgctttctttccatacatgaaaacatatatccttagccaggatgtttataaataaaaactctttcttatagcttcataaccttgattattagtaatataccatattttcccacattgaatattcttatgcagcttgatttttaatggctgcagaatatcctattatatggacatgtttaaccaatccctattggtgggcatttaaaacatttcaagcttttcattattttgatgaacttttcaatgtgggtatataaaacacacttataagtatccataacgatttccttgcaataaattaataaaagtggaaattggtaggtcaaaaaagggcatgaacatttatctggtctttgatactttctgccatactgcataaaccagtacacctatttggagacacaactgccaccagtatctgagagtacccatttccctactttcttactgatctcaggaattaatatctttgaaatgtgccttctttaaaaaataaataaaaacatacttattttatttatcttttattactaataaataacatgtatttgcacatgtctactggccatttgtattaaattgccttctcatgcccttttcccattatttctatcatagcttatagaagttcaatagtaaatatattaatattgggtcatatatgttgtaactttttttgacacataaaatttttcacttctgtgtaaccaaaactgtttaccattttctttctagcataaccccaaaggctgaagttttgttttgcaatcatgtgtatataccaaacatacaagatataaagatcaaatttaggttacttaattcactagacaatctacaaaagttcacacattctacaacaaaatattgccagctgcctaacaatgactaaaggcctagaagaacaagcatataaagaccaattattgccaagacatgatttcacggatgtatgtttctcctaaagactaactatctttgactttgccctcctcaaccactaatactgaaataggttgcactattatttggtctgtaattcctgtatgtaattccaaacacactccaaaataagccactccaaaataagccaattaatataacaatgaagttaaatctggcacatacacattgcaaacaatttgaataaaaagtatgtattaaaagcaaaatactagcaccaaatatttcctccagagatagaaaagcacagagaggaaataaaatatacagttttgtccccaagaataaatatgagaacagtagagatcaattaaacatgtcctcatctgcgtctcttaagacagaaatgttgacctagattaacttacacaagcattctagcatactgtaattattgtgttataaaactgtttcctccccaagaggacaggagccaacaccttgttctttcttcattcctaaggcctagtacagtacctggtacctacatggtgctaaataagtgtttactgatgaataaacaaacataatcgagaactgtcaaggtaaagtctcaatatattttactggacatggtacctatattttatataataactgataaatcctaaaatggaaccttcaggaaataaacattaaagggaacatacagcaggtaaaataaataagggcccaaagacaaatatcaaatccaaaataacagaggccaccttcccccacaaagaaagaactatagaaagaaatgatactacatgaaatagtacagcaacagagtactcttacctgcttgcagattctgcaccaggagtaggtgagaattgtatgctgatatccaggtactggagaatccagctcctttaggattatctgcacacagccttggccatggacaaagcgtcgaatgtggtgcaccatgggggtatcacagaacatgctagggcactgataggaaggcctttgacaaaaaagaaagtcctcacattaaccatgaaaccgaggagccatgtatagtgaatgctggctaatcaggactgcagacgataaagtgcagcatcctctccagagtaaggaggatgatagatgatctgatcagggtaccacttgtcctgctacaagcctgcagagctgaacaccccaccttcaaccacatcacagtgatacgttccacttgttaagcaccttccatatgccaagcatttctaaaacatcatctcattttacttattaaaactcttgatgtttgtggagtttgttagtatctataaaggggctggtaaagattaacccaggtgatgctagtgctaaagaaactgcctaccaatgcaggagacacagagatgtggattagatccctcggttgggaagatcccttaaagaaggaaagagcaaacccctccagtattcttgcctgaaaaattccacggacagaggagtctggggggttacagtccatggagttacaaagggctggacacgactgagcatgcacacacgaagattaagttacttgctctctgtcatgtaagtggcaagcgaaggcactaagatttaaactgaggcccttagtttctcttgtctctcatttgaatcaatgtaaaaacagacatcctaaaaaaaagaatctgcaggactgcagggcaattagatgggcatagatctgaaaaatgaactggagaagacttcctgggttgaatataaaacagattacttctctgtacagtaagccctgacattaggcatgaacaggaaggttaaacaagaatgctccaactcatgtttatgtttaggttgaaattttgtgcagcaaaaaaaagcataaatagaacataaggagaaaactggttcttaccggaaacagtatctctctaaaaatattcctaatgtaagatcattttttccataaaattccattgttacaatcctaaaaaaaaagatcatttcttagaaacatatcattagaattacaacccagcaaagacattttcatcagaccccaaactgatatctgttagatgtacttataatacagtattattattaccaacaaaacaggtaatattcttttgttgttacagaacaggttttaccttatctgatataataggtttggactaccatattacagcatcgtatccattcccagtccattagtatcttatgaaactatttaatcagaatacataaacaataacattaaatgggtaagtctgatctgcattaggaagaagtacaagtttcctctacaaagttttaaactccaccaataaaatggaactcctgtctctgctctccagtctacaccattactaagcacaaagagcagcagctcatattcttccaggagagcaagttcctaaatttatatccaactttatacctaaataagagagttcagctacacatactcttttgaaactgacatcttattcaaacctagacctaaattcccatgggctcaaccagacccaagtcagcctgctagagcaacagcaatgtagaagactccctgatctcactggtagaaatgagtgtttctggtgtccaaaattaaaatatggaagacattttgttgcggcaagtactccaaaaacaagcagttatgttctataatacttaagatcagaggtaaactgtataataactaggctttgtgactatcattggaaacaaattataacattataaaatgtgtttctatcaatctacttggaattaagttttagaataaaacttaaaggcaaaaaactgacttttataaaaacaatgcccaaagaaaacctgcctgatttgtgcatgttatcaaagtgcttaaaacaagtttttatgtatcaactttcacttttttataattacaaactgttcttgtatccctcttcactcttaacatacttttatttacttctactcatgaacaaatccaaatttcataatttacaagttcagaagttccatcaattcacatatgaccagcagcttgctgtgtacctacacagcctaatggctgaatttttttcacagttgctggaattctgttcttaagtacaacatgcaagggagggaaggagtcctaccaaggactgacacaggcactgggagcattgctggactgggcagaagagctgctgaagagcacacacagcctctggtggttgacagggttcagacagtccacctggaagggaaggaacatctgggtgagcactccaactccaacgcccacctccaacatccaacacactccactccgtttgtaaagcctctatcagcactacaggggttccagtgaagactgaaaactacaggaaactaaatataaggaagaagagcagttaatttttaagttaaaacaatccaaaaggtttaaaaatgcaagcatgtctcaacttgttttcttactctatttttacaaaactacattaaattattttgggggtagttatttaaatatgaaacagtctgaattgatagctggatataatctcaacctgagacacccagaaatctaaattctaaggtatttatttgtattttatacatgcttttgatcattacaaaggtaccatctgtctctgtaaaattttaaacagctcagaggaagatgcacaagtcctcgaagtacataaagcctctcctcctctgaagctgccccacctcccaaactgataaaaatttgactgtgtagttaaaaatcatgtatttgcgctagctgatacacatatatacacggaaacacccacataagtatacacaggtgattctgttttttaataaaaatgggatgatgctacatatattaaaacacaatgtgctttttaacacaagaaaatatgtcatgggttctctctgggtcattcaatgagatccaattcatccttttaacagcaaacagtcagaaataacgacttcagtaaatatccttgtgcatacattacaataaaatataagcatccttacacaaaatgcttacttatctgtgctttgtaatgtacaaggaatgagttataaaagatagaaatcatgaatcaaaaatatatatgtgctcatgtaaatttaaaaggcccccaaatcacttttagtaagtttacataaatgtataaaacatatatttatataaagtttattgtaagcatttttccatacttcattaaccatggttcttatcacattccttttttccaatttcaggtattaaaaacaatatactatcattatttaatccttcctagactcatctagggagaaggcaatggcaccccactccagtactcttgcctggaaaatcccatggatggaaaagcctggtaggttgcagtccatggggtcgtaagagtcggacacgactgagcgacttcactttcacttttcactttctttcatgcattggagaaggaaatggcaacccactccagtgttcttgcctggagaatcccagggacggaggagcctaatgggctgctgtctatggggtcgcacagagtcggacaagactgaagcaacttagcagcagcagcagacttgtgaaagtgaacatctatttgttttattaaacaactgtattttctcctcaaaagatagatttgttcatgagttttatcacctataatttcctataataaggaaaaaaaacacacccatttcctataagcttccaactctactctcccgctggctaccattaaaaggatcaaagacatcacattacacccaagtcatcatgtcagaaattttaagcagctccacactgccccctacctcacagttctccttagtttgctgtagcttagcgtgaaaccttcaaatctagtttcatcacattacactcctatttcatacattttaaagcaacacgtaagacaaaagagaccacaaaaaaaaacccacagatgaaatatttaataaatctgcatgtaagctgtcatatttgacttttttaccttgccatagcagagattttccacccatcttaaatgtacacaagcacaaaagcagtcttgctcacctttgtcgaccacactgcatcacttgtaatcaaccctttttcttcatcaccttcagttctgcttcctgatttaccacttgaggtacttgatgcctcctttgagtaagcaaaagggtctgaatttttctgctggattcttcctcctctggcccgataatcagctagcattctccccaagctctggctatcccccaggtgctcagcaattctggtgctcacgagctcatgtgagggcaagacttgaatggacttggcctgaacacttccattcatgccctgaaggccagagagatccctaagcatctgtttcttccgcctgctctccatttccttgaactccttattgaggagaggagaccagtaaacctgctccgcaaaataatctcgggtagagcatcgcatgcccttgtcagttaaaaggaagggctcccggaatgtgatgactggcgagatgcagaggatcacatctttcaactcttgcttaaaggtcaaagaatcagtcttccgtttatcttcagaagaggtaacttcttcggtaacatacaggccggtgtcatcctgcagagggtctctaaaggctctcatctggcttgtgggatccggaagctcctctgtttgctgcaaagcctctggctgctccctgcctatggcgtcctgttggtcatccacatggagcggcagcaatgactctggtactgatggaaagagagcgcagggggcacccatcgggcaagctgctggggcatgctcttgaggcctcaaagaggcaacatcctgtggcacactcttattttcctggtcacccttctcaaatagaatccttgattctagcaaactgccatcatcagaaggcagaaagtctggggggaagtcaggctcccgggggaggggacttccgctgaatggctcctgtgcagccccttcatcctcctgtccctcaatcagagaatggaaggaagggttttgcgttaatgttggaggcatggcaaattcatccataaggaaggagatttctagttgagaatgataagctacacagatcataaatattaagatctccttaactcgagccagctcataatcagagcctcctctaagcttgattgtacagcccaggtgctgtggacagccttcaaaaaacatcagtgttttggtttgttctacaaataaacaaacacaaggttaagaaggtttaggtggcaatccagaagtccagacagaattagttcattatcttaacatctaccagataaaaactcttaagtaagaccatagttgtatgctaatagccatttcctactattaatatatcaacatcatcgttctgaggagtttattcatttcctcaggtccccccatttcaggtaaatctacactaaagatcactcaccattaggcaactgaaacatctgcatgtaaaatttgtgacaggtgcccaggtggggtttggtaagcagctggtccattgacatcaccaaatcaccttgggtcatccggctaactcgttctaaaacttgctagaacacagaacatcatcatattacaaaattaaagaagaataaaattttagtacattttatatggaaaaataatagaaacatttgaaaatgccctcaccaaaaaaaaaagaaaatagaaaatgccctattttctttcaagatgaatttccttgattttagtaattatatgacttttactgattctaggtaagtctacacttggcaatcagtatgtgcttactaaaataaaccatactcacattaataatatcaaaagacatttaagtattattcattggcacaagatactgatacagcggtggtgggtggggaatttccacaactgacctccatactaaagaaggtaatttttcaagggagagaaaattttctgctttgtatgattccccaaacaaaatgacgcctctacaaagactacttaataactaatgtcaactacacctatggtttggtagacacttataatgagtgttacataactcattatgtatgagtgctacattaattatactttcttcgagcctgagatcctccagtcttaaataaggaaagcactgccgttcctgtactttcaatatatacagtacagctaagaaataaacaattaaagaacactgtatatctaccacacatgcatataaatttacaagctgtcatttttagaaataatagaaaaataagaacactcactgattttacattaatgaccaaagtaatgccgtgttccagcaacatatcctgtgcaattcgagataccgttttctcaaccagaaccagtgtgggtcgaacatcaactatacgctgaacgtaattctttaggaattccctttcctaagtaagataaataaaaaacatggtatgtggtacaaatcaagatctagacatgtaaaaatactagggcagtgtgactagtaacatcaaactaagtttttttcatccacaaaccactactaatagaagtttcctactaagtaaacattgtactgatgtgttaactcatttttcaggtcctcaatctcaggtaaaaatatgctaaatatcacttaccaccgtgtaagcaaattaattcaaatacaaccaagaatattatttatcattctaaactgctgactatgctagaaagagtttcagaagaaactttattctccaactcactaatttttctttgaaggactctgagttcttaataacttgtaataaaagccaagaatccaattagctagctctcgaagcttaaaaaatcaaaaaattctcacagcttcccaaatgaaagcaactaagtatttttaatataattatggatttccccttttacattctgaaactaaccagaataactcttcgttcaggtatttgaataactaacagacactatttcagctacttcctaatttctatctcccaacaaataatattctacttagaacagtggtagttacaaattaaaacaatgtttaatacaatttcatgacaaaggcttactctcaaagcaaatgaatgttgtaaataacaactcgagtttaaaaaatgtaattagttaattgctttataaaatctctagactcaggagacagtggaaggtggggacacacctgtcacttctgctccaaatgcccagtgttttctgagtcaattttgtattcacggtcagagccaccagctatggatgagcctattccctgcaatgaacttgccctgttatatttcttttcacctttctctgtcttactgatagaaacgacattctcaaattatcccattattaacaaaaagaaatttttttcccatttaaaatttttttcttaatttttatttaattttttcttattttttttctaaatttttatttgtattttctttattttttctttaatttttttcttaattacttatttttggttgctgcacaagggctctctgtagttgcgggggctactctctagttgcagtgcacgggcttctcattgcggtggtttgtcttgttgcacagcaacaggctctaggcgcctgggcttcggcagttgggtcacatgggctctagagtgcaggctcagtagctgtggccaacaagctgctctgcagcatgtgtaatcttccagacccacattggcaggtggattctcaaccactggacccccagggaagtcccaacaaaatgaaatttttttccctgaaatgtgttaatctactctgcttattaaattgcaatttaatgacattttagactattttatttgtgcagcttcaatgaagaactaaaataaattcatttttgtttaagtttctggcctccagtatagggatagcaaatacatttcctcacagttccagctccagtcaactattatgattgtacatgaagcgccttgctaaaattggggcttagaccaggctcagcaaggaacgagtatcaggaggcaggcccggaagacagaatggagcagaggtagaccaacagacctctggggcagaccttgtgaagacagtatgatgcccaacctaattttatccttgcccttttgttctccttcttcttttttactagctaccctgcagcttcctctttgactggtcatgccacaatgagttccccgactccaagcaaagggcggggcagtgtcaaatcaactgatattttctgtcaattcaaactaaaaacctgaataggtcaggacttaaagatataataaactatgttctgaagcactgatgaacaagatgctttgttgctgttattcagttgctcaatcgtgtccaactttttgagaccccgtgaactgcagcacgccaggcttccctgtccttcactatctcccaaagtttgctcaaactcacatccactgagtcagtgatgccatccaaccatctcatcctctgtcatccccttctcctcccaccttcaatctttcccagcatcaggttattttcaaatgagtcggttcttcacatcaggtgaccaaagtattgtagtttcagcttcaaacatcagtccttccaatgaatgttcaggcttgatttccttgaggattgattagtttgatttccttgctgtccaagggactctcaagagtcttctccaacaccacagttcaaaagcatcagttcttcagtgctcagccttctttatggtccaacttttacattactacaggactactggaaaaaccacagctttgagtatatggacctttgtcggcatagtgatgtctctgctttttaatatgctgtctagatctgtcatagcttcattttcaaggagcaagtggctgtagtcaccgtctgcagtaattctagagcaaaaataaagtcactgtttgttactgtttccattttttccccatctatttgccataaagtgacaggactagatgccatgatcttagctatctgaatgttgagttttaagccagctttttcactctcctctttcactttcatcaagaagctctttagttcctctttgctttctcccctaagagtggtgccatgtgcatatctgaagttattgatatttctccctgcaatcttgattccagcttgtgcttcatccagcctggcattaaacatcttctcctatcttaaagcttcttttcagattatgaatttactcagacatccaactgtgtggtaatttgaacgttctttggcattgcccttctttgggattggaatgaaactgaccttctccaatcctgtggccactgctgagttatccaaatttgtcagcatattgagtgcagcactttaacagcatcatcttaatataattatacaagttataattaacaagttatattaattaaatcatgtttattaatatacatttgcccagagcatatgtgtccaacatgaagacttcagtctattaacctggtcataaaaggggagttacagtggataaatataaggacaactttttggtaactaaatacaattttataacaattttacatattttacatctttgcaatcaggatgcatcttgcaaaccatgtggttgtgatctaagtctgtaagtcttccactgataccagtgagatcacgaaaattcccagcatcaaagtagctcagttttccacaaaccataactgtgtttcttctgattccttatttcagttctcattgaaaagtcacagtaaatcacagctagaaggaatggcataaatccggttgaaacccctcatttttactgatacctagctgaattccaaaaaggaaacagtcccagttaacagagttcactaagcaacagagcatggtgcctttcaccacaattaagttttttctgtgtctgtgaattgagaacaaaagtttccctggtggctcagtggtaaagaatccgcctgccaatgcaagagacatgagttcaatcccaggtctgggaagatcccacatgccttggagcaactaagcctgtgcgccacaactactgaggctgtgctatagagcccaagagctgcaattactaaagctacgcaacctagagtccgtgctccacaacaagagaagctgccacaatgagaagcctgtgcaccatacctagagagtcgcccccactcacaactacagaaaagtccatgcatcaaccaagacccagccagataaattaattttttttaaaaagtgactactcctatcacgtgcaaaagtgagctcatgaatttccaagtaatgcttttcccctaaatgtttctggaaccgaatattaagtgtttctgctataataggaaaaacacatttctgaaaacctcccattctgaacaactgcaaattaattaatagcatttatgggagaaaagaagttggggcagacaacctatacaacttcatatcaagagcactaataataataataagtggtaccttgacagaggacttggacagcccagccaagcagctcagcctagctggaggtggcctcaagggaaattttaaatgtacaaaatcaactgcaacagtacaagtggaaatgaagctccaagcaatgagtgcccaaaagccatccaggaccaggggctgggtctccctggggagagaccctcctctttcagcaggagctcatttctaatctcttaaaatggagctaaagggctgtgtgggaactgagccgaggctgttcttccttccagctgagggctataatcctactaaagctattctgggcctcctcacttaagaaaaaccacacagaaatggacacgacttccatctgacatcactcccttttactgacacttggtgttctagaaacatgttttagtagaacagtctatattgaaaaacaggtgttactgctggaaacctgattaaaaatcgttagacaaatccttaaagtaagttcatgaccccagtgggaagaaaaaacaggatttggattttcaccttttttcaactattccccaaaagtcacatgttgccattaacactttgcaactaaaaacagtgacaaaggctttggtaagcttctaaagtatgattcataagaatgtcttctataatacattttttaatgaaacaagagcaatgaagtttgcctatcaaatttaaccagctggaagaaagtataagagttggcaagtatcttagtatacaaacatttctccagattacggtttcagtaaggagttcttacctgaagcacaataggatcaatgcaagtaaatttggtttcttctctgtagagatattcaatggaacacttcaacagaagaattttggggtttttaatagaagaattcatctaaaatataaatgaacagtttgctaaaactttgaaagtttgcaatttatagacctcctttaatcacaactctaagttcatactggtcataattcctcttaaatagattccctcattatattcagattaaaatactctcatttattttgtgctattcttattttttttttcaaagcaaataattaaagccatgcaaagttctttaaaaactggcttctttttcactaatgctattttacccaattttctatactcttaactatctttttttaaatccctaatgtttttaagaaaagttatcacacccttggtaggagggagagggacttaaaagataggctacttgataaactcccaaagatcagcaattctacaagcagaatttaacttttctaagactcaagaaaagtagaggagggagaaaggaattaaaacatctgctgaacatatttttgatggaataaatttccagcagttgtaaattcgcaagctaaactgggaaacaagcagttaacaacagaaaatcttaaaacacatccagaaatagagactcaaacaatataccctaaccacacaactaaagccagaggcagaggagtctgcatcctgcaacagaagtttccatctgaccaaacttattagcagggcttttttagtaactacaaattaaagactgtctctaaacatggtcattggggccagattcattcacgcatatgtgaccaccacacacataacagtttttaattctgtagatgagcacaacataactacctctgaattcaacaaacatcatttaatctgatttaaagtactactttgatgggtacagtgctgttttaataagactctatgtagaaatatggactttggaccattgctatgaaataatatcaaattcaaacataattttatttatctatggtcactaatactttttaggaagtttaataccttataaaaatatattattattctcagcttagaaaagagtgaaaacagactgcagtttatgcattcagttgctcaagcctgaaatttgcctgagctctcactgtaaccaaaccaacagtagcagagatgaggccaggtgtctctatttttaacacattctcttagtgattctgaagcacagcaaggtctgagaacactgttgcagatcatcagtttctctaaaagtgagaaccagtaaacagataaacaacactggaaacaccgagtgactccattacaaagtcccacccaaatgcaaattggtgcagccactatggaaagcagtacggagtttccttaacaaaaataaaaacagagctaccatatcatcctgcaattgcactcctgagcagacatccagagagaaactccaatttggaaaaatatacacaccccaatgctcacagaagcactatttacaatagccaagacacagaagccatctaaatgtccatccacagatgaatggataaagatgaaaatacacacacacacacacacacacacgaatactaaaaagaatgaaatcatgacatttacagcaataaggacggacctagagattatcatactaaccaagtcaaagacaagtatcatatgatatcacttctatgtgggatctaaaatatgataaaaattagcttctttaaaacggaaacagattcacaggcatagaaaacaaacttatggttaccaaaggggaaagtgtagtgtggggggcagggataaattaggagtttggaaatggcagccactgtgtataaaacagataaacaacaagatcctacagtattgcacacagaactatattcaatatcttgtaataaacttaatggaaaatatgaaaaagaatatacatatatatgcacatacctataactgaatcactttgctgtataccagaaacacaacactattaattaactatacttcattaaaataaaatttcgtttaattaaaaaagtagtcccacccttcctctacccaccccccattctcactcccctaaaactactaaatgagaatttctaaggtttgggcttaggaatctacatttttaataaggtcctgatacatattacatttgctaaccagtagccttcagaataaaatgagagacaaagccctcatctgcttcctccagcctcatttcctgccagttcctggcaccatctggcaccttaggatctcagactttccttagtacaaggagttatttacccttctctctgtgctggtgctagaaagaggcctcacagctgaaggtacagagaaagatacagaattccagtcataattctgtgttcagccctatgaggaagaacagagttttaaaatggtaggcctctggaagaattctggtctgttagaaaatcttttatccctgagatgtggcagggtcaagagagaaatgacaccagcatcctctcagcctgttgactaggaagccttcttctgtctgatgagttctcactgtccaagtccctgtcatcatcagctctgggagactctccctgaacccccaaattttactgctagtcactcctccctgtccaatctcctttccctccatgatgagggcaccctcagcttgttggcttggcacacagtcatagtttgctgaacttcaatgttgaactgaatcacattacctttttatgtgcaatattcttggtgcaaacaaatccattgacaaccacagaatcaaacttctttccacctgggatctaatgaaacaattaagaaaacaatacaattcgatatacatctttagaatgcagtcaaatgaattctgtaagtatttatttccactttttgttttccctattatgtaaccaaataagaacaaaaagatctaggatgcatttcttcctttcaaccaataattaatggcaccttcctacaatcatcaactctctaatatactatctggtactctagaatacccatttgaccaaacaaattaatgccagatgtcaattaaaaccactattcagttaaacatcataggcaaaaaatataggcaaaactccactactctctaaataaaacaattacccactgcttttcctcagaacagtaacagccgtgtgtgaagagaggccttcttatagatgacacatcaagaggaggaagtaggaaagtttgggttcccaactcactgcaagcccaacttacccccacccccactcatctctcacttcctaagagtggctttcatgacctttaagtgcactgctaccaaataggacagaaaaacttccctctcctcaccgagcatccttcctggcaacgaccttttcagattaccattaagagacaaattactattgggcccatctcatgaatgctgaacatgaggaaaacattggtagagctcacttttttgatgtggacaaactgacggatatccatgtcatcatcccggttcttgacgtcgggtcggactgtctgaacaacctggcagaccagggatacgatgatgtccctccaagacgttgacaatgactcactatggagcaactgttggagcagcgccatcatgtggttatgattagctgaactacaaaaatgttacaggaaagacgttaatactgccacagaaaacagctctgaagatgcaacacagtctacaaagaaatcagcacatgatttaatggcttacggtaagatcttcttggtcattttattctttcagcatatctgcaccttaatgcttttgcatataaagaaaatctgtgaatatcttcaattaagataacccatttaagggagattcaagagggaagagacatgtgcatacttatagctgattcatgatgttgtacagcagaaactaacaacactgtaaagcaattatcctccaattaaaaaattgaaaaagaaataaaacaaaaagtctatgggtttgataaaaaaaaaaaaccctatttaattcaattaaattttaacacataaataacaatggggatagacaagcacaactaggacactctgctttattagaagttttaccagaacaggctttatttcctaagtaatgttagcatttttgactttataaggaagaactatacaaatgcctatcaagtcacttaagattagaaaaatggagaattaaaatgaataagctcactgccttacagcaacctctccatagcttgtttctctccattctcctccctgagcagctccaggttgttatgatgccagcccaaaggtgtgaaaggcagttctttggatttttcctcaactcgacggttaaataaggattctaagtgtaaaataagaaattatattcattgtcaagttttataccatctactcagagatttagaaatcaccaacttatctttttaaaatttttaagttagccaattcaaattattgatgtaaaaaaagcaaggacatgtttaaattcatagataaaaaaaattaagtctgagttagaaagtcaacattctcaacagccaaaatcagagacagaagtgtaaagagtaaatttacataagcaaccagggctctcaagaaagtaactataaatacggcttttgaaaagcaaatgaaatgaggtttacagtctttttatttatttggggatattaagaaagagaggtggttaattttccctataaaatcacaaactgaacactgcattcaacagaaatcagaatgcaaggagaacttgtgatagtgtgggtgctgagaaaagctcagctttcatttgtctgaaccaggatatgacagtctagaaagtctactcaaacaatcctttcagtgtttctttttcaatactagaacaaaaaaggctttcttcttaattggcaaaacttttacaagtcagaccaaaaaattaactgtgaagaaatcaaaacatggtaaatagtaatttatataaaattttgtaaatgatcaaaacaaaaaaaaaaaaacaggtaatactaaatgctttgcaaaaaagatactaaacaacttttgaaattgtaattgaataaatgaataaattgtaaaatgaataaattaaaaattctctagtctttcccctcttaaagcaaactgaacaaatgacaaaaagccttcaactaaacagtccagcagcctccagagtaaagccagtgtccatgacaagtgaggtacaagaacaacacatttcaattatgtaaacccttggtctataaacatctggttgaaccagatgcttgaaggtgaatttagaaataagttgtgacactatctgtcagcagctgcccttgtaccagctcaccctaccttctctcttttatgtgaaaccctcccattatctgaggcctaagctgtagcatgttatggaccaaataagtatgtcttcactccacagcaagctaagtaggggtggggttagaaaaggtttgtattcttctgtacttcctttcgtccccaaggaaatgataagcagaattagttctttatttccttcagtccacttattgtccaaatccagagagcaagcagcatcctcaattagataagatctgcctgtggctttttgatgagcttgacagtcacttgatgatatgtctatcaatacttaatactacattcatgatacagaaaagcatttccgtgatatagaaaaacctttaaatgaataaaattcaaaatctaggtaaagacttttaaacaattatttttcagatcagagacctctcaaactaagtccaagtttatatttttggttttcagcagtctcaaggctactacacatattgaaaaactgtgttcctatggtactaaaataatttaatgcattgtcagtactcactcagtgccaatcagtatcctgggcccacagtgtatctccatgaacaagagacacgatcccatgtatagcttttgataaaattacctttgatgaaggcgtcacttattgatagctgttgtcctccattgtcagaaatcaaatactctgcatgccagggagagaacatagagaggaggaaggaaaaggaaaggcctatgactataacaggctagcataattatacagaaaacacacccacacataaagtattactcacactaaacccatcacagccaagtcacggaaactttaggctaaaatatcagtttataacttgttctgcatacttcctactaaacttgatagacttaataactcaacagagccatgagacagcaatgacagataatctttttaacagatcatttttcccttatcaaacctgaactgctttatgaaaactgaggtctgtcacggatttgcatgacaagcctaaaaagttacactctttatctcatccatagccatatgacaaataataaattcagatagagaacacactgcataaaaaaaataaggtggggttttttgaatttcaaaatataagctataaaacaaattaatacaaaaatgataatggaagggaattaagatataactcataatgattatattagtttttaatttgagttttaatgtttcaaaaattctacccaaacacttccaaatagttgccgaaagataacttctgaacacactctgaatgtgttctttcaaaacttttagaatattaaatattacaagtgaaacttattctttactttcgcatgacctttcctctaggtctgtgaccaagcacggcccaaatgaggttctttctaccgtgcaaatttaaccacaatgcattttaagtcctttaaggtaaaggtgatccacaaaattcttttcaagtagatctcatttataaacaaaagggcttcaaagtcaatgtgtttataagccaatacactcatccttcaaaacaaaagagcagagaaaaaaaaatttagcaacttcaagtgtgccatgccaaatacaatataatcaagtatgtggaccagtgaaaacagatatactttatttctacacctccctcacagaaattaataatgccaaagcctgtttatccgactaatgtacagaggctttagaagctttactcttcagtctaaaggatatatatgtacatatatatatataatttcagaagcaatagattttccccattttattatgaaaaaactttaaacatacagaaatccctatatatcctccatcaagactgaacaactgtttaatgacttgccgtatctgatttctctgtgtgcttttctcccagaccatttgaagttacacctatcatgacactttaccactaatacttcagcatgcatctcttaaaaaataagagcattcttctctagagccataatatttacacacttaagaaaactgacaatttcttaatatcatcatattagtccatattcaagtttatctgtttccaaaatgcttgaataaatttttttccctcaaacctggatccattaaggttcatacattacattctcttcattttctcttcatctagagcagaccttctaccattttctttctcctgatactgaattttgaaagaactcaggccaaatgtcacattctggatttgatggactatctcctcatggtgctgtttaacttgctcttatatcccacagactggttccaaataggaaaaggagtatgtcaaggctgtatattgtcaccctgcttatttaacttatatgcagagtacatcatgagcaacgctgggctggaagaagcacaagctggaatcaagattgccaggagaaatatcaataacctcagatatgcagatgacaccacccttatggcagaaagtgaagaggaactaaaaagcctcttgatgaaagtgaaagaggagagtgaaaaagttggcttgaagctcaacattcagaaaatgaagatcatgaaatctggtcgcatcacttcatgggaaatagatgaggaaacagtggaaacagtgtcagactttattttggggggctccaaaatcactgcagatggtgactgcagccatgaaattaaaagaagcttactccttggaagaaaagttatgaccaacctagatggcatattcaaaagcagagacattaccttgctgactaaggtctgtctagtcaaggctttggtttttccagtggtcatgtatggatgtaagaattagactgtgaagaaggctgagcgccaaagaattgatggttttgaactgtggtgttggagaagactcttgagagttccttggactgcaaggagatccaagcagtccattctgaaggagatcagccctgggatttctttggaaggaatgatgcttaagctgaaactccagtactttggccacctcatgcgaagagttgactcattggaaaagactttgatgctgggagggattgagggcaggaagagaaggggacgacagaggatgagatggctggatggcatcacggactcgatggccgtgaggctgagtgaactccgggagttggtgatggacaaagaggcctggcgtgctgcgattcgtggggtcgcaaagagtcggacacaactgagcgactgaactgaactgatacccccatatttccctataaatgtggagttagatctaggggtttgaggaagtcatgcttttcattttcttttctaggtactacttgctaactttccaagaatagttcagaatcctgcttccaacacgtaataaaatatattctaactgcatagctctccataacaaatagtgagaaattaatcaaaccagaagatcacactgactcagttttacaagtttctgaaaatgagttagcttatgtaatacaaaaaaccatgagcatctttttaagcatagatacttaaacaaattttaacagttcatatttcctcagtgttaaaagctagagaatgatccctaagaaaagatgtaacaattttagtaacgattaattttaatggaaagatgagaatcacccattctcatttgtatttaagagaaatgaaaaccagacgcaggggaaatctattattctttcattttctgaactagatcattcttatgactttagtttctggtaaccagtgttcctcttaattacaatgtagaaaaaaacaatttattatgtctcaacttcacaaaagagaaaaaaaaaaattcttgttatatgctaaaagctaacgagagagaagtgtgaaagtcagaaacatttactaaggggtgaaagttctcaaattacaggctctctgaagtcattactaagaaagaaggtaattattctggtatatgtgtgtgtatacacatatatgggctttcctggtggctcagacagtaaagaatccacctgcaatgtaggaaacctgggttcaatctggaatattactcagccatgaaaaaagaatgaaatctttctatttgtgaaaacataggttgacctagagagtattatgctaggtgtagtaagtcagagaaatacaaatactgtatattttcccttatatgtggagtctaaaaacaaaacaaatgaataaacagaacagaaatagagttatagatacagaaatagagtcatagatacagagagcaaacaagtggttgccagagaggaggagagtggaagaagggaagaaacaggtgagggagatgaaagggtacaaacttacagttgcaaaataactaagtcatggatatgaaatgtatcatgtggggaatatagtcaattaactgtgtaatatctttatatggtaatatatcatactgaactggcattcatttcaaaatgtatagaaagatggaataactgttgatcaattatacttcaaaaacaaactcagaaaaagagataagattggtggttactagaggaagggcatgggggaaggggaactgaaggaaggcagtgaagaggtacaaactttcaataccagggacgtaatatataacacaataaatataatcaacacagctatatatcatatgtgaaaatttttaagagtaaattctaagagttctcatcataaagaaaaaagttttttctatttcttttatcttgtagtctatgtgagatgatagatgttcactaaacttatactgtgatgaagaagtgaagtcactcagtcgtgtccaactctttgcaaccccatggactgttgcctacaaggctgctctgtccatggaattttccaggcaagagtactggagtgtgttgccatttccttctccaggggatcttcccgagccagggatcaagctcgggttgcccgcattgcaggcagacactttaccgtttgagccatcagttcagctcagttcagttcagtcgctcagtcgtgtccgaatctctgcgaccccatgaatgccaggcctccctgtccatcaccaactcccagggttcactcagactcacatccatcgagtcagtgatgccatccagccatctcatcctcagtcgtccccttctcctcctgcccccaatccctcccagcatcagagtcttttccaatgagtcaactcttcgcatgaggtggccaaagtactggagcttcagcttcagtatcattccttccaaagaaatcccagggctgatctccttcagaatggactgcttggatctccttgcagtccaagggactctcaagagtcttcttcaacaccacagttcaaaagcatcaattcttcggcgctcagctttcttcatcgtccaactctcacatccatacatgaccacaggaaaaaccatagccttgactagacggacctttgttggcaaagtaatatctctgcttttcaatatgctatataggttggtcataacttttcttccaaggagtaagcatctttgtatttcatggctgcagtcaccatctgcagtgatttcggagccccccaaaaacaaagtctgacactgtttccactgtttccccatctacttcccatgaagtgataggaccagatgccatgatcttcattttctaaatgttgagctttaagccaactttttcactctctactttcactttcatcaaaaggctttttagttcctcttcactttctgccataagggtggtctatactgtacaccttaaaattatatactgctttttgtcaattctatctcaataaaactaaaggggggaaaaagtaacaacgacaacaaccaggcactctccatctccttattatcttggatttcacttcttagcagtgagtgttctttcttatcttgacagaagttaaaaaaaaaagcttcagttaatattatatcaacttccccaaataactgacctaacttgtctttctttgcatcacaattttaaaaatattttccaagatatccttgacatttcctgcagtcttcagtacaatctggacttctgctaacctgccactttttttgaaagcactgaccctctttcagactgatcctcatatgaaggctaactctcacaatttttgtagaaaaaaattttttttcaaaggttgaggtcagaaaactgccagaggagttgtgacagtttttccaactgtcagtgcttcccctttcattttccttagagatgcaatttgagggtgcactgtcaaaatgtcaatggggccttctatttcattcttctcctaacattatgaagttgggtttcctaaagcaaatgtttgactgggctcagcagctcactttttgctattatgaatttcatgacgtcaggtcactttcttcatgatttcaaaaagcgccttaactttccaagagatgaaattatcaacaagtcaaaaatgtatttcataactctactttcagcacaatgaaattgccaccaacgatgtccaggaaacagatacctctatcatgacagatcatgccacctctgaaccacatctatcattcatatgacaaaaacccaaatcttccacatgaccagcatctacagttaaatctcacccaagtgcccagtctgcgtcaaagtcctttcatactcacccaatgttcaccaccacttctccactttctgctttgaggattctgatacagatgtgtatcatactcatgttcagtgctagtcaggtctctccttttcttaaacctaaactggcttttaattatatccaacaaagtaagcctcatcacccatttaaaaaaaaaaaaaaaagcatttcttttctgcatactgctatgttcaattttagtaatggcttaaacttatttttccttttataccaaatctcctttgaattatgatttttgagtcagtagactaaaacctcaaagagaacagctaaaagaatgattttttttttggtattagagaagaaaacttttttacaaatacagcatatatacaacaagcattttaagtaataaagatgctttggaatgtgtgaatgtttttcgccagtctagttcaagcacctggaaaggtttagtgaaacactatgctactgggtaacagcataagcaaagaggctttaaaatattaaatgaaaaaagagaaacgaatagagcagaacatccatgttataatgcaaagaaatgccaccttggaagttgcacattatgctaagggaaaagcagtctgatgctgttccctttaatgactaaaagctttaagctgggtgtggtggtactaagggaggaaacaagaaatgaaaggaactggaaccaaccaaaaagaaaaaaaacatgtggagaagaggtgtgggaaaaatgagaaagggtggaccaaaacccacagcaaatcccctcagccatggggacagaggaagcaagaaggacaggccggatgagatccacggcccaactctccagcctgtgttcagattccaggtggtgactccctcctacctttttggtcagcagggtgagggggcacatgtgggtacttggagggcttcttgatatggaagttcacgttgtccagctccacgttcaggctgatggaagcggctgagtcactgtccactgtggactggaaactgctgactgatgggcgcttgctaggactggcagaatcttttagtgttggggaggggaaagaaatatagggagaggaggggagtaaaaacgggtttcatcagggtattggaggaaaggagaaaaacggttttttttttaatatacaagcccaatgtgcaataccaaaatggatacagtattttcatgtattgatacttctgtgtagacttaataaaatttgaaccagttaaatataaaatgaatttttaaaataaagaaatatattggaggttctgcagagagaaggcctgataccatagcgaagaggcgagaaagttgtctattgcaatattattagctcggagttatttttaagctgctgcaaactaaagactatagcgaaatctgaaaacaccagtgacttaacaaattggtttcttaagaaaatactgtatctaggacaatgattgctatcagatgttctttacgtttagttgaagccataaaacttaacagtaggattgttccaactaaataaaacactgtatcatacatacacgttaatgattcataaaaactaaaacgtcagaaagtgaaactcactagtcaaattatcgtcaccttcttcagctatctgctcagtgtcactgtcatcaaacttgatgtctttaaaccaggatggctcagagtgtccttccacggagttcaccgagtcactgtccggagaaggggtctcggaaaattctgtactctgaaagagtcaagacagaatccaagcaattgacccacaatggcaacaatgttgaggctgtcacactacaaataaattccagcctaatatttgtataaggctaaccactgaatatattaaataagcaaatcagtagaaactttaagttgtaagccagcattataactggcaattccactcttaactataatattcatgaatcagcaggctaaaaggcagcatattatgaccaaacatattatacagattttatagtgtttcatttcttttattcctgagagtgaaaatggcttagaatttataaccctgtgccaatgctaggacacaacttggaaaactgttagattttcagacataccaccaccagtctttgggatcattcatcttttctaccgaatcattttccaactttagttcacaaaagtgttacaggatattattttatcaagttaatataaacaaaaagtttatgttaaagttttttaaaacttctaagtatgtgatttccatgttcctaatcaaactaaagaaacagaaaagaaaaagaatattcaccattttatcagttatacaatttaatattgctatagagtcaaaatctactgtaacagtaacattaaatttcttaatgattttattacatacacttcctcttaatccataaaaaaccagacataataaaattaaaaaccactgagggtaaatgacactacaaagtcaagcttaagaaaagctgctgctgctgctaagtcgcttcagtcgtgtccgactctgtgcgaccccagagatgacagcccaccaggctcccccgtccctgggattctccaggcaagaacactggagtgggttgccatttccttctccaatgcaagctgcacaaactgaaaagtttggggtttcaaagggtttttcatcacaactaccaaccaagtaaaaatgttagagctttcctcaaatggcagggaaaacatactagaaaagtatatcattgggtaactcaactactttttattctcattgacaaggaagacttggtaatgaagctctctgtattctcattagccgtaccactgaacactacctgcaacggcctgtacagcgcatactcatccctgaagagctggtcgtggtgactgacacaatccagccaacgtccatccaccattgcctgtccaattgctatagcctgtgccctgaatcaagaccagagaaaacgaaaacttttaagacaataattttacaagatgagacacaaactgaatttattttctattctaatcagagttgaaatttcaaacagtccttggataggtgagggataaaacgagagagatttgaagcttaattaaaagattttctcaagtaccatagtaaagaagaacctacagacaaggcagttccaacaagacctaatttcaattacacaaacatcaacaagtattcaaggcaagcatcattagttcagttcagtcactcagtcatatccaactctttgcgactccatggactgcagcacgctaggcttccctgtccatcaccaactcccagagattactctactcatgtccatagagtcagtgatgccatccaaccatctcatcctctgtcgtccccttctcctgccgccttcaatctttcccagcatcaaggtctttttcagtgagtcagttcttcacatcaggtagccaaagtattggagtttcagcttcagcatcagtccttccaatgaaaactcaggactgatttgctttaggatggactggttggatccccttgctgtccaagggactctcaagagtcttctccaacaccacagttcaaaaccatcaattcttaggcgctcagctttttttataattcaactctcacatccattgatcttagctttttcaatgttgagttttaagccagctttttcactctcttacaccttcttcaagaggctctttagctcctctctgctttctgccataagggtggtgccatctgcatatctgaggttattgatatttctcccagccatcttgattctagcttgtgcttcatccagcccggcatgtctcacaatgtactctgcatataagttaaatacggtgacaatattacagccttgacatactcctttcctgatttggaaccagtctgttgttccatgtccagttctaactgtggcttcttgacctgcatacagatttctcaggaggcaggtcaggtggtctggtattcccatctctaagaattttccagtttgttgtgacccacacagtcaaaagctttggcacagtaaataaagcagaagtagatgtttttccggaactctcttgcttttttaatgatccaatggatattggcaatttgatctctggttcctctgccttttctaaattcagcttcaacagttcatgtactgttgaagcctggcttggagaattttgagcattactttgctagcatgtgcgatgagtgccattgtgcaagcatacccctgtacttagtagatgaggataaaaaagactgttgagaacagtatgactcctgtcctcgaggagcttacagtctttgagaagacaataccaaatattatagatgtaggtataaaatgtatatatatacacacacatatatatacatgaaatagacatttcacaatttatcaaaaaatttagtccatattattgcatttcattttcacagcttcttcacaggatcatattttcatatttttctcattggagctgagaggtcaagtctcaaagagactgaataacttcacagagggcataaagttaaaaaaagatacaatccaaactggaagccagagcttcactgtttacagctgttttttctcttctacatgcttgtttcctcctatgggaggagaagtagctactctaaacaagcagaaaagccaagcgacacaccaccctgaaaggcaacaggacctgtctggtgctttcacacaaatgatttgtgaggccggctagcacactctaggtgtggctaatggacccagttttgaagacaggtcgaaagtccacattagggagcaaaaacaggtgaatccactgtggccttgggttaaagctctattccccaatcctgcagagctctgagttttgggaactactgcacatttctgcttttaataaataaggtaaactgtgacccccatttggctccttacatctaattacaacacagaagggaggaggattgagtaactaacaccccaaacaacaaatgcagaaatccaacagcatcctactcacaaagaaagctgttccttttatgacatgtcattaaaaatcaattcataaatttttcttaagacccattaccttgtagcaatgtgtccatttcggattaaccagttgactaactcctttcctacaatgcaattggggtgtgttctcagccagtagcggtgatcctgaaactccattccactactgtgatggcagattttcttccataggtcttttaattgaacactgtcctgaaatcacattacgagcaagcaattacacctgagaaagatactatacacttttcagatttcttcctgtgatttttagactcatgaaaggaaactcaattcagatttctttgtcagagctaacttacatgatttaatacaaataacacatgcatggagaataatttgtactcagctcatctaattccaaacaactttttctcttagggaaaaactatcccaactaattttttttttcagtgaatggcatatattatcagtctcctgattatatgagcagaaaatttcacatccctctttggagacagaacaaataagaagggaacaatcatgttactctaaagtaactgtttctgtagctttcacttcatcagattctcacctatacccagctttcatcagggaattactccctgctcaagacttcaacactgctcagcatctacagtttctaatctaaaacttacaaagactgaattcaccaccttccaccaagtagccccaaataactttccattctcattgcccacagaatcaaacttaacatccctccaaacctctcccaaatcataaactctaattcggtccatggaaaatgccaagcttattctcacctctatacctttccccacactttaaataagattttcttccttcactgcccacccaaatccattcgatccttcaaggtccagtgcaagccttttagtttaaagcctttcctgacttctctactactagtgctcttcctttttttttttaaatagtaaagtattacttcttttactattacagacctgctcattgacctcatttttactttctgaattataaacctgaggagtgaaaccatatcttccatttctttgagtcactcttatgattgaacacagtagtttacaaagataaatttaataaactgattactacctacgtaaacatataatattaaatgtctaaaaagtattccacatgtatgagaaacatatcccaaagtttaagcagcaatctgggatataactcaaagttaagctctagaattatagaggcacctgaattctgatctttatagtggtcaagaaaatattaatgcagcatatgagtatgggctgcttgaccaatttcaggtgagcctaataaaaacttaagcaaactagtttctctatttaagtaatatgctaactggctatttcaatttcatttgcctttaaaaaaaaaaaatcaatgagacgaaacattcttcatgcccaaaacttgcaactggtcaaagatactggactggtaccagaagaattttgcgttcatcctcagtggtctctgtccgaacatacgttcggttagcctggggactgacagacgtctcatatgatggtaccattggagacccagatcgatccagtgacagattagtaatgctggctgatctggaaattgaaaacagaaagtgaaaacacagttgtaaattcttcatcaacagagagaattacagtgaaagttcatttttaaataaatgcttacttgctaatgttaggggcacttttaaaagtagttatgatggttgtgtatgacattattactgagaaagctggaagaagagtatccaggaattctctgcactattatttccaacgtctatgttagtctgtaattatttcaagttaagtttaaaaggaaatcattatgagaggattataagaaaaaattatatttgtagtgcatacagcagtaataccccaaacaaaacaggtacaaactcttcttaaaatgatgaaaactagggtgttttctttttgaactgatgaatataaagcatcagtccaaatgcagctatctctgcattcctacacataccaagaggaatactgtaatttgtcccatcttttaaaacactatcttgactttgcattcctctgctgcattcccctgcttcagtacaacaaaactcatctccaatccttctttcactctctctagaatcctgaacaacccactgaaacttcctataccaatatttattgttcacagtcaagttttcactccttatctgacagagcagcaggataactccctcttctttgaaatactttcttcgcttggctactaagacaacctactctgctggcttcctctgacctcatcactcatctctccttcccagtctccttttctggttcctcttcatttccccaatcttggtccttggtccttacttcctcactttccacacttactctcttgatgtcctcacacaggttcatagttttaaatatgattcacatgataataccacccaagtttatatctctgacttgaattcctgtcctgaactctagatgtatacatccaactttttgatatctcagttggatgtctagaggtatctcaaattcaacatgtctaaaactaaactgttcctccttgtcttccccatatcaataaatggcaactctgtcttttcaactgctcaggcaggaacaagcaagaatgccctctcttaacatttattttcagaatcatactgggagcataagctagtgcaataagaaaaggtaataaaggactacagaatggaaaaaaagaattaaaactgtctttcttcacagatgaccatctatgtaaaaatctgaaaagatcaaccaaaagactccccaaattataacaaggttgcaagatgcaagattaatatacaaaagtcagtcactttcctataccagcaatgaacaaatgaaattaaaaattaaaacacactaccatttacatcagcattccccaaaacgaaatacttaagtataaatctaaatatgtataagatctgaaaaaagaaaactacaaaactttgatcaaagatatcaaggaactaagttaatggagaaaaagtcattgttcatggataagaaaactcaatattgtcatgatattagtatttctcaacctgatctatgaatttaatacaatctcagtcaaaatgctagtaagctgttctgtggataatgaaaaactgatcctaaggtttatgtgttgggcaaaaggcccaaaatagccagcgtaatatggaaggaacaaacagaggagtgacacatccagcttacagacagaccataaagctacaacaacaaagacaatgcggtgttagtgaaagaatagcaaataccatcagtgggacaaaatacagagcccagaaacacatccacataacacagtcactaatctctgacgaaggagcaaaggcagtttaatgaggcaaagatagtcatttcaagaaatgctgctagaactggacctccacatgcaaaaaaatattaacctagacacagacctttttagacctagaccattctaaaaaattaactcaaaataaatcacagatctaaatgtaaaatgcaaagccaactcctggacaataacataggagaaaatccagacggccttgggtattgagatgactttttagatacaacactgaagcatcatccatgaaaaaactgacaggctaacttgattaaaattaaaaatgatgagcataaatatgtcttttatgctctgcaaaaaagacatcaagaattagacgacaagccacagactgggaaaaaacaccggcaaaaaatttctttgacaaagggcagttatccaaaacatacaaagaactccaaaaactcaacaataagaaaacaactcagttaaaaagcagggcaaagacctagatagacacctcaccaaagaaggtatacagacagcaaggatgggagcatatgaaaacatgttcagcatcacgtgtcataagggaaaagcacattaaaacaatgagtcagcattatacacctatcagaatggtcaaaatccagaatacagatgacatcaaatactggcaacgacagggaccaatgcaactcccattcactgctggtacagctactgtggagagcagtttcttacaaaactcaacatactcttaactgtaggatccagtaatcacatgccttagtatttatccaaatgaatgaaaaatacatccacactaaaacttgcatatacacctttatagaaaccttattcatcgttgccaaaacatggacgcaaccaagatgtccttcagtaggtgagtggatgaataaactgttgtagttccaaacaatggactattctccaatgctaagaaatgagctatcaagccaaaaataaaacccatggaagaaactaaaatgcatattgccaagtgaaagaaatcaatctgaaaaggctatatactgtatgattccaactatgtaacattctggaaaaggcaaaactatgatgacagtaaaaagatgtgtggttgccatgggttggggggagtaagggatcaataagtagaacacagaggattttttaaaacactgaaactattctgatccctacttcagtggtgaatatatgtcattacatatttgttcaaacccacagaacatacaacaccaagagcaaactatagacttgagtaaaaatgatgtgtcattgtacattcatcaactttaacaacatatcactctagtctcggatgattatttataatgcaggacgttgtggggaggggctatatgggaactctctgcactttccgatcaattctgctgtgaacccacactgctctacaaaatgaagtttatacgctttttttaaagtaaaagatgatgtctgcaacttactctcaaacactccagaaaaaaaaaaaagtaaatgggcaaaatgtaaattagtgaatcttaatgaagaatgtatgaaaacttattccactctatttcttgcaactcttttgcaagtgtaaaattttctcaaaataaataaaaaattaagatctacaacagcttcccactcactgattaaataccaaaatccttacaatgaacagtaacaggttttcctgctggtacacaggactcccagttactccctgccaggcatgtttcctcttgggaactggctattccgtctgcttagtaaactctctataaaatgtccgcatagtttactcccccatatcctcaagtctttgctcagacatcaccctccctgtgaggtcttcactgagcacagtattcaaaattccaacctcctcccctactccttacgcttttgtatgctttaaacttctgtctgattcactgctgctgcagctgctgatgctaagtcgcatcagtcatgtctgactctgtgcaaccccatagacggcagcccaccaggctcctccgtccctgggattctccaagcaagaatactggagtgggttgctacttccttctgcagtgcatgaaagtgcaaagtgaaagtgaagtcgctcagtcgtgtccaacccttcctgaccacatggactgtagcccaccaggctcctctgtccatgggattctccaggcaagagtactggagtgggttgccattgccccctccagacataaacccgttcctgcattatcccatatttacagacttcaaccttaccccaggccaagtatctcataaacctaaactcccagacattaataaagtgtacaaagctaactgaggacagtagcctgtacagagtaggcactctgatttggatgaagcaatgcaaactcattcttactagaaagacaactagaatcacattagcaaatgaggtgcaccttttgagggacagcacattaataactgtatttacagctgtactacaaacacctactttgcaggcacttattaagtacttgctgaaagaataaactgaacgtatgttaaaccatggtgagtcagacgcctattcctttgggtttacaacaacttactcaccaattaactttgtaataattcaaagtattttcagggggaggtgtggatgttagtaaaattctagcaggttgaaaaggaaatgagcagttacagaacaattataagcaactatttcaaggaatttggctaagaaaatatattgagaatatagaaaactataggcaaaacacaaaggaagggggtttgtttctttttaataggtaagacctgagtttgtttaaatgcatatggtaaggagtcagcggagagaagtggaagataaggaacattaatagggtgactaataggaatgatctcttttcgtttccaaggcaaacgattcaatatcacgataatccaactctatgcccctaccactaacgctaaagaagctaaagctgaacatttctatgaagacctacaagaccttgtagaactaacacccaaaaaagatgtccttttcattaaagggggctggaatgcaaaattaggaagtcaacaaacacctggagtaacaggcaaatttggccttggagtacagaatgaagcagggcaaaggctaatagagttttgccaagagaacacactggtcataacaaacactctcttccaacaacacaagagaagactcttcacatggacatcaccagatgatcaacaccaaaattatattaattatattctttgcagccaaaggagaagctctatacagtcagcaaaaacaagaccaggagctgactctggctcaaatcatgaactccttattgccaaattcagactgaaattgaagaaagtagaaaaaaccactagaccattcagatatgacctaaatcaaaccccttatgatcatacagtggaagtgagaaacagatttaagggactagatctgatagagtatctgatgaactatggatggaggtttgtcacactgcacaggagacaggaatcaagaccatccccaagaaaaagaaatgcaaaaaagcaaaaaggctgtctgaggaggccttacaaatagctgtgaaaagaagagaagcgaaaagcaaacgagaaaaggaaagatatacccatttgaatgcagagttccaaagaatagcaaggaaagataagaaagccttcctcagagatcagtgcaaagaaatagaggaaaccaatagaatgggaaagactaaagatctcttcaagaaaatcagagatacgaagggaacatttcatgcaaagatgggctcgataaaggacagaaatggtctggacctaacagaagcagaagatattaagaagaggtggcaagaatacacagaagaaatatacaaaaaagatcttcacaacccagataatcacgatggtgtgatcactcacctagagccagacatcctggaatgcgaagtcaagtgggccttaggaagcatcactatgaacaaagctaggggaggtgatggaattccagttgagctatttcaaatcctgaaagatgatgctgtgaaagtgctgcactcaatatgacagcaaatttggaaaactcagcagtggccacaggactggaaaaggtcagttttcattccaatcccaaagaaaggcaatgccaaagaatgctcaaactactgcacaattgcacgcatctcacatgctagtaaagtaatgctcaaaattctccaagccaggcttcagcattacatgaaccatgaacttccagatgttcaagctggttttagagaaggcagaagaaccagagatcaaattgcctacatccactggaacactgaaaaagcaggggagttccagaaaaacatctatttctgctctattgactatgccaaagcctttgactgtgtagagcacaataaactggaaaattctgaaagcgatgggaataccagaccacctgacctgcctcttgagaaacctgtatgcaggtcagctggaactggacatggaacaacagactggttccaaataggaaaaggagtatgtcaaggctgtatattgtcaccctgcttatttaacttatatgcagagtacatcatgagaaacactgggctggaggaagcacaagctggaatcaagattgctgggagaaatctcaataacctcagatatgcagataacaccactcttatggcagaaagtgaagaggaactaaagagcctcttgatgaaattcaaagaggagagtgaaaacgttggcttaaagctcaacattcagaaaacgaagatcatggcatctggtcccatcacttcatgggaaatagatggggaaacagtggaaacagtgtcagactttattttctggggctccaaaatcactgcagatggtgattgcagccatgaaattaaaagacgcttactccttggaaggaaagttatgaccaacctagtcagcatattaaaaagcagagacattactttgccaacaaaggtccatctagtcaaggctatagtttttcctgtggtcgtgtatggatgtgagagttggactgtgaggaaagctgagcaccgaagaactgatgcttctgaactgtggtgttggagaagactcttgagagtcccttggactgcaaggagatccaagcagtccattctgaaggagatcagccctgggatttctttggaaggaatgatgctaaagctgaaactccagtactttggccacctcatgcaaagagttgactcattggaaaagactttgatgctgggagggattgggggcaggagaaggggacaacagaggatgagatggctggacggcatcaccgactcgatggacatgggtttgggtggactctgggagttggtgatagacagggaggcctggcatgctgcagttcatggggtcgcaaagaatccgacatgactgagcgactgaactgaattgaataaggaagaataagggatgacaagcagaatacaaatggagaagcaaggtgaagaggaaagaatgagctccaaacgtaatcaagttggtaactgatgctaagagttgagtcgtccacttttgtcatctcccctttttgctctgtagctgaaagtgaagtcatttcctaataagtcagaagaaagtagggttgaagacagcagaaaagagtagaaaagggccactgtgagaacgcaagtgacagctgactagctaaaaggaaacaaaagtttaattcggctcttagagctaagaaaatgcacacaagtcaatcctatccattttgtgtttgttcttctcaatactgtaaaaaagaaaaaacagacataacaggcacagaacacagcgttttcatttggcagttcacctatttcgagcaggagatttcccagcatcctcttgaacagatacaagtcttgttgaaagagcagtgtttgaggagtctggatgaattaaactagaaagaaaataggaatatactgagatgatttgagagtcataggcaaatccaatttcaacagagtgctataacatttaaaagcaggttgttttctgcaataatgagcttatgggtcattcttattttcttctttcagttgaggtagaaataggataaattttgtcttcggtataacaacaccaaaagaccaacagaggaagtttgttaaatgagggtgtatgtgtgagaagtgtgtgtgtgtgtgtgtgtgtgtgtgcgcgtgtgtgcgtgctcagtcatgtctgactctttgagaccctacagactacagcccaccaggctcttctgtccatgaaattttccaggcaagaatactggagtgggttgccatttcctacttccgagaatcttcccaatccaggagtcaaacgtgcgtctcttgcatctcctggattacaggtggattcttttatcaccacaccaccttggaagcctagaatctttgcaaccccctgggctgtagcccaccaggctcctctgtccatggaatttcccaggcaagaatactggagtgggttgtcatttcctcttaaaggggattttcccagcccaaggatcaaagccacatttcctgcatctcctgcattgcaagcagatgtattctttgccactgagccacagggaagccctagttattatgtataacaggtggcaataaaacaataaaattggctgaatgagcgacttatagaactcttcacatcacatatacaaaacagaagtgctttggggtagaaatcctgagttcaaatattttattcttagtccccataactaagtggaatagaactgcagatacgtaagtgactgtacctttgccaggcaaaatcatcctctaaaaatatgttgcggctggcttttctactccccacaggtgtacggggttcactcggatcaagtacagacacagaggaagcagagtctgaaagagcattcaagtcttcaccaatggaattactatctgtggaatgagcataacttaaggctatttttctacagtatgtacaggctcggaggtcccctaggaggaaaaaaaaaaaagaagaagaaaacttactaaacgataactaacatatctacctaccagaactattaaacccttggcttaatagttaatctaataacagggaaccatcttcaagtaaagactaccaaacaagaccttttttcaaaagtgaagtaactttgttagttctgttatatattttaaaaccaaagggggtgggagggaggtttaagagggagggaatatatgtctacatataactgattcacttcactgtacagtaggaactaatataacattctaaaacaactgtactccaattaaaaaatgaaagaaaagcaacaagaagagcaaatatgtgcgtaaataagcatttaccatataaaataatgaaaaaatttttaaataaaaaccaaaattatgataaatccatccagctacccaaattactgcaaatatttataacaacttaagaaaatatgattcaatgtactagaaaactctgctaaaagagtatttctcaaggttctagaagtgaagtaaggcaatctatcaaagacaggagtttcaggggaaaaatttttagttgaatacataaaccaacacaaatagaaggaacactttttacctcggtaacaaggaaggaggaaaatgttatttagttctttatgtgaagtcataaagattgacctccacaagggggcacagtttcaaaaactgtttaaaaacaaacaaaactggcttacaaacaataagaaatatgggtggaggaactataaaggaaattctcgtggtaaaagttaggatggaaatgaaatattcttgggaagacaataaggttatttaataattttaagtgttttttttttttcctggaagcagtcctacccaaatataagtttcatttctaccctgttcgtctgtaacaattttttgtgtgatttgataacattttagcatactaaaaaaaggaggtaagataattaaactttactaataacatgttacatagcaattctaccttctttttaccattaacactagacaactgaagtgacatggaacaaaagacttctagaagtcaactatactgggtttttaccataattactacgaagggcaatatatggtcttattttttattttaagacaactattttatagtactccattttattaaattatgcatgtattttaagcaaaattaaatatcacttgttgggttactcatttctaacacaactcagacgaatctaaagaaaaatgtctccaatcatgaaccaccaccaaccccaaacctcttccccccaccaaaaaaagctgaactctagcccaggataaatgagagtggaggacataccaccactagctgaccaaggttgcatttcagaaaagagataaaattacttcctgcagaaaagtatttaagttgccacaacaaaggcttggttcttacactgtaaagaaaatctcccttaatcagtcagctattacaatgaaaatgatcaggtaaattaagggagccaagcttgatcagaaaagttttcatttcatggagaatcctcaccagcaagggcctatagagcagtaaaaaaaaaaaaaaaaaaaaaaaaaattacatgaggtggtgaaaaggctgacaagacacagcccttcagttcattggagacaagacacatacaattcaaaagttgtaaggcggacacaaagacaacactgctactaccattaacaataataacatccactggtctgtttctaggtgcctaagcattctaggtattcagggtcacaatatatgtttgtgttcagaatctatcatcccaaccgcaatggtcaactttatgtgtcaacttgccaagactgatgagtcagtccaacaatagtccagttgctgctgtgaagttttttttaagatgtgattcacatttacaatctgtgactttaagtagattaccctccataatgtggatgcatctcctccaataacttgaaggcctgcagaatgctctaaaggaagggatccaaaggcttagagagtctgctaagagcagatttaccaggtaagatctgctcacttcccccaggaggacccagggcacatacctttcaccatgactatgagaaaaaaagatctgtgaggggagcaccagcatcccctgtagagttttgtagtcacctttctctgtaggaattatcatggaactgttggtgctgaactggaaaacctaaatgcactgggaccactggatgccaggttggcagaggcagagtgggggcatttaatctcaaaagacaaggttagcatgaacggacatcagagtcaaagcggtaaccagaatagtataacacatatagagatctgtgacacctctgaccgtggtgttcctaaagcaaatgggcagtcttctaaatccttactgggtttgtataagaaaaagcattctagatcgagacaacaaaagtctatcttgaatcaaaatgagtcatgacccctcaacaaattctcaggcccagagttctctgaatggacgctgggtcaccttgaggcaggaatccactacactgccaaaaaatatatactgttaatcttcctacgaggtctcctctgaggaccaatagccttttaccagagtgaccgtgcattgagaaaaaggtaagagtcaaacttctcggggattactggactttggctctgaactaacactaataccaagaacccaaaacattactatgatttcaagtcagcaggggctaacagacgtcatgatcaatagaatttcagctcaggtccatcttacagtgggttcaacaggtccgcaaagccagtagtagttatatctcagttctaaaatatgtaactggaatagacattctcagcaaatggcaaaacccctacatttgttccctgacctgtggagtaagggcaattatggtagttctggcctccagacaacaaatttctgtttattctaagccactcggtttgtggtattttgttaagagagccctaggcaactgaggtaccaaccacattaaaaagacaagattttacccaaagagtaatgggagctctgaaagggtattaggcaggggaaacaccctgacatgatcaaactagcatttaacaggacactgacttgagtaagaaaaaacaatctgaggtagggaaaaattaaaggtaaaaaaaactttaaaaggctgtagccataatttggatgaaagataactggggtctgaactctgaagcagtttaggtttaaaaagaaattttcagtgaataaggccacaagaaagatttacatgataataaaaataacatgagagagatactgagaatgttctctttttggtaacttctgcacaccttccactccctaatcactacacacaccattgcttagttttcttctgcttcaataaataattttaaatttctatattactaaagttcaggaaagaatatgagtaaatgtaatttgctagagcacagtgttaaggaatatatatctgtatatagtttgtatatataaaatacaaaatttatattttgtaaaataaaaactctcacagtaacataaaccactctaaccatcactctaaccatcctgcttaataaacattaatggtgctgtggattttccactaccgtctatgatacactgtcttttactcttgttatttatgaacatctccatctactttattacttgactacaaagtcctttaaagcaaagtcgtgtctccctcatgtttgttctccccatgtctcatacataaagtccaaaataaaaaatgacttaacatgagtcccctattgcaactattttattgctatgacctttaaaaactgtagaatcgttaataaagctcatttacctgtataacccataaattttccagggatttcttgattgcagcaacgactgcagaaaatctgcccacacagtcggcagtggtgtctacgcctaaaagtggtaaatttctcattacagtcatagcactctttacactggctatctggcatccagtattgcttcaggtcactatcctgcaacaataaaaatgtgtgaaggtgtcttgaaaatactgatttatcaaaatgcaaaggcaaatacaatgctagtcaaaatcctagaaaatttcttttgcagctatttcttctttaacaagctatttgtaaaatttcttctttaacaagctatttgtaaaattcacatgagaatgcaaaagttcaagagaaccaaccaaggcaatcttaaagaagaataagctgaaagacttataatgcctgtcaagatttattctaaacctacagtaattttagatatagtgtaaggaaaaatggagctgtggaagaaagaaaagagccctggcacaccctcatacatatatgtatacttatgacaaggtctgtaatgcaatcagtgaaggatggtctttaaaaaaagaaaatggtactgggtccaactggacatcaacagggaaaaaaatgaatcttaatccatataccttcatatcaataataaagcttctcgaagaaaccatggaagatagtctcccatggttcattttttactgtccctgggttagaaaaacactttttaaatagagcacagaaagtacaacccataaaaagaaaaagttttgataaattaaaataaggaacttatgagtaaaaatctgctgtccacagttggagtaagcattaactgaactttctttcaagtggcattgtaccattttcagtgagcactgcaggatccccatataagtgcttagtaagtaatcttctaaagaatctagacaatacctggctcttcccctccatgatttccttgaggcgttttaatactgtgctgaggcttcggagttggacagctgtgcgagggtcatgacctccaaaagtaggttctgccttccttctggtgtctgagttaggattacaaaacaaaaaactactttaatagtatcaatgcaaagtgcttcttacttttagcatacacttacattcgccagccagtgacatagactgagagttaaaattagtctttataagggtaagaggctgttgaaagtgtaaacactgcttcacaagcaaatgaggaccgagacagcaccgtttgagaccactgatgattttgaggcctggatgggagcatcacttaacatggcacaaaactcagtgatttcttgggcccttcagtcccaagtcagaataaatttccgctaggaatttagcagaaggaaaagcaatgccagtgagttatcctagcctagtctccacagtcgtcaggtcagcaacagggctgaacagttcggctactcctacagatcacaaaaccaaaggcttgtgttacagatcattaggaaagaatttaatagccaatctcagagtctgacagacttcagaacacccaggatggtaatttatgcacagacttcccttcaccaatgttcaagaagagttctttttaccaaagaactgctagagctccagccctacccttccctgccacctcccctcccctatagctccaagcaagaaggaatcacttgctcttgaaacagcaatactgaagccagtcctgtcaataaaaaaacaggcctacattccagttttgtggccagaatgggctatgcccaccaaagctgtcatgttatttccttgttttagagcaagattacaactaaggtttctacctatccctggctccagcagtttttaaacctaaggatgaagcagagttgacctgacaagatggatgaacactgctattagcttaatctcattaacctcataacctatggcaaggccctctctaaatccttcccaaactcactatttgctacatttgctttagatgttctttgttttggatgagtggcaaagaaaagactacaaacaaatgagaagttaatatttaaatctaaactgatgaagaacttccatcgatattaattatagtgaagtgaagttgctcagtcgtgtccaactctttgcgaccccatggacacgaggctcctccatccatgggattttctaggcaagagtgctggagtgggttgccgtttccttctccatatattaattatggaaatatattatttatggaaatatattatttaaatggcacttacgttacaaaactgaaaactttatctttctataaataataccttaatctcagcaaatacgttattactacaataaaaatgtacatgtattagaatgacaaaactgttcttgagtctttgtgataaaccaactctccatgacttataactgcaaaaggagagacagatgaagctgtcagaacagtaaagctgtggtcccatgcacgggaaataattaactgcaaagccccttgcatatagccacttaggagtataagagaatacaaagagcatcatccaaggaaaaaccaggagcaaggctattcccagaaacaacagatgatggcttcaacgtggatgaggatgaaagaaaaaggagagaaaatctggttcagcactctgccctcaatcatctcagctacttctcttgtaaaatgaatattcttaatagaaaatcaaatgacttcccagggtcacagagctggtaaattgtggaatcacagtattttaataggaaaaggaactagactggtcaaacagtcccaggctcatcaaactcaaatgcctcaagcagctaaggaagaatcaaagaatcaagtggaatgagaaaagactgtaaggaatgcagcaaactggacattacaagttctacctagcagtatttaaatgcaagcttatcaaaataacaagacaaagtttggtaagctgtcagtttgtaacccctaaaagactagattctagtctaactcctcaatttcataaacgaagaaatcctatgcttaattcaatataggatataattaagagtacccttaacaaaaacaggagtgacactctggaccaggttcaagagctaaggagtttccttccatccatctggagtaaggaacttacttctccctctcccccttccttccttctgattcttcctaccaaacagctgacataacccaggctagggccctctgccctgggaaacctgcagaggtgatgcaggcagctctgctccagtcctctgggaaaagctctccttctgctcagcttcaccgcctcctctgacctactggtagcaggttctgagacaagtcccaactagccattaataaaatatgcttctgccgaccaccattacctgtgcctgcctacttgtcattcgaagaccctgggggggagactggccagacaacacaagagctgacgttcgcagacacctgattttcaatgctgtacccctttccctctcttatgccacctctcattgcccttcccctaccaccttgagtcaggcaaaccactgcactgagttgaataatctaacagaaataaaacatacaacaactcactttagctagtgtcttgatgcaggcactgatcccaggctgtactcaacagaagagcatgaaaatgaaggagatgacggtatagcagaacaggatgagaacaaacacgggagaggagctcagtttatctagccacactgacagtttgcaccccaacaaggacagaaagccaagagcaagtggcagcccactgatggaaatgagaggcttctgcaaccagcggcatgcacgtcacattacactggccaccccaaaaacagatgtggcagtcacaaggttcagactaacctgagttctcctgggggtgttgcaaactgtcctctgctggaacccaagcaagtaaataatcaaaaaaaaaaaaaaaaaaaccagtcaagagatccctgccttgcccaaattaaagttcagtgaaatcagatctctgccttgcccaaattaaagttcagtgaaatgtttaagaactcttgtttgctaggtcacttcagtcatgtccaactctttgcaaccctatggactgtagcccaccaggattctctggagatccctctgttgctgggattctccaggcaagaatactgcagtgagttgccttgtcctcctccaagggatcttcccaacccagggatctaccccatatttcttatgtctcctacactggtaggcaggttctttaccactagcaccacttggaaagcccaaattaaagtttaatgaaatgttttaagaacttctgtttaggtatcaacaaattatttcactatccaggtaagtttcattaattctcaagagtacctgactattccaaatagcaaaaaagttaagtcaataaacaacctgggaaacacaatgactgggaaaagtctaatactcagagaggaatgaaatgcgaacagtatcatacctaacactgaagatcgacgctggaactcctcattaagccgctttttataaggtgtaggtgatctcacagattgtgtccttgaagggagctgagggctggtccaacttccactcagagacggttgctctccctggcccccttctcctctctctgtagcaaaggaaaacttggaattattgcaaaaactaagacgcaagagctcagcaaagaaaaggaaatagatgagatttttcaggaaagaatgtatacttgtatcacatactaagtaaaagggttagaaaaaaaattcaaaacaggtggcaaaattacaggccaataattacatccttggtatatgtgaccttcggtgtgttttacttttcactagaaatttcttgagcatgttaatggaaatagactgcaagctccacatgaaggctgggatcttttgttattctatttcatttatgggatagattccctggtggctcagacagtaaagcgtctgcctgcaatgcaagagaccggggttcgatccctgagtcaggaagatcccctggagaaggaaatggcaacccactccagtatccttgcctggaaaatcccatggatggaggagcctggtgggctacagtccatggggtcgcacagagtcagacaagactgagtgacttcacttcactctccttgactattaacagtgcccagtggacagcaggtgctcaataaacatttgcttaataaaaagactactgtaaatgtaatgtatcctagacaggatcctggaacacaaaaaggacattaggtagaaactggagaagtatgaataaaatacatattttagttagtaatattttgtcaataatggctcactgattataataaacgtactctaccaatgtaagatgttagtaacagggaaaacaaggtgtagggatatatgagaacgtcctgtattgttttcctaatttttacagaaattcagaattattgaaaataagactgttgaggtttctttaaaaaaaaaagaaacagattactgttttcaaaatgatgggactaatgggagattttacagagctttaaacatgcctgctaataaaagtcagttaacactattaaaatttccactgagttaaactattatcccataaatccctttcaacgagagggattactttccaacacatttcaaacaatattgtcaaatataaagcaaaagatgtagaccatgttttttaactcttctaatgagtaaaaaacatattacttaaaaaaagctcattttaaaaacatattttcatttgatatcattaaatgtattaaacaaattaataagaagcctgctgacagcttttaatttttgaaaaatatgaacccttcctcccatgtgctcattctttagtttcactgctttcatcaaaatcttttggctattaacctctaaaagagcaaagtccatcctatggacttaagaatacagatatattaacaaaggaaaaaaaaaatgatgatgctaactttaacctcattttaacatttagttttcaattccaactttccattccaataattactaagattaaagagaaaattctagctttttttcttatgcaattaaacccaaggacctatgatgaaggctatttcctagttaatattcactttcttgtaaagacacagcataacaagagaatttcagagaatcaagatggcaggatgtctgatctttaacaggtcttacctttgttaaatcgaaagagattgacaaaagaactatacgctgatttaaaaggaggctcgtcctgatcaggagtcagaggcttaaagtgtgtgagatgagagggactggtaggagaccgaggcaagtcattagcagagtccagtgttggggaagtcttatcatctgtggccatttcatgagtctaataaacaaaaggagtaagcagaagtaagttcctcaggaagcccaaacagcacccaaacgtatagaaatcagacttcaaaacctcacacctaagaaaaccagagtacttaagtctacttcagcatacgttccaaatcaatactggaaaacactgcagtctagatgataaggaagagtttcaattatttaaaactaggaacgtttacagtcaatctcattttcaaaattaatatatatttttaggtatttgtatttatgtatatgtatttgtagtttcaaataaaaaaaaaaaacaccccaaagtattaaaaatttgaaagcaaggaaaaaatgtgaacaggcaaaaaggaaaaaaagatttttcactttatttatatgtttttcattctaagattttttttcttgaaaaagaaacagctctttaaagttggggtgggtggtaaacttgttttacaaaagcatacaaattcttcaaagttttattttact

SEQ ID NO: 87 - DNA, 9066 bp, Hippotragus equinus
  source 1..9066: mol_type = genomic DNA
gctcgtgggcccaccccctcgctcctccaatttctttggcttcttgtgctgatggggacatctcagcctccaagccagctgtgaacctccttgtccctggactgtcctccccaggctctgtaaattgctgccacaccctcctgctagctcaggggggtgttccttcaccctcacagtatttattatcctgcaccacctccactactccccatgcatatgtacacgcacacacacacacacacacacatcacaaataatacattgaaagtgcctcatctgaataaaatgaacttttttccccactgggatagctataagtggtatacctccttcctttatctctccactccttaagttacatagattcttccagaaacaaggaaataacagcatcaagttctgagtctttatttcaggcaatggtagtctctgagggaagaccagagaaaagacaggccttgctctccacgtgggtaaatcatgacatcacataaaagcactcagacctgctgcccactgaggaggggtttgctctcaccaatggggcaagagcggaagacccagggcagacgtagccactgggttctaccgtgtggcagctggggaagggggactgctgagccttgcttcataagtcttcgcctgatattgggagaaaagcagggatactggttagtggtggtcaatggcaacctctttgtgcttctccaaaaaaaaagactaaaccttaacccaggttgacttggccttgatcctggctccctcctcttctcatcaacagggtttatcctctcttatgtttatggtaagctctgaccatttccctctcaccctacaaacttccctgctttgaggacctcagccctccaggcctagggatttgcctttctggcaggtggagaactcagttcaccagcctcctccactattgatattattcataacaacagtcattgagatcatcatttattccacttttgtttcagaaccaggtgttttactcacattgtctagagccctgaaaacagccccacaggacaggtattacgtttcctacttttcagaggctcagaagggttaatcgacttccccagggtcccaccagcaagactgcagcctagacctgttgaacttctaagtctgggctctttcctggactctacagtttcccaaaggggttagtggtttcttcccatgaggaagagtggtggtggtaataaggggtaagggagtgggagcaggatggcggggatctcacctgtatatcagagatgcaagcaacaaagctgtcagcaccagcaagatgcccacgaacagaggagcctgcctgaggcctgcttcttgccctatgggtggaatcccagatacggctacattcagtgtctgcttcctctagtaggtaacctctaccatctccccgtgtcttcatcctaccaactacctaccaggcatgacaagctgggtgctgaccatcgccaggctattggcatcagccaaagacacattgaggcagtaggtccctgagccacccttcagtacctggtgcaaaaccagctggcaggctgggctggggggcacaggctgacacagccgctgggcaggcggctgacaccctggcgatgaaatgtccatgcaggcttccttgggtagcctggggggagatgtcagcttacgtcagggaatctgggaaaggacactagacaccagagaacaggcaggggtcaccccaggagttctcagagcaaccgtgggacactcacccgccttggcaagacacagtcagctcaaatgcatctccttcgctggatgacacagcctgtaggatctcagcactctcaataccctctgcaaagttgcaagattttaagtctgagactcctctacttatcctcccccaaggcccatggccaggaaagtcctcgggctgcctccccaatcccattctcctgccttcatatgaaacccctgggatttgggtattctccttgtccaggtgagtaattccttccaaggtgcgcttccactgggcaaccctaagcagcacatgcctccctccaccagctcacagacatgtaggcaagactcacggacaatgtccagggtgagagaaaaggagccatagcgatacagaacacagtccaggggggcttggcgcttcaccaggactaaggtgtcatctggcagggggctcagggagcctggcaggagaggattaaagaggcaaagtcaagaagcaaatgactaacctgaaaacaaaggcccaacaggcatttttccaggtagagtcagagctactggatctaggcttagaatcagacaagagctaagaactctcatttttttggataaagaaacagacccaagagaaatgactgccccagagtcacagttagggttagagtcggaattttagaaatcccaaatgtttatcacaccgtatactgttccaggtcctgggtcagacatctgacgtgttaagtcattatagtgtcactatctcactcctccctttttagtgttccaaccacaattccaggtaaacctactttgagatgggaatccaggggtgggaagtggtgtcagaaagatttctgtgcgtttacacttaatcagaaaatgaggtataagtattatctaatgatcacatggggctttctaggtggctcaggggtaaccaatgcgggtttaatccctgggcagggaaaatccccgggagaagggaatggccacccactccagtattcttgcctggagaattccatggacagaggagcctggtgggccacagtccatgaggtcgcaaagagtcagacacgactgagcactgccaccaaatgaccacagactgctccctgaacttctcttcagggagggagaagcaataagccctctctccatggcctaggagaaggccttgggttcctgaactctggatctattctgtgccattaagagggacttagggggttttaaaaccagtgaagattctgagcaaactccattgctaagctaaggattgggtaccatctgggtcctgagcaattctttcaggtcttcagagcagtgacaaatgccccacctctatgaactcattcgtggtggccctcttacctgcagtaccttctgtaggcatgaatgggctggtatttgaacccgcaggctcaggagtggacacctctccagctgtggtctccaccagctctggagttgttccccgtgtaaccgtggctccagagggctctgtagttgacacttcaggtgtcctacctgtagcctttgcagttggcttctccgctggtgtggtacttaagactttggaggttgccacctgctcaggtgtggtacctataccctctgtggttggcacccacccaactgtggtgccaggggcctctgcagttggcacctggccaggtgtggtgcctatgacttctgtagtaggcacttggccagctgtgcttccaggggcctctgcagttgtcacatggctatctgtggtgcctggaactggagaggagccacaggaggtgagaggaatggcagcctgcagcaccacctgtgcagtgactgggccagactctaggtaagtgtgagtggccatgagtgcccgagagatcagggtccctgtactgtcaccaaagtcccaggtgtaggaaaggtcagccccagccaaatagccactgggatcatggagctggagggcaaaggtcagaggctgctttctcaggaagcgcttgttccttccatccaaggcctgcagctgagacacactcacggagaagggcacctggtctgggattggagtcagagaaagtcagaaccataagttcttctttctttcagcttcttctttcacagctatatttttcaaccaacccaagctgcctggcccttcacgggctccaagccccacatccctctgcccacatcttcctggttctgcccctgcaaggttacacaccaattcctcgttcccctatcctgtccagcccagcctccccaccttctcctgccctgcagctggccttgtcctctcctcagtccttaccagtaatggtgaaggttgaactggagtgagcgaggggcacgtagctctgggacccccggcggtggtagacagtcacttccatcttatgtgtgcccagcacggccttgtctgtcccaatgctcaatccagacactgggccccccagaacttgccagtactggtctgaggtttttggaaagaagagtaggaaagggggttactggtcaaaggagactggggcagggttagagacggaaccagagaaggaaggtcaggagatgtatcaagaatagttatttcagagagtgtaagcttgaatatgttgggcaggaaaggagtccttatgagagggtccatgggatgggactataattggagcagggctcccagaaagaagtataatagaattgactaggtgctgtggaagaggaaggagtcatgggggaagtgaagattagggaaactcacaaaatttagggatgagaccaaaagaaaggtaggaaggagtgaatttaagtgtgaatgacaggccagagaagggagactcttaccccaggtcttccagacataaacaaagcatcttttctgagataaagggccagaagggcaggcccccccatcggggaagatgcaggtatcatcaggttcttggggatataccagctgtcctccccacacctggctccctgaaaagaagacaccaagtctccctcaatccctggcattccttactgtacaccaaaacctttaacatgactcccagagaggggctccaggaatactgcctagctaccaatatacattctccttggtataacctacttggagtggtagaaaggagaatggaaactataaaagattcctgtgtgtatacttaaggggtttcccaggtggctcagtggtaaagaatacacctgccgatgcaggaaacacaggagatgaggattcaatccctgtgttgaaagatcctctggaggaagaagcggcaacctgctccagtattcttgcctgggcaatcccatgggcagaggagctttcacggctacagtccataggggtcggaaagagtcagacacgactgaaccactgagcacacacatgtatattcttacactggagacaaattggtaggccatgtatcaaaatgtctaggatgatgtgctctagctagtgggataaaagtaaaaataacaacatcaactaatactgtaggctaggacctgggtttgatccctaagttgggaagatcccctggaggaatgcatggcaacccactccagtattcttgcctgaagaatccacatggacagaggagtctggtgggctacagtccatggggttgcaaagcgtctaaactaagcctaagcacagcatagggcaggctttatgctaaaatctgtatatattatcacactttaattcttacaacaaccttttaaagtgttatcatccccattctatagataagggaatggaagcacaaaacaattcagtgacttgtccagggtcacatactcgtaaccagtttaaatccaagtttatccaacttctatgtccactgggtcttctgtgccccatttggggaactataattgtttttctttttgctttatctgtgttttctaatttttctgcagtgaatatgtgttacatatataatttgtaaaaaaaaaaaaaacaggaagaagaggacaaggaggaggattccttgagttcattggagataccggggataccagggattctgaaccttgggaaggaggtggagaggtactcaccattgatgatggtggtgttggcccagacgacctgcccatctggcagcaccttttggtttttaggaaagtgtaaggcaatagagaaggaggcatttgccccaatcagtgtaggcccatcattgctgaccttcagggatacgtggccacctgaaaagggcagctgcattagctccttggcttctcctccccgtatgccttttccttccctatcttcccaagtacattcaaccctgttcccttcctcaccccatttccaccatatcctccctggaaattgccaacttcctacctctccagcagtcaggcccctggctttctgtccactctggatacagctgtctgttccatgctttaattctgagctgccttgagacaccaagccagtccctgtctctgggtcctaaaaaggaagatatactatgagggccctcaaatcattactcactcctttctcaggggacaacactgtctgtgacacatcattcattctcacattcaaagtgcattaaaaaaatatatttatttaactgcactaggacttagttgcagcatgagggatctgcgattaactgtggcatatggggtcaggtagttgtggcatgcaaactcttagttgtgacctgtgggatctagttccctgacctgagattgaaccctggtcccctgcattgggagcacagagccttagccacttgatggacaacaaaggaagtcccttaaagtgcattttaatctactgaatacccaccacgtaccaggcactgggctaggtgcaaagaacttaagaaatgaaaaagaggggggaaaaaaaagaaagaaatgaaaaagaaatggttcttaaggggttcaggttaaagtatatgaaacagacatatacataaattgctataatccaaggcattgcttaatatgagccataatagacatgcacaatgtataacaaaattatagattttaaacaggtaaattgcactctagtcgactggggaacactcagtaaatagttggcctggggcataaagcattctaggcagaaggcccagcatgagcagatgcatggaagtatggaagcacatggcatgataggagaccactagcaatgtggctgatgtacatcgtgagagatgaagccaaggagatggagtgggggctttgagtgccaggcaaatagtgtggactttatcctgtaggcaagggcacctcagatgattttgtttgttgtattgatatatggcacataccataatatttacccttcaaaagctttttgaatatgatcagatttgtgttttagaaggatcaccttggcaagcagtgaggaggatggactagaagcaagtagaaattgggagtggggacaaacaaaatgattataactgaccaagaaagaggtctgaaaaaaagtgacatgatggctctgcatgtgcctccccaaggtccaacagctatcagcattttgtcacatttgctttatctatcctttatttttgttgtttgtttgttttttggctgaagcattcaaaagcaaatcccagacatcatgttattttaaaaccctacaaattcagtaggtttctgtaaaaaaaaaaaaaaaaaaagaatattttcttaaataaacacaatgttaattcacactagacaaaattatcaaactcagtccatgcaaaatttcatgaaatatataaaaatattttcttatgatttaaaaaatctggatccaaaaagtaagcacaatagtttaagagccttgggtggacacacatgaacagaatacttccagaatacaataatgaacatagtaaaagaaaaagacttgaaaccacaccgtgaatgagggaagtcagatcaaggagaagttccaagaagtctgtgagaccagggatctagagaaagggggcaccagggtacaatgtagatattgctgcacatcacagactgtcctcactccatctctaacatgtagccagaaacctggttgattctcctgggggacgatctagaatcatcccgctgaatatcttaccacaagaacaagagaatcataagatgccccattctttctccactcccaatcctccctcctcagagcagcacgggacattccagaccctctcaccacccccacccccaccccttgctcctgtcacgaggccccaatccccagagccctttcatgtgatgctcagctgagacccctctgcctgtctcttccagccccagaacaaaagcctgggctgtgttcacccatgcccatcccaaaaaggggatgaggtgcctctttacccttctatccaaataccacattctctttctcctcactttaaataccctatcccaagtgcttaagacgaagcctaaatgagtttccactcattttactaccttggcacccatgttccagctcactattcagagcatctcaaaattagggccacagagacatactgttctctcacccgtccaggtagatggggttgttttcaggttcagtcccaagtgcctgaatacatatgcacccaaatcttcatgtggggagggagctcagttgcccatgtcctcactaaatcaaatgggtgagaaacacctgaagcattgctgctatcttccattttagggagagaaaaaccagagcaggtgtgtaaccctaaattcacacttgttcatgtccacacatcccacactcaccttctgtggcccctacagccagaagaacacccatcagagccacatggagaaggtattttctcagcaccagatccatcctgttcttccttccagcaaccaaagactggggcattggacaagcccctgtataagaagggggtgctcatttgcatagcccttcctcccctccctccaggcaaatcctgggaggagcagaaggacctgagagacagaactgaggagggatcctggtccctggacatcatgctactcattgacggtttctggcttcaaagggtcagtctcatcttaaagcactccatctcccctcgcggggaaaaaaatgactgaagggcagctacaaaacgtaacacgtacctgacacacaaggttcatcttcggagagtggatcaatctattgtgagtcaaaccaggaacctctcaaaataattgtagaagcagtgaccctggatccaaaaacagacagtattggggtaggctgagagaagcgggacaacgactcttcggagccccaggaaacccttacaatgagatttccagtttcctgctttcagaggaggctccagggcgaggtgg

SEQ ID NO: 88 - DNA, 76642 bp, Hippotragus equinus
  source 1..76642: mol_type = genomic DNA
tggtaacccactctagggttcctgcctggagaatcccagggacggcagagcctggtgggctgccgtctgtggggtcgcacaaagtcggacacgactgaagcgacctagcagcagcagcagcagcagcagcagcagtagcagtgagaacctgcgcgcctgaagcttcccacctctgcctcacagccacaggtccaagcggcccacagaaagccgtcggcactgagagagggaagccgctagggggcagcagaggctcgcagatatctcgctacaggcgctagtctttcaagtatttttttttttttaattttaacgaattgctctaatacttggaaatttaaataagagagattttgtaatctgaactcgactgttcaagagcagagaccctgttcactaccccacttaactaccctttctgacggcccaccccccacctcgccccagtcatccagtcattctcaagtatcccagagctttccctcactccaggaacaccaatgccaggctccccgagtgaggagcggccggggccggatggacagtggccgagtcaggacgctcagcacggatctggcccccggggaagccagaccaagtgggcagtcactgcaagctgggagcccgcccctcagatcctcgcttagggcctcaggacagacactgacctgacgccctgaaaacacctgcagaaaatggctttgggggaggagacttggcgagcggcaccaaactataccttatagtggcctgatcccagagcagtttttagatgtcatccctgtgtctcaaaacgaaaacaacccattcaggaaaggacagtggagaccgggtttgggccaaaagaggcgagtggggagctttgtgtcggccccctgggcaggtacgtaggggctgggggcggcgcgctcgccctgtctggcgggggtgcgccccgaagagacaggaggaagcgggaggtggagggcggggaggaggtcccgcccccacctcgcgctcctttacgggaagtgatgtggggccggacggaaaatacccgccaaggacccgaaaaggccggcagcgggtggacgcggcgcgcgcagagacagagcggcgtgggggccgcgggcggagcaggtgaggcggaggcgcgggctgggaggcgcgctcgggctcggggcgccggcccccgcgcggggcagcgcgacgcggcgggcgcacccagggtctggccctgcggccgggtgttggggttgcagctcctctccgctctctgggaggcagagcccactcgcaggccctcagcgccaactctacgatgacaatcgcgggggtcggggtcagcttgggcgaggggccgattcggtggagtcccaggttgggatggggctgaggtcacctcccggcgcatccaggtgctaggggccgcatggaggtggcggggagggaggaaggaaacttctcaggcaggagaggaggctcctgcacggcccctctaattctttccttccttcggttttgtcagttgaatgatttataaagtcttgacacctttgttgggcggggtctggcggcaaactgggtgggacagaaaaccctaccaggcagtcaggcccttctgtcttgactggcggtaaagccgacgtgatgacaggtttgggtaactcttgccaaagcttttctctctgtcccaatagatcatggattaagcaaagtcaggcctgaagtgaaggaaatcttgtgaacccatgactttgccttcccatcattttggctcctgcgggccacctgcatggcctcagcatcatgtgttagatcctgtctcacaggtcttctgtgggctaacagctattttcccctacttgagggattcttgactgtgggattggcttatcagtcagaggttgggggtatcctcttatgctgtataaagtttctataattatcggtggcttagtttgttggtgctccactgttcctgttttattgatttatttatgccttcttagaaacttgttttagggggaaaacacagtctggaagacagaatttttgcagatggttacaagtaaagaaaggttaatgtagtgcccgaaaaacttgcctgaggatctgtattttatgttagttttcattcctactttctttcctttattctttcttccttactcccttccttccttaatttccatgacctgccttgattttagtaattttgatgaagtataactaattttttcttttcttgctgcgcttttggtgtcaaatctaagaaagcattgctcaatccaaagtcctgaagatttatgcctatgttttcttctaagagttgttagttttagctcttacatttccatctttggcttgcttttaagttaattttgtacatggtgtgagctaggagtgttaacagatttttgcatgtgggcatcaggttgtcccagcaccatttgttgaaaagattattttttccccctttgaataccattggtgcctgtgttgagaataagttgacagtaaacgtgagggtttatttctagactctcagtcctactccattgagctgcatgtctatccttatgctagcatcatactctcctctattaactatgtaagtacaccgttttgagatggggaagtgtgagtcctcctactttgtttttcttttttgagaccgttctggctattctgggtcccttgaatttccatatgtaatttaggatcagcatctcaattgctgttgcctgattttacaacagatgcaaggatgttgaagtgggcaacagtctctaggaaccagactcttcattttcctcttccaaacctgcttttccctctgtctcccctatctcctcagttaatggcaacttccttattacaggtgctcagactaaccaccctgggtcacccctgactcttctccttgtctcataccccacatctggtctctcagcagagttcattagttctgctttgaaactgcatctaggataggaaccattttgtaacattttcactgctgctccaccaggttcccttcctttgtcaacctggattcctcaaaagtctcctgcaggcccagcctgcttccaccgtcaccgctctatggtctgttcttgacaaagttgccgaagccatttatgtcactcagtcctgtgctcaaaactcactggtggcttgttataccagagggacacctctgtcgcctgcagtcccttacggggtgtgtggcttcatcttccatctctcccctcttttctcactcgccttcagccacacctcaggacctttgctgtttcctctgtctggaatgttcttccttcaaaagtctgcactgcttacttactcatttcattcaaatcaagtcatttctttagagatgctttcttgtcccatcccatttaaatgagtgtcccccacccccaccccaacattttcttcctctttaccttatttttctttagagtatctgtagcgttctttgtcattgcacacccacacatctgtctcctactggtagagtacaagctccatgaaggtcaggaatttgtcttatttgctgcggtggaggtagcacctggaatggtttctggcacatattaaaccctaaaaaaaaaaaaaaaaacaaaacccacatgttgagtgaatgaaaaggaaatgagaagctgagaaatggggatcactctgctatgtttttctcactcttccttcccatttgcagtgtccatagctacaccagctcctccttctctccttttctatctacttttttccctggagagaatggccttactcttcttggaaagggaaaggtcaaacaaaggaagagaaaggtcaaagcagaaaggtgaggactttgggtccttcccgaccgagggcaggacctgggcagactgggaggaggccttcagcacctgtctctagtgatttggtttcttgtgctgatctagggacagtgaaattccttggaaatttgagaaaatggagtttcatttcctgatgaatatcttgcagagcagtggatttaatttttctgtggcttctgactgagatttccaattaggaggctcattttgacttttgattgcatgatgacttcagactgtcaactgatgatgcgtatgtggccttattcccatggtgagattgcggtatcctgcaggcagagcgcggcttcaccccctttgtgatcctggtactgcacgctatcacagacagaagaagtgttcaataaactcttgctgaatgtgcccataagttaatgaataaacttggatttgttttcatcattagaaacctctagtctatatgtttaatttttctcagtctgtagatgttaagtatcttgttttagtccacctcatcctgctgctgctgataaagcagtattggctagagttgagagaggtttcctgccgacctttctcattgagaattgaattaactggcctggagagtatagtaatcactgtggtattttaaaaattgaactagcttcccattgttaaacttatcttggaatatgccccatatctatatattcactacaaactatgagaaaggattatttttacacccatggcatgtatatgtgtgtggatgtaaataatgcgagccctagttaacttgatgggtgggggaatccctttcaaaatgtatacatatgtcaaatcaccgtgatgtatactttaaatatcttacaatgttatatctcaattatacctcagtaaagctggctgacgggcttccttgatggctcagtggtaaagaatccgcctgccaatgcaggagatgcgggttcgatccctggtccaggaggatcctgcatgctgccaagaaactaaacccgtgtgacataattattgagcctgtgctttggagccaaaaataaataagaaaataaaattatatattttaaaaagtggcccacaataaaaaaaaaaacgaattgtgagcctctatgcagcaagattgtcttgttattgttagaacaagactgccttctgaagagagggatttttccctttcactgccttcgctttacattatgctgtgtgcaggtttcgcttgatcatatttattcctctgcctcatagtcaggaagttccagtttatggtctggtttcccttaagctgattatctggggagcagacatgagcactgagttggaggaagagataaaaggtttgcaattaactttgtgtccagaaggtgagaggtgtggagctgtgagcatccgtcttgtccatccgtcttgttttggcctcctgtctggcaggcagtataccacattcttttccctgtgtgattgaggtctactaacattgatattctactcactgcttaataaaatttgatgcctcacctactcaaaacaaatgttgcaagtcattcttccttgcctgcttttgttttgttttattttttgcctctgtgtatgtgacccatgagaaggcctcatatttagttcttcagccacacttggaaccacccacctgtatgaaatcagacttttgaaagctgagattacactttgaatgtggagtcagaggtagtgtgccagattaaaaaaaaatgtggatgaacaacaaataatatttcactataagtatgtcccatgcaatatttgggacatacttatactaaaaaattagttgttttttttcctatgagtggcagagttaactggtgtcttggatttaatgtggtaactctggtctgataaatttatgttttggggcaggaaatgcattgatcatgataatgtccacagaacaactaagctatggctcattttgctaattgcacatgtgtccatcttaggaaggagagggcgtgtaaactcaaggattattagaattggaggacagtgggagaagattccattttcctctagtgttttgtggtgaaggaaatttttctccagagatgttgtcattttccaagatcacacagttagtggtagggccagaactggaactctgggtccagtggttagtctggtgcacagaatttctccttgagaggtcacatgtagttgcttatgttttcatgctgatctttagtcactgctgttgcctccctcccatatcgctgcactgtcctgctgcccttctggcccttggatctgctgtgtggcaggcaaagccaccctcaaggacacacttgacttctctctgagaaccgcagggctgttgaaagccaccattggttgtatgcctgtggtgatgccagaaatcccatctttccatgtgtttttattccttctaaggtctggttattattctcatcccctgtgagtgtttactctaagatgctttgattcaggaggacttggctgagaataattccacaaccaccaggtattgtctcactgaagggtgcctgctttgagtggcctagtcctttgacactctgtatcttcttataatttggtagaacagatatggaagataacatggtaaggatcgatacaatagataggtgtatgtaacttcctctttagagacgtgttcttttaaaacacagtttgcttactgttttacagttatctctacttatttaagaaagtggccttagaaaaaagcatccttcctctgactgctgtgagaataccatatttcagagccactaatcctgttttttcatagcctgttgattaattcatataaagccttaccagctgccaggtcaaagcataataataaaattggttgccaagagacagaaaaatctgttcattcttattaactgcttctcatctgtcttgctctgatcccaccacgtgggcagctggttgagtcttatctgcatatggctggttacttatcgcctgtgtatttgtattacttgacacaaaaacagtgcctcaatcagctaacggaaggtttggtaaggttttattattattattattattgctgtattagttcgaatacgggaaggaatgagacacacagaaataggtcttgacttaaatgtccatttgagatacctgagaattttaaaatataatccaagggtgtggtcaggatttcctttgtttcctgcagtgtgattgattttcataatgaatctcactgttgcaagggagcaaccccagggatgagtaaagaggtctagcagcccttgaaaagataaggtgtcgtccttcccatcggatgctagagaccaaacatggccagatcagctgctggccattccaagctggacttccttcgtcaggggcaaggtcagctcttcatcacccagctccgcttaggccgcagagcgggttgtggtatttccttggggggtgactcagccctgtgttccagaattcctgcttcagtgtggaggaaccaactccgccaggaactagtggattggtttttagtttctaactttgccaataattaactaagtggtattacactagtggttcttaattaggcagttttcaactccttcttcctcaagggggcattgagcaacatctggagatgtggctggttgccatatctggggagttgctggtatttagtgggcagagacctgggatgcctctaaacaccccaaagtgcacaggacagcccctcaatacaaagaatcatgctgcccaccatgtcagtgggtcaaggcagagaaaccctgcatttgatatgttgtgggacctctctggcctgcagtttcctaagtccacgttctctccatcatgtaaagtgaactaagcctaactccacttctgtggtctttctaacctctcccttacccccaattctgaatgagtcatcagatatggggtagggcccaggcatctctatttgtctgtattttatatctatatgcatatatttgacagacatctgtgtgtatgtattttacatctccactggggattctgacgggcagttaggatggagggccctgcccttagggatcccaggctgaggtcctcaccaaggtgcccggtgggccatgtgaggggagtagacagtgtggggacagtctgccagtcggaagcaagagccaggcggcagggcctggctgctgtatgactgagcacaggtggaaggctggcagcaagtcctcagggagggctgtgactgagggcttggcccctgaattcctcagagacggggccccagcccctcagcacagcgggctctcaggtgcccgggagtctctactctgcagagccccagctgatcattatgcccttgtactagaggtgcccccgatcccagagtttcccaaggaaatagcaagactggacaatttcttcatggaaaccccatttcctgcttatctagagcctttctgggagattcaaagtcaatggcagaaaccccaaccctgagtcagcagcccctcttgccacccagataaggaaacctcacttgttacacttaacagcatcatgtaacttaagggctggtgggcaccttagaaaccagggagctcagcctctcctccatctgacaggttcagaactgtgcccctggtcacatgacaaactgatggcagagagggttctagaagacaagtctgctggttctttctatgcccctgtgctaatgtttcttaattgtaaccagcagtgtctctcccctggactcctgtgaaatatcacagaaagtgaaacaaatatattaatgattttcatctatgttaaagcagtccagaaatgtctgagcatctgctatggctatgtactagctgccagttaaaggccaccattgtttcctgcctggactgctgtttttctggtctcattctagctacccccaccttcccgtaacccattcctcatgcaaagccggtgatatttttaaaagtgtaaatcacatcatatccttcttctgtttgaaattccccagtcacttaccactgtggttggtgtaagatccacacgttctaaccgtgatctgtaagtgtctccatgatctgagccctgttggcctccttgtcctcagctcatccctgtgcctccttcttttctattccttaaaaacgccaacctcttgccttcctcagagcatctgcacttgcccacaattcttttctctagattctcaccagggtggtcccttggcagcagagtaatccctgatcactctgttggaagtagtctttagtcagcctctatcctattatactttatggtcttcacaggacttctgactgtttgaaattattttatctctgtattaacgttatctatctctttctgctaattgttctccctgtgacagcagggactttgtgtcctgaaattctggatacttgtcacctagaataatgcctggcacagggagacgctagggtgatagtgaatgaatggtagagcaggtaactagggagttggtgtgagagaagattgcatggcctgtgttaattcctattttttcctacattggacttcatgttttgttgttgtttttacactttttactatttattttttaattggaggatgattactttacagtatagtgatggtttctgccatacatcaacatgaatcagccacaggcatacacatgtcccctccctcttaaacccccctcctccctccctccccatcccgctcctctaggttgtcacggagcaccggctttgggttccctgcatcacacagcaaattcccactggctatctattttacgtatggtaatatacatgtttcagtactactttctcaggtcttcctaccttctccctcccctgctgtgaccaaattgtttttaaactttttattttgtattggggtatagctgatttacaatgttgtgatagtttcaggtgaacatagaagggagtatgtatccattctcccccaaacttccctcccatccaggctgccacataacactgagcagagttccatgtgctatacagtaagtccttgctgattatccattttaaatatagcaatgtgtacatgtccgtcccaaactcgccatctaacccttctccccatccttcccctggcaaccataagttcattctctgagagtctctttctgttttgtaagttcgtttgtatcatttcttttcagattccacatataagggatgtcatatattttccttctctgtctgacttcactgaatatgacaatctctaggtctatccatgttgctgcaaatggcattatttcattctttttagtggctgagtaatattccattatatatatgtaccacatcatctttatccattccagtgccgatggatgtttaaattgcttccatgtcttgcctgttgtaaacagtgctgcagtgaacaccggggtgcatgtaaccttttgaatcatgtttttctccagatatatgctcaggagtggatgctctattttcttaatgaagctccctactgttctgcatacttgctgtaccagtttacatacccaccaacaatataggaggattcccttctctccataccctctccagtttattgcttgtgaatttttgataacagccattctagcggtgtgtggtcatatctcattgtagttttgatttgtatttctctaataactagagatgttgaacatctttttgtgtgcctcttggccatttgtatgtcttatttggaagagtgtctattcaggttttctgctgagtttttgattgggttgtttattttgtgctgttaagcattggactttattttttaaaattaaaacctagatgtcagtttgatacatgagaaaaatggaagtgttaagcagactagtttcttttttttttaagacgaaggtattcagatcctctagcatgaactctgtgggaaacaaataaaataggacaaagctacttggtgagcacagactctggcatcggggcttagaaatcaaaagatccaggctttagtcctggaaggggcctgaaagatcaccttggggatagttgctcagaactggctgcccgtgaaaatcacatgtgctgtgctgtgcttagttgctcagatgggtccaactcgttgcgaccccatggactgcagcctgccaggctcctctatccatggggattctctaggcaagaatactggagtgggttgctctgccctcctccaggggatcttcccaatccatggattgaacccaggtctcctgcattgcaggcagattccttaccatctgagccaccagggaagcccaagaatactggagtgggtagcctctcccttccccaggggatctttcccacccaggaatcaaactggggtctcctgcattgcaggtggattctttaccagctgagctaccagggaagtccaaaaatcacatagggagcttttatttaaaacatatgcaaaaccacatgtttttcagtctcttcttaggagattctaatttgttaggcttggctttagggctagggaattcatgttttatctaaaatgctgctgtagtgatggatggtgcaccaccaggtttgggaaccagtgacggagcccacctctctcccccggtgagtaccctgaggctcaaagagatcaggtgtctcactcaggggtacccacatgagcggctgggagagggcactcaagtctcccagccttctttctgcaccattcaaaaatgtagtgagaaattctcagggacagaggtggggctgcctcggaaattgtggttttattatttttttctttattgacatgtaactaaccagtctcgtgtcaaacaggaaatgcatctagcgttgctgtccttttttattacaaggtgtcagatcagtttgagtttaatagagagatgaccaaagtgtggttccgagaccaccaccaccaccaccacccaagaacttgttagaaatacagattctcagttcagcccagaactgctgattctgtactccagagatggcccagtgggctgtgttttcaagccatccaggagattctcatgcccactgaagcttgtactttttacaacccaatcagtggttaaagctgctggcctcggcctttaagttggtgactcattaacatggaggccttaacttaagctagccatctgctttccttggtaacagttgctcaaaatagggacttttgttataaatcttcattagtccgctacacaaggtggggtgaattaatacttgttgaacacctgctgcatgtgaagctgtgtgttggaagctattacttgtctcatgtaattctcacatcattctcaaccatcctgctgggtaggtattattatccctattttacagatttggaatctgaggctggtagaggttaaacgagagttatttgcccagctatgggtgtgcgttttgctgtctccctagagcagttgctctccaacctttgtatgcacaattgggagtcctttggagaatcttgtcgttagttcagattccctctctgccttcccagagggcttcatccaggggcctgatggaacccaggactttgggttgtcatcaggtactctaggtgattctgctcccagtgggcatcagaccatacttggagaaagttctctcctggatccattcagtcttgcttcagtagttggaccagatgtctctcaaggctcctcagagtttctgtggttcgccagtgttttgtgctcacagaccttgggcaatggatggggaagaaatacgagcgtggaggaaggagcttgggagctcgtacagagaaagatctttttttttgacatgtacacgctgctttatttacttatccttggctgcacgggggcttcgctgccgcatgtgggctctctctagttgtagagagcggggagcactgtctagttgcagtgcgtgggcttcactgtagtggcttctcggtgcggagcacaggctctaggagcacaggcttcagcaggtgaagatctcgagctcagcagtcgccacttgctggctcgtgggcacttggactcagtagttgtggcacaccaggttaattaatgctccgaggcatgtggaatcttctcgagccagtgtcctctgcactggcacgtggattcttattcactgggcccccagggaagcccccagagaaggttcttatttgcctagctgttcctgctctctctgctgcctcggtgtttgcaggccatgttttggctttgagtaacttctgatcctttcagttatctaccccaaaattgtgcaacttttcatgtaacaacttcacctatgtgtggtgaactgccccaaagtgagccatttcctccaggctgaaatgagtatctgttgagtactgaattgcttcagcttttgaggcaagaaatggcatttcatctgtttgatgatacgctcccttatttttcaggcatagaatggacatatttagtgaatgaactgtcagtccatcaggagacaatgacttggtgccattatgaagggaaaaagtgagatgcaaatttaaaaataatttcaggtatgatgcctgatgtcctttttttttttttttttttgtgagttggaatggtgatttctcctccagaagtttacctaagtaccccaggatccccttagtgaaaacaatgcatatatccagagctggtggaaacctctcaggcctttgcccagtggataagtcagcattggtgaaatactacatttctttaataaggcctagtccctgaaacaaattattaggaaaaggttggaaggaaatttgggaaagcaaacatttcagcttcctggaatccactgtgtataaggtaaattatttttctggtaaaataatcaaggtacaggttaagtttctaaggataatttattttgctgctgatatcagagttggaaataccaataggtaactgcgtacactagctagagctaccgtttattgcaagcttactgtgtgtcaggagtcatatgaacattctctcatttactcttcagtagactttcaaagtaaatattatccttcattttacagctgatgaaacagtctcaaaaggattgattaattggaccagtgttgaaactggggtttccaggtatgcagggctttgctaaaacgcaggcctgggtgaactaggatagttagttaccctgagtgtcacccagctcactgacctacagctgatggctaggaagtaagcccaaaggattctgaattgtctgatagatggtatatatatggaagtgtgctgattcgcctcacaaagagaccttcttaacactttgtattacatatttttctccattgcatacataattctgatcttggttgtttggtttccagatgccttatcagttagaaggtatgcacattggttgggggaggagtgactctggaaaggcactctgattactgtggtgaggacgctggctgactgacagagaaggtaaaggcagggaaaatgaaatataaactaataaaagacaaaatcaatacagtgtcaggaggctttaatatagtggcaaacataccttaaaagacagcagctattatggaacatgtactcggtgccgaacactgtcttaagcactttatagtgtaacatgactcatttttacaaaataatcctattgttccaccaatgaggaaacaggcacagagaggtcaggtaacttggtgaattaccaatgcgtagtaaagctgggattcagatccaggcagcctgagtccagggcccggatcctcagcatcctgtttccatgtaggccttagatcctgagagtgtagcgcacattagtggtgtttattgtggtggcctgaatcatccaactgctactgctaagtcgcttcagttgtgtccaactctgtgcgaccgcatagacggcagcccaccaggctcccctgtccctgggattctccaggcaagaacactggagtgggttgccatttccttctccaatgcatgaaagtgaaaagtgaaagtgaagtcgctcagtcgagtcgagtccgactcttagcaaccccatggactgcagcctaccaggcttctccgtccatgggattttccaggcaagagtactggagtggggtgccattgccttctctgtgaatcatccaaaggaggggaaaataaaactttaaggttgggcattacatgtctttttgtattaattaattaaaaaaaaaattatcagggcatagttctgcaaggactgttagtagaagttatcagaatctccgcccgtggctcatttcctgctccccagagtcaagtgctttcagttcttgcaatgagttgacacttgctggttgctgtgtcctctgtctctaatgacatacttgtacttctgtatgattgattttcagttttaggcatcttctactgatgcattactatggaaaaagaaaattttagtttgtttttccacccaccccgaccacacacgcataagatttccatcttctccttctcccagcagttacgttatagttgtagctataacgttgtagctagctcagtatgtcatgggcttctgtttatgtttaggcttccctcctgggttgggcggtctccttagaagacaacttgaaccacgtgcctgtggagtaagcctgccttttggaagtctagcatggaggtgtggggtggaagtgtcttcatatttattaatactatgcaacttctcagtgcctctcctgtctccactaaagttggtttgactcagacaccccatgcgagtttgattcttggagttttactctctccggagaatagacgtttgacttctttggagctggaggaatcacaaggctggggcttggggtgtaagcagacttccattattttagcctcactttatgctctcccctcctccagaggtactggggctctgactgcctaagccctttctggagattctgtgatgagttgctccttgtgtttctctactggcagataaggagtctggtttcctgagtctgctaatcaattacctcttgttaatctactttcttttttttcttattttttttcccagcacatcactgcatatatatttaaaccaatccatctttcaggaaacagaaacaccacaaagcgtgcagttagcaaaggtaacttctataagtcaatataaaatgttacagtttaaagctcttgtatttatttttaaaatttttattggaatgtagttgctttataaggctttagtttgagaggtcatagaactaaatgtatttagtgtgctatctgtatcctgaagcctgaaagacactggagaaagctttcaatgcaaaggggtcataaaaaggcggtgttgcacgaaggggaagactgatacagttctatgaaaaagggggttgtcgaagttttacttgctactcatagtgtagttctaggatcaggaacatcattgttacctgggtatcacttgggtgctatttagaaatgcagaaatcctgggctctacctgggcctgttgaatcagaattagcattttaacaaaaaaatccctgggagactcctagggattgaagattgagaagtgctaatatcaaactttcctcaacttctactgtaatttagaataagctaactgtaatgaattttcatgtgggatttaaacattttggtactttcccttactaaattattctccaaattctagagcagtggtccccaacctttttggcattaggtactggtttggtggaagactcttcttccatggaatggggtaggggagggaaatggtttcaggatgattcaaacacattacatttattgtgcactttatttctaatctaatgctgttgctgatgtgacaggaggtattggtctgtggcccggaggttttcttttaccagatgatgtcagactggttatgttcaggctttttcagttgctcacagttctgcaggttggtgagaggttttatagattgcatcagtggagtcttcagtcacacttggagtggtcaaatgagagggtggctaccccgtgaggtgaagggtacatcattcgtttttatgcccaacatctatcccagtgacaggcctgtgtttaactagagacttgtggaatgagtgagtcaaataagacacagttcctgtcttcgaagtattcaccagccagcaaggagtcaactggataattatcatacagggttgacctgccctaggaaagaggaagcacagagaaggggcatctgaggcagcattcctggcagagggaactgaagggctaagtctcttggtgaacagagcctgtgggtttagagcagctgctctcaggtgagtgtatcaaagtcacctggcggccttgttaaaccacagacttctgccctcatccttagaacttctgattctgtaggcttggggtgggcccatggatgtatgtttctagcagcttccaaagtggtgctgatgacactgcttttccattttgaaaatcactggttttagagaattccagctagctctggtggctggagtcaggagactgggaacagtagatgacagggaaggcagaggcctatggtgtggggatgttactgcaaagattgtggggagccactgactggatttacagaggagagtgatggacacccacttacgttgtagaaagatcactttgggtgcagtgtggaggatgagtcaatggagaggccaggttgagggccagaaatcaattgtgtggttgactatagtcatccagatgagaaatgataaacacttggaataaagattagaggaggaaggattccagtggtcaatggaagtgggaggggagggagggaggagtcattgaagacaatcagatgtctgtctggctgtgctttgggattgttactcaagacacaggaggagaagtgggtgtgaagcagggtctacagagaagagctcaggaggtaagtggagggccggacatgctgaatttaagatgccagcgaggtatctgggtggactgccaggaagagagttttccttatgggtctggagtccagagagagatgtgtgggaagtcccttcacttcctcagcttacactgatctcctgtagtgtttgcttgaatcaggccttgtaaatacaagaaagcaatattaataaaatattgctaattgtaaataaataagcaatattaatgtaagggttttcccagtagctcaatggttaaaaaaaaaaaatctgcctgcaatgcaggagacgtggcaggagccatgggttcaatccctgggttggaaagactccccctggaggaggaaatggatacccattccagtatccttgcctagaaaatctcatggacggaggagcctggcaggctacagtctatggagtctcaaagagttggacatgactgagcaactaaacactcacacacaatattaatagaacccttaaggacctttagaacgcaatacttttaaatatgttttatcaagaaaacaaatattctacttgtttggttgaggggaaaagaaaaagttgaagtgtaagtcttctaacactggaagaggttaatacagctgccttctgtctgagagaccaggagattgggttttagtaaaagcttgaaaggggcaaaatcacttgactggtttgcgggccatatgacaaacagctgagactaattagctggattgtgggtttttccagagatgactgattttgaaagttgatgaacctaactgcttttcaaaagactcttttgaaaaacttttgtaagtagactgttctgattttaacctttctctttgtaatagacaaaagtatctttttagaagaggacatgtgattacaagttgcctaattgttgaagtgttggaaactccagtctctaaagttttgggaaaatcaaccaggatttatactttgtcaaggtatggttatgcctttttgtgtgtgtgtgtggtggtggggaggtagaggctttgagtgctgaggtgccagttttcaggtacttaaaatagtgcaatttaacataaaataccactgcatacattaatttttttaaaacaaagacttcaagatgtctgctaaatttcttaggtttagtttgaaaagtgcattttcagttaccagagagtgggtatgaatactgactacattcttcctttcttttctgtactttaacaaagtaacagaggcttttattctcaggtaatatgttgaataagagagctgattacggaattgaatagctctaagagtcttgctcatcttctgagcattttatccccaaaaattcaattgggattttgtttttaatactgttaatagctctgtgctatgtatggtaagttacttcaattgtgtctgactctttgtgaccctatggatcatagcccaccaggctcctctgtccatgggattctccaggcaagaatactggagtgggttgttatttccttctccaggggatcttcccgacccagggattgaagctgcacctcctgagttggcaggcaggttctttacccctagcgccacctgggaagccctgatagcttcccagctgatagttctagtggagattactaagtctgtgtgttagtgtaaggtgtgtttcttccatcacttaaatttgtcttctaattattaattttgtgatgtttggaaacagtatcgtaattatgtaaggaaaggcccatctattttattattattattttaaagatccatctgttttagagatgcattggagaaggaaatggcaacccaccccagtgttcttgcctggagaatcccggggatgggggagcctggtgggctgccgtctgtggggttgcacagagttggacacgactgaagtgacttagcagcagcagcagcagtgatagtacgcaggaatgaaagatctgggcaatgaatatgatggggtgttttatcatacagttctctccacttttacgtgtgtgttagtttgctggggctgccataacaaagtatcacagtctgtgtaggttaaataatagaaacttcttgtctcagtcctggcggctagaagtctgagaatcaaggtgttagggctgtgaaggaaggatctattccaggctgctctcctcctccctctgtctccgcttgtcacctttcctttctgagtgtctgtgttcagaaatcttcataaagacactggttatattggattagggctcaccctagtgacctctttttcatttgataagctttctaaggaccctatcttcaagtcaggtcaaattctgaagttaggacttcaggtcaaattctgtgagttaggacttcaagcatatgaattttgggggaacacaattcaactcataacagatacatttgaaaaatttcattatattgcaatttaattgcctccaagtcatgcagcaaatatttgttaagccaagtgcctagactgtgtttggtgttgagtatgtgaggataaataagacttgatctcgatccactgacattggtttaatcatatgtgtggatatggcttcatgagtgtgttcatttatctctttcattgagttttggccactttcagagttgggtgtccctgaagacacgatcagtgttttgacacacgggcacctggaagggctctgttgctcctgaatgccctcaagataggcaaaagtagaaggcccttagcattcatctagtctgacctcctcatttcacagagggagaaactggggcttcaaagtgcaaaagacatttggctgattagtgccagaaccacagcagcttctgctccagtacatcattttgttttcttggtcacaagttcatgctttcatgtaggagtgaacccaaagtctctttagaaatcagatgagaaagagccttgatctaaagctgacaatctctgttgagattcttggattttaagtaccgcccccccccccaaaaaaaaagactgagaggatttcatccacagaatgtccagtttgtacttaatacatccctaaggagattgctcccaccttggttaggctctgtctcttaccacattctctgtattcttttcagacacactgttcagtgacccagcagccattagaatacaaacaacattttttcttctttcttgctgctgctgctgccacccacaagacaggaactgcggcagaaagagagcgctgatgaaacattgccggccagcagggtggcaccatggcaaccaggacctgcccatgtctggcaggtctgggagcccagggctgcctctgctgccgtttcagcatctccctgtccagtctctcagaacctgagtgctcacagaggacatgctccacactttgctctgtttctcttttctcttttgctactcttcccttcttcctccctctgcacttggttgatttatagtttgagccagggtgcaccacatgtgatagctgctggaacaggcccattaaaaacaaaagctgatttctgcagaagccgtccttgtttagggctgtccttgcaagagggcaccttcctgctttttttggcgctcccgttgttgctggcatggctggggccctgccgccttggcagagtagaggctgggtttggtgggggttggagggtagggaggtggttatgagacactgcttgggaggagagcttgccttgctgctgtttttctgaaggcaggagccactttgttcaaacatagatgcaaattgcccaagaactgagagcagtcgatttttttttttttttttttgcctatctgtttccttgctttcgcccatttcattttctattaggcttttcctctccctgatgtaacctgtaaggggattctttagctccaagtgctggatttatcacactgtaaatgttaagtggatcctctattttcacaagaaggaggaagtccagacagctttaagctgataccactcttcggtggtgactgatgcaggccgtggactattgtttgaaaacctttctagtatcatttttgggtctctcttgctgagccttacactttggctctcttccttctaaaatgccttatctctctcatggccgcaggaaatcaactttgttgatgaatataaaatccatcttgttaacccttatttttctttcaagccctaatattctgttttcaaaatgccaaataaacacatttccctggatatccctgtgacatgagggacatataattggtcatattccatacaggattacatagtagttaagagtgtgtctgggttcaaaccttggctttgccttttattgactgtgtgaccttggagaacttacttaacctttgtgagtcagttttcttatctgtagattagagttcatagggttgtttcgaggctctagtgagttaatatattaaagggcttagaaaagtactcagtaagtgtttgttataatcatttcaaaccagcttttcctctcttgcttgtgtgcttgtgtgtgggtgctcaattgtgtctgactctgtgacctcatggactctagcccaccagacttctctgtccatgggattttccaggcaagattaccggagtgggttgccatttcctccgccagggaatcttcccaacccagggatcgaacctgcatctcctgcactggcaggtaaattctttaccactaagtcacctgggaagccctttcctctcttagttaatgatagtatcttccattcagttaataaactgaaagttttgattatctttaactcctgtaccagtcagttaagggggtatcctgattttctacctcctaaatctatcttgaattaatcccttcctctgcatcccactgtcaccaacacaagtcactcaccatctctcagcacagcttcctggtcctctgtgtattcccagaaagatcactttcaggcacagacctcgtgttcctctccttcataaaagcctgcagtactttgcattgcccagaggataacacacagactgtctagtgtcatataagagtcctttcaggcccaggtccccaaccctctcccatcatttcagcctgtctggacacctcctctcccatcccggtatagtccactaatagcatgcatctgctgaggttccctaaatgcatcataatcttttccctcttagacctttgcaaatatagatgctcttccctgcctcccaccctcccagtctgtttcctgttcccttctcacggctccaagccttgtctgtgttttctacttcagatgtcagacagcccttacctagttctgtcaaaactcagttaacacctttcagatcggcattgataatattgtttgttgatggtttctgttatctttaaaggataaggcttatttgacctgtgaggtgaagttctttaccacatcatctgtgaactgtgtaatttcgttctttcgcgtttgtcccttttccctctgggtgctgatgtaagtccgtggctggggtacccttctgtgaggtgactgggtgggctcccccgcttccctggccccctctgcccccggtgtcccagctgcgcagtgctgtgtgcatgtttctgtaacagtcctcgttccactgcatcttcgctgttcacgttctcgtgtggcatttctgctggacttgcttttctgtggcctcgtcctaggtgcttagcatagtgacacgtgcaggggctgttctcagtgctcaggtacgtgcatggtgtttgaactgatgtgctcatcagctgccacctggatttctgtcattcatcctagcttctctctcctcagtgtctacaggctttgctggtgtatcgttagatcattggtgtaggacattgcacttgtcagatttcatttaaaattcgtaacaacttttggattgacatttgtttatcattttgcatttagtttcagtgaaatggcaatccactctagtactcttgcctggaaaatcccatggacagaggagcctggtaggctacagtccatgtccatggggtcacaaagagtcggacacgactgagcgacttcatttacttcacttaaggacattgggtttatgtataattcttgggaagtacctctgtctgtcacagcccatcccccttgtcatcctgtgctttataatgtttgcaattttgcattggactcttgagccaggtttttcctctaaagccactaaaaagtgctgttaaaaaaattagattcctgggacttccattgtggcccagcggttaagactctgtgctcctaatgcaggggacatgggttccctcaagagtcggacacaaatgagggactgaactgaactgaactgaagatcccacatgctacatggcgcggccaaaaaataaatatattcatttccatctagtctagtttttatagttctgaaaagtgtttaaaaactaaaagtgagtgtttatagaactcacagaatgaaaatagactgttttctttttaaactttttaaatggtgttttaaaacgtaattgctggcaatgcccctgcggctctttggagtcaggtataaactacagttctgtatattcttgtgatttttaatttacttttcttagcacaaaggacttgaagtttgtttgagagctgcttgctgatttctatttcttttaattgccttttttcatttctagatcatgcctcatctaataatattggtaaaatagctgtattttatagagttaaatacagactttagtataattgtatagaccaagtgagaaaaaaatcttggcaaagttttttcaaaaattcatcataaataattagccagagtatagaaatgtagcttcagctgctttaattttaaaatgaagacatcactttttaaaaaatggtaagatcacattaaaaatgttattggtttatagttgatttacaattttgtgttagtttcaggtatacagcaaaatgattcagttatacatatatcctctctctttcagattcttttctcatattgattatcacaaaatattgagtagagttccctgtgctgtacagtaggtccttgttggtgatctctcttatatatatagtagtatgtgtttgttaatctcaagttcctgatttatcctccctccccctttggtcaccgtgtttgttttcggtatctgtaagtctgtttctgttttgtacgtaagttgatttttatcatttttgaaaatcagattccacatatgagtgatatcatatatttgtctttctctgtctgacttactccacttagtacgataatctctaggtccatccatgctacaaatggcattattttgttcttttttaatggctgagtgatactctattgtgtttctaccacgtctttactcattcctctggtgatggacatttaggttgcttccatgtcctggctactgtaaatagtgctgcactgaatatagggatgcgtttattttttcaaattatgattgttctccaggtagatgcccaggagtgggattgctgagtcatatggtagttctgtttttagtttttaaggagcctccatactgttctccatagtggctacaccaatttacaccaacagtgtagcagggttcctttttttccacactctctccaccatttactgtttatagatttttttttgatagataatgactattctgactggtgtgagatgataactcactgtagttttgatttgtatttctctgataattagtgacgttgagcacatttttatgtgctttttggccatgtgtatgaaggtcagctggagaaggaaacggcagcccactccagtattcttgcctagaaactcctgtggacagaggagcctggtgggctgctgtccatggggtcgcacagagtcagacacgactgaagcaccttagcatgcatgcatgcattggagaaggaaatggcaacccactccagtattcttgcctggagaatcccagggacaggggagcctggtgggctgctgtctgtggggttgcacagagttgtacacaactgacgcgacttagcagcagcagcagcagggaggtcaggggcttctctggtggcttagcggtaaagaatctgcctgcagtgtaggggatgcaggaaccatgggttcaatccctggactgggaagatccccttgtgaaggaaatgggaacccactccagtattcttgcctggaaaatcccatggacagaggagcctggcaggctacagtctatggggtcgcagagagtcggatacaactgagcaactaaatcaccacatgaagatcacagtttttgactagcagagggagatgacagattgggtgaagtctagggcataccaagagatttatgataaggcaagaaagatgaggaacctgtttcatgttcactgtcacaggaatacattgactttttttttaagctataaccttttggtgagtcacacagttatgtgtgtgggaggcaatgaggtgggacgatggggagagtatggatgagggtctttggatcttttagtttttctattctctcctgttctacactgtagagtgcttgcctcccagggaatcccagctttaatgtactgtttgctgctgctgctgctaagtcgcttcagttgtgtccgaccctgtgcgaccccatagacagcagcccaccaggctcccccatccctgagattctccaggcaagaacgctggagtgggttgccatttccttctccaatgcatgaaagtgaaaagtgaaagtgaagtcactcagtcgtgcccgactcttagcaaccccatggactgcagcctaccaggctcctcagtccatgggattttccaggcaagagtactggagtggggtgccattgtactgtttacgactgcagattacttcgagaacttatccatttccagacaccaaaccttttgtatgctttctctcagaactcacctcccccacatctagattaggtgttaatctcatatgctccttttactacgccagccataggtactaaccatgcttggagtcttgcttcagtggtcagtattgtccgttagatggtaaatttggtggggggatgcagacgctgtatctgtcttatttgcatttctaccaccttgcacagtgatgggtgtgggcactcaactgttaaatgaatgaacaaaacaaacatgtgatcaccttttactaagacagaacctgtccagtcttttatagacgtataacttccctttgatgcagcattccatgaactagatttgttcctcctgctttaaacaaaagggaatagctacattttcccctctgtcttcagactgtacaaattagatgatcctcatggctggtctggtttaggtctggaaccaaggttttgaggcatggactggctcctttggctgattgtgctgaattgcaaaatatatataagctccactttttatctctcttaagatgcttaccattttttaaatatgttaccctcaatgcttagtgttataatgggctgtgtatgtgcttgaaccccagtacttaaaagtccaacatagtattgaaaagaaaattcaaaagctagctaatgattttctgatgttactctaggtaataaaagactatttcagttgaaaaattttctgtgataattacttctgtctctaagtgactgcatcttgagtaaccttttttcttttggccccaaactagagcaacttatgtaaaatgtgatgtgttatatttgaaggttggtttttcatggggtcgcaaagagtcggacatgactgagcgactgaactgaactttgagtaactcatctcaattacatggaacttaatagacaattcattttttattcatccaaatatttattaatgactctgagaattatagcatcctttcctcaagaatggacttggaagaagcaatgacattgaaagagaagtcctgggtacaggttatcaataagaagttaggaaagttagagagaaaactaaaagtaaagaaaaataaagatcaaaggcagaataattgtaaaagcttataaattaacaaattaaaggagaaaaaaatcacatttttctcaatagatttagaagcaaaatttgataaaattgatgtacatccgtaatacttattcttagaaaacaaagaataggtggagcacttccttatcctgataagagtgtctgccaaaaacctacagcaaatgttattcttaacagtgaaacattagaatcaagatatttattcagtacttttggaggtcctaactagcacagtaagacaaggaatataaataaaatgtataaagattagaaaagaaaaaaaaagatgtatttattttcagctatgtataacaaatcattagaatagtgtgactaataaatagatggtaatgtacatgtaagtatatatatttaaaagatatcacttataatagtaacaaaaatataaagcatcagtaagtctaaaactgtacaaggtctttatgaagggaatttactttgacatttgtaaagacattaaagaaggcatcaataaatgtagagatcatacatatacatggatagaaagattcaatatcatgaatatgtaagtcttctcagtttgatcgaacatcctcacattctgaggaacttagatggaagcatgaaaggtcaagaatgtcctcagtgaggcagtgggatctggtcctctcgggtatgcctttataactcaggtatgctgctgctgctgctaagtcgcttcagtagtgtccgactctgtgcgaccccatagacggcagcccaccaggctctgctgtccctggaattctccagacaagaacactggagtgggctgccatttccttctccaatgcatgaaagtgaaaagtgaaagtgaagtcactcagttgtgtccaactctcagcgaccccatggagtacagcctaccaggctcctccgtccatggggttctccaggcaagaccactggagtggggtgccattgccttctaaagctgtgttataaagtcacagtagctaaggccttataacattggcccatgggtaatgaaaatgaccaaaagaacaaaagagtgaatcctgaaacagatctgccccgatatggtgactcactaggaaaagagtaatttttctcgataaatggtactatgataaataggtgtctttcagggaaaattagtgaaattggattcctacatgcaccttaaaaattaccactgggttgaagacaatgtgaaaggtaaaatcttttgaaaaataatgtagatgagtatctttatcactttaggtaaagaaggatttcttagctgtatttttgttttgtttttggtcacatcatgaggtatgcagagcttccctgatgagggattcaacctgcaccccacaaagtggaagtgtggagccttaatcattggaccatgagggaagcccatggatttgttttatattatataaagaaaactatgtataaaagattgataggtatgactgcttgaagattgagctattgaaaaggaggaaagacaaacgactaggtcctactgtatagcacagcgaactatatagtcaatatccagaggtaaaccaaaatggaaaagaatattaaaaaaaaaaaatatatatatatatatatatatagagagagagagagagagtgctcctggtggctcagtggtgaagaacccactgccagtgcagaagacgtgggttcaatccctgggtcaggaagatctcctgtagtataaaatggcaacccactccagtactcttgcctgggagatcccattgacaaagaagcctggtgggctacagtccatgggctcacagagagtcagacatgactgaagcgacttagcacatgcacacacacacacacccacccacatatatgtatatatataataactgtcactttactgtatagcagaaatttatacaacattgtaaatccaactatatttcaattaaaaaaagtaaaaagacaagccacaaataggaggaagatatttgcaaccactgtaacggtcaaaggatgagtacctagaatattcttctcaaaagaattcctacatgttcataagaaaaagacaacccaatagaaaaaaagggaaaggacatgactatgcttgttcacaagaagaaattgaatggccaacaaactaaaaaaaagaagaaaaaaagaaaagaaattgaattgctccaccacattagcaatcaaataaatgccagtttagattacagtgtggtaccattttgagaagtctgacaataaacagtctgacaataaaaagtctgatgttggtgaagatgtgaagttgggagtgtaaaacaagtgtggtggttgagttgctcagtcatgtccaactctttgcgaccccatggacagtagccagccaggttcctctgtccatgggattttccaggcaagattattggagtgagttgccatttccttctccagggagtcttcctgacccagggatcatacccatggctcctgcattgcaggcagactctttaccactgagccacggagaagcccccagtttggcattgtcttgtattactgaacatgtacataccaatgtcccaggaatgtcattctttggtacccatccttctcctttggtatgttctgaattggttcagatgtcagttcagttcagtcattcagttgtgtctgactctttgagacccccatggactgcagcatgccaggcctccctgtccatcaccaactcccagagtttacctcaaactcatgtccattgaattggtgatgccatccaaccatctcatcctctgtcgtccccttcttttccaaccttcaatctttcccagcatcagagtcttttcaaatgaatcagttctttacatcaggtggccaaagtattggagtttcagcttcagcgtcagtccttctaatgaatattcaggactgatttcctttaggatggactggttggatctccttgctgtccaagggactctcaagagtcttctccaacaccacacttcaaaagcatcaattctttggcagtcagctttctttgtagtccagctctcacatctatacatgactactggaaaaaccatagcctttactagatggacctttgttgccaaagtaatgtctctgctttttaatatgccgtctaggttggtcataactttccttccaaggagtaagcgtcttttaatttcatggctgcagtcaccatactcagtggttttggagccccccaaaaataaagtctgcctcagtttccactgtttccccatctatttaccatgaagtgatgggagcagattgcatgatcttagttttctgaatgttgagctttaggtcaactttttcactctcctctttcattttcatcaagagggttttcagttcttcactttcttccataagggtggtgtcatctgcatatctgaggttattgagatttctcccggaatctttattccagcttgtgcttcatccagcccagtgtttctcatgatgtactctgcatagaagttaaataagcagggtgacaatatacagctgtgatgtactccttttcctatttggaaccagtctgttgttccatgtccagttctaactgttgcttcctgacctatatacagatttctcaagaggcaagtcaggtggtctggtattcccatctctcagaattttccacagtttattgtgatccacacagtcaaaggttttggcatagtcaataaagcagaaatagatgtttttctggaactctcttgctttttccatgatccagcggatgttggcaatttgatctctagttcctctgccttttctgaaaccagctcgaacatctagaagttcacagcgcacgtattgctgaagcctggcatggagaattttgagcactactagcgtgtgagatgaatgcaattgtgtggtagttagagcattctttggcattgcctttctttgggattggaatgaaaacagaccttttccagtcctgtggctatttctgagtcttccagatttgctggcatattgagtgcagcactttcacagcatcatcttttaggatttgaaatggctcagctaatcacctccactagctttgttcgtagtaatgcttcctgaggcccacttgacttcacactccaagatgtctggctctaggtgagtgacaacaccattgtagctatctgggtctttaagactttttttgtataattcttctgcgtattcttgtcatcccttcttaatctcttctgttactgttagattctcatcgtttctgtcctttattgtgcccatctttgtatgtaatattcccttgttatctctaactttcttgaagagatctctagtctttcccattctattgtccacctctatttctggtccatcttattcttatgtctaggcttttatctttaaggagtgagaggtgatacaaggggcagctgccaccaggaccccatttaagcttctcatggccaaactctttgaaccgagaactgtgtgaggaagagaccattgaattcagccctcttatttcatatttgagggagcaaggcctggaaagtgttggatcacacacaggtggtagcagagctgaaactaatatcagcacactgacggttagttgtccagccctcttcaacttgccacattacctcataagcattcctttgaatttatagccagctttatagttatttgtgtatttgtcttatgtttctctggctgtaaattctgaggggtaggactatatcttatttacatttgttgcctttgaagtagttaactgggcttctcagtacctgttaaattgcagtcaaaacatgctcttgtaccagacatgccattttcctattcttcactgctttgaaggtgttcaactcaagtcctggtccctgtctgaagccttggtcagattgtgccctgtttttgactgctcagggtcttcagtccttccaatgatcttgatagataaaatctctcatattgaggaaacaggcttggagaggttacgtggcttgccatggatcacacagctggaagtgacaaagccccattacatgtttgatatcctgtgctgggtgacatcttgcttcctgatgatcttgtttcatgtgtcttttgtggaaaatgagttcattttgtttccttatcctgattgctagcttcttgagacgagtggcgagatcacatatttctcctgtgcgatttgtagttgccaacagagtactgggcatgtagaaattgcctatcaaatactgttgaattgaatgcaaatgtaacttaatttaccaaaaaagagcagctgtcagtggcgctctaagacacttcttgagtcattcctgaatgtaatcagcagggaacagagggaagcggaggacggatgagctgtcagagaaagtcagatggtagacacaattagcaatggagtggcagctggcctgttgtcagactggtggtgaggagcggaagggaagccacgcacaagaagacagaccaggcaacataaaaagtttactgcagggatgagggatgggagaggagtactcagaagtagcctaacacctgtccaggttaatgaagatagagcactcagatacattgagaaaacgttgattaaaagaatatccagaccttgatatggctttggaggactgatttctagggtgacatttgatgggtagagaagcatttggcttagtttgtgatcattctgttaattactgaggtcatgagaaaaggaacatacgtagacgaggttgttgctggtgaaacaacttccctccccttttctccactatggtgatcagtagggtctcagtcctgagccctgatggtcagaagtgaagggaattcaaatgactgcacgtgtcctccgtgcccagagatgtgctgtgatgaccagcgccatggctgttctggtactgcttcatttcattttcttttgtttgcattgccctgaaagttagtgaggtgctttagaaattccagtactttgacagctaaactgtatttccaattctgccttttcccaaaagggtcataaaaatccactgacagaccacatgctccagattttggtttggaaagtcacactgcatctcctgagttaacaatcattttgcatctgaaccagatgtgaagcctcttgcattagaatgcatgtggtaaatgtccagtttcctcagagaagcctgcacatgttcttttgtgaagttctgtctcctacagagatcaagatcaagagcttttagaggagaagtaatagaagttcagtctgttcttttctgtttcagaaatgttcaatttagaactattttataaaagctaaagctatatgtacctcaactgcttagaggtaccagtagttaagggaaattacttcaaataaaaaattgtaatttctatgcagaataatgttctttatcatgttctatctaaaatgtaaatatggaaaagcttttcttgaacatttgcatatgaacttttaaggtgatactcatttctaggaaaatttcagtatcattgttatgagttttggtttattttcagtgtttgatagctatatagcaatcgtatttttctgtgatgtacaaataaataggaaagttctaaattaaaatgatatcagtgacaacatcattattttaatggaaaggtaattcttggggtcaaagtgctcaacttactaatttttgcaatcaaatttgttggtatgtgagggctagttcacttcagttgctctgttgtgtctgactctttgtgaccccatggactgcagcatgtcaggcttccctgtccatcaccaactcctgagcctactcaaactcatgtctattgcatcggtgatgccatccaaccatctcatcctctgtcctccccttctcctccctccttcaatctttccagcatcagggtcttttcaaatgagttggttcttcacatcaggtggcctaaatattgaagtttcagcttcagcaacagtccttccaatgaatattcaggactaatttcctttaggattgactggttggacctccttgcagtccaagggactctcaagagtcttctccaccatcacacttcaaaagcatcaattcttcagtgctcagctttctttgcagtccaactctcacatccatacatgactactggaaaaaccatagctttgactagacagacttttgttgataaagtaatgtctctgctttctaatatgctgtctaggttggtcatagtttttcttccaaggagcaagagtcttttaatttcatgactgcagtcagcatctgcagtgattttggatccccaaaaaataaaagttgtcactgtttccattgtttccccatatatttgccaagaagtgatgggaccagatgccatgatcttagtatgttgagctttaagccaactttttcactctcctctttcactttcatcaggaggctcttcagttcttcttcactttctgccataagggtggtgttgtctgcatatctgaggttattggtatttctcctggcaatcttgattccagcttgtgcttcttccagcccagcatgatgtactctgcatataagttaaataagcaggatgacaatatacagccatgacgtactccttttcctatttggaaccagtctgttgttccatgtccggttctgttgcttcttgacctccatatagatttctcaagaggtaggtcaggtgaagggtattcccatctctcagattctttaccaaatgagccacaagggaagcccatgtgagggctaactttatacttttaacaagtgggtatattaaagcatgattatagaattatgagaatgatttccatgtgtagcttataaaactttttttttttactactttgaagtcacctctttattatatagattctcattttatcctcattaagatgaagtacagtattacatgtttctttagtttcctccaaactctcaaacaaagtttctaaagctgttgcttgtaaatctgttattcatgcacaaatacttacatcctcatggtgttcctttcatgtgttttatgctcctcttgtctgtaattttctttcccctcttgacttattctcctgcagattcatagtttccttgctaacacagaatctttattttgccttagcatacctaaattgtggtctctttattcactctttcttttagtaaggccctgtagattctttctgagtggccatcttgctcacttactttggcccctatattcttagtcccctcccttcaaatgtctttctaataggtgcattcagaaaatagaacttggaacttcccttgtggctcagtggttatgactccaaacttccaaagcagggggcatgggttcagggtgggaactaacacatgttacgcggtgtggccagaaaagaaaataggagcttggttcccatgggtgtgcttactacatggttgatgacaaagacaggtgtaggtttggggaccaagttctaacctgaatgcttgagttttccatttgcacagggcaggaacctgattgggtagattagggaggcttggaaattgcatgggttaagcaggagggagcaaatagttggaataatttccctgacttagctaagaatctctctggcttttgataaagtaactactacctggatcttagattctaagtgttgttcctgatgagctaagtggtcttcccagtgtgtatgggtcagtgtcctcccaattcctcaaattcataagccacctctccccctttttgatctactccttactctgttggtgttcaactttggcgtgactctgtccacctgtctgggacctccatttgtatgtatcccttctgaactgaagttggttttgtgccaccttcatatgaggctgccttcttgggtagggaatactaggggttgctccgatcccatcttacctgtgccctttcctccttccctggaactttccaatggttctaagtagcagtcctcgcatgtgtagcattcctcatgatacagccattagctggaacaagggctcctggggagaaactacaatactagtaattccttttgaatttatggaaaaagtcaagttagtgcagaggattttaggtttttctcctatctgctctgttattatctgctgtactttagtacaaagtggcttatgatacagagcaaaataatatatttttagttattttgctgtatcatatagtaagtttgctatatcatttcattgtgttctttaaagcatatcttgacttctgagggttctgcccaagcatagtttgttgtgtccgtcaagaataacatggctgtactttgtaatgccctttagggaaaaatcaagtgtagctggttataaacatccttccagtagttccattttgcaagtacactggttttctgtcccaaggaggatgctactgcttggttcatctctggccagtttggtctagattttccctggactattcagccttagatccacagctctcctttcccgttgagtgactcaacgatcattgtttccaagattctttccttgttttctgaagctccagttagccctttttggaattcttaccagggtctttcaatacattccagattttcactcccagataagaagagtcctaaggttgtggttaagtgggcaagatgtgagagatggtgtctttaggagatgttgaatgaaaaagcctagcaaaccttgtaatgagctgtcagtctgagttgtttagggagaaagaaagtgttgggtacaaagctgaaggcaagtgagatgattcagagccatttgaggttgagctttccacactgattttccacatgtgtgcggtggagctcttgttaggaccttgttgggttcacaggccttgaaggtgggcttaccttcacttcttttaccagagtggttctaaattcacctgttttatatattagagtgccagcttagattccatttgaagaaacttgctaaggaaagtttgcaaccagctagacaagagcagttttctgagggagtgaagggtctgtgacagtgatgttcggtagtttttctgagccccagtgccagagcgtccagctggctgtgaagacactgacctgctgctgctaagtcgcttcagtcgtgtccgactctgtgcgaccccatagactgcagcccaccaggctcccccgtcctggggattctccaggcaagaacactggagtgggttgccatttccttctccaatgcatgaaagtgaaaagtgaaagggaagtctctcagccgtgtccgactcttagcgaccccatggactgcagcctaccaggctcccccgtccatgggattttccaggcaagagtactggagtggggtgccattgccttctccagaagacactgacctactatggacaaaaagtaacccaaacttacagctgctgtaagtcagccaagaagctccccaaacataaaatcagctctgtagcgatctgtaataaaaggttaggatgcaacataatgtgttcatcccttattgctcaattgactgtcctaacaggaaaaaaagccactatgtgctgaacagacatacctgaggcttgctgtcacttactgagtgtggctcacacatgcttccttaactactcttacaagagtggacatgtgaattcactccagatttttaaaaatgaaagaaaataaggaaagactagtatgcattacaaccttctcaattaatgacacatttatgagaataccaaatactatgtagtatttggaatagtatatggaattctttcataaatgtatcattaattgagagggttgtaatgtgcactagtctagcaaataactttgccaggcagtgtcagtgagcagtttggagatctctgagtgtggattataactcatttgactgtagatttttattccagttaaaaaaaataataataaagaggaaaaaaggtatctgaatgaaagtttatagactcttaaagcacctccatggatcccagaagacttgagatcccacaaacttgaggcctctcataaggactgcagtgtcttgttcttttatgatgtgttattttcatctcctttaagacattgtcttgtgcttaattttctaaaataagataattttcttggaacctaacaggtgaagtaggaaaacataaacaaggatatatcagattgaaaaatgcaactaactagcttgaactagcacatatctaattctgcatgcaacaaacagggaatacagattattttcatacttaataaacccccccaatttgatattaagcagaccacaattactgatccaaaggtaataaaattagaaaacaacaacaataatcacaaaaaagccaacagtgatctgagaggctgatttagaaataggctggatgactgcaaatacttctgtcctcttttgcataagtaaactcaagacacaccctagtctatacacagctgttgatagaaatgcaaacagtcctttgctaagactgcctactgaataggtggaactgggcaagacttcttgagaatcaacaagaagtatatcccactggacctgggccataggtgagtttctttttttttccccttttgatttagctgttaaagaatatgatatgtagggagcagctaaacatgtgttataaatatattaacagagagagtggatctgacaaatgctagaaagacctattgccggctgtttagaacttatcggcgccaaacaagagaggctaagaattctagtactgttgtctggtgctgctaaaatgtcaggaaatagtttgatttttcttctgagcctattttactgtttttaaaagaactaagttaacatatggtggaatatttatagacaatagtgttttaaactcatgatcaacttgtgtctatatgctgccttttcatcaatatatgataaaacccaagctggcaccatggagaagcacttgggtttcagaaatggccctgttcccagacttagctggaggaaaactcccttccttattggaaaagccaaagtccctaaagatagagcagctcatgagcttgtgaaggagggtccaataccttaaaattggcatagctgctcactgttataaggagagcaccagtattcactgactggcatcattggtgtaaggtcagtttttgctcgcacaagctgaagtttaggacgagtacctggagatgagggacaggaaagccagaaaaggagagagagcagaggggtcgtgactcagggtactgagtagaagtgggactgttagaacccaacgggagggaatcatagggtagataggagactatggaaaaggaaaccagctctgaagagacgatgtgctttcataagccagcctgcatctgagaagcatatccctggggcagagaacagctgtgctctgatgtggtcagcgcaggcaaggctatggggtcggcagagtgagggagaagtaaagacatatccagtgcatcttagtggcctttgtgagtatctgtatgccagaccagtgcttcgcctcaattgggtgtgtgtgataggagccctcaccattcacagttcctgaaagtacgcacttacagtgcgtgtgtgctcagttgtgtccgactctttgtgacgccatggactgtaacccaccagactcttcttggaattttccaggcaagaatactggagtgggttgccatttcctcctccaggggatcttcctgacccagggattgaatccgcatctcctgccttggcaggtggattctttacctctgagccactggggcacaatgcatctgatcacagaaaagatgaggtacagtctgtgccctttgattaagaagtcagggaaatgttacagtacaccgtaaaaaaccacacttacaaaacaacagtgacaatgatgtcctagtatgcaaatgaaggagtctagaaaggcaggacagtggtgtactctggacacagtttctctacatgaataaatatagagtttttgtcttagttttttaaaaaggcaatgatgaaggaaccctcttttccccagctactgccaactcagggatatttacccagttgtttttattgtttggacagtcatcttcaacaggtctgggttcttttaattcactatttttttttcatcctaaaattttcttgtgaaagaagtattgttgctccatcacaaagtgaggtgattctcttctcgattgggtgtatttcctctgagaaatcagcgtcttccctgggttacctcacatgaaaagctttgaagcaggtgagatgcacatggacagccaggttgtgttggccaaaggccttccagccctcccacattccaggaggaccagacttggcagaatcttcaactctgtttctcagtcataaatggaagggtattctgtgttttgcaaccttggaaatgcattcttctgtttcaggtcctttgagtgcttcttcatttgtaatccttccagtactggctgtggtagcaacatgcttcatatttccatctttgagtcttggccctgggagcttggcatcactctggcatagccaacgactcttcacttctacttcttcaaaacttaatagcaggatttcctctatgaatcagttagtcttgcagatatattgccttccaggtagcttagatcttttcatactgttcatggggttctcaaggcaagaatactgaagtggtttgccattcccttctctagtcctgaatactcattggaaggactgatgcttaagctgaaactccaatactttggccacctgatgcaaagaactgactcatttgtaaagaccctgatgctgggaaagattgaaggaaggaggagaaggggactacagaggataagatggttggatggcatcactgactcaaagggcatgagtttgaataaactctgggagttggtgatggacagggaagcctggcatgctgcatttcatggggttgcaaagagtcagacacgactgagcaactgaactgaaccaagcttaggtcactcctccatttccattttcagaaaatacttctactccattctttgggagctttattaggttcagtgtccctcttaagatgtcaggaaaaaaaaaccagtcttaatgacataatatcagttttccaaccttaatctgttgcagtcattagaagagctatgatatatcggtttccaccacgcattttgctactcactttacacaggtgggtggtggtgtcccattgtttgaatttccagaccttgactccttcattgtcttcaagggagtagacttcacaggtatttcacttctttgtaattcttggatcttccttgcttcatgttgtctttaagaagcacatttagccatgggcgagacattccattgataggacatgtggttgtgaccattatgggggtactttcacattatttgagatattactcagcaaaccaaacagccactcctattaccacggtattgcctatatttcacaagtgacagattctgtagtacacctttattcctgttaccctgtgtctataaaacaagatgtacttgtcacaaattgtgagtaatacaacacccagtgtttacttttcataaatttcggtaaacattgtattctgatcctaaaagaggtgtggacaacaaataatgtctttggaataaatgaatcaatgatctttatatcttaaaaaaacaaagccagtatcttatttgagttgttgatagtggtcttccagaagaacattttctacttccatgaaacattctggtgcctcttctttttgtagttgcttgaattatttgtctactggtttatgttggttacctacagaagtgatggtaacatctcagaaatagtaggtcaactcttgggtttggactgtttattttttctttattctggaccttctctttaatactcataaagaattgcaaatgtctgaaggatgcttttacaaatgatatatttggatgtcctggcaatatttggaaatgtatatttaattcaacagtttttgtagataattctttttttttctttgaataatttggcactttagatatcatctaaatgacatttagatatcatcatctgctagaagttagtcttttcactttgtttaaatagggaaaatggaatattcctatgtaacaggcacatgtataaatattaagatatgatattagattctgtcagtttttagtcacgtgcctttcttttcactattaatggtggacgtatgatattactacaaaacactatgttgagaagaatccatttacaaatcataggttataggtgaatatgtaatgcacatataatctaatattctgaatttaggtaaagccaaagtcatctttcaataaggagataagaaataaagagattccagttcctgtctatttttcaaagccattacatttctacttaacttctctctatctaagatcttcttgaaaagaataattatttgtttacaccaagtcttaattgtagcacgtgaggtctttgatcttcattatggcacatgaaatcttttttttttcttttaatgtttttaatatttacttttatttatttggctgcattgtgtcttagttgccacatgtgggatctagtttcctgaccaggaattgaaccttggctccctgcattgggaggtcagaatcttagccaccagaccatcaaggaagtccctacctaagatctttgcacaaacaagataagctctttgtttataatttcatctatttcactgtcaacctattcaggagggtggaaatgtatccattcaaactagaccagaaattgagaagaggaaggtcatgtgcacagaaagcagagggtgtctcctactgtagaaatggggagccccactcttgggcagtacaaatcttgctttcacagtgaaagtaaatgtgtttcacttcagggtgtagcaattgcagtgacctaagacagtggaaacagtgtcagactttattttttggagctccaaaatcactgcagatggtaattatagccataaaattaaaataaaaagccatgaaattactccttggaaggaaagttatgaccaacctagatagcatattaaaaagcagagacattactttgtcaacaaaggtctgtctagtcaaggctatggtttttccagtggtcatgtatggatgtgagagttggactgtgaagaaggctgagcgctgaagaattgatgcttttgaactgtggtgttggagaagactcttgagagtcccttggactgcaaggagatccaaccagtccattctaaaggagataagtcctgggtattcattgaaaggactgatgctgaagctgaaactccaatactttggccacctgatacgaagagctgactcattggaaaagaccctgatgctgggagggattgggggcaggaggagaaggggacaacagaggatgagatggttggatggcatcaccgactcgatggacatgagtttgggtgaactcctagagttgatgatggacagggaggcctggtgtgctgcgattcatgggttcacaaagagtcggacacaactgagcaactgaactgaactgaagacagtggtagccagagctcatttggtaaacacaagttgcccctactcaaatcttggtatattataagatgctttggtgatgaaccctctagctctgacagtgctgaaatcacccagttaaaactcactgttagatcagaatgccaaggtaacttttgtgataaaggccttgtacatgactgcacctaaattgaatttttcaattttttcagaaggttcaggcactgattgtaaaattacatgctttgcttaataagaatgtgatgacgctatgctttagtaatagtattgataaagagaactttcagttattgaacagaatgcagaccaagcagtgtgctaaaattttctgtagtttatgtcagttcatccttaaggtaacccagtgaggtttgtaatgttatttctactttgtagtttaagaatggaggcttagtgtgaagaacgtggaccaagtcacaccaacaagggttcagaatttgaacccaaacctacttaccaccatattaagagaacatccctttcttatacagacttgaagttctccttaaggatgatgacaaaaagtcatgactgtctaccaccatttgtggcatatggtagtggttcaggtaatattatctctccttgctttgttactctctgtactaaatatggttgatagagggaaaatcaagctttcaagaactggccggattatctgggataactttaggatgactctgccttgtgataggggatcctaaggccagaatctatgactgaatttaatagggagcttcatggagaatttggactatgttgtgtgtgtgtgagggagagagagacacacagggacacagagattcacacacacacacagagatcttcccctttgtgttagccaaaccattttcttctatcttatttcctgaagagcaattaaaatatattttgtttttcaaataaggaagaagatcattgactttctcttaccaggcattggtcaccacatggtacttgttgaagaagtgggtgttccttgccttctattgttactctgatgagagtgagggtggagagcactttgaaaaaatatttgtgtaaggaggagagaaagaagtgagctggataagaaagtcttttgcctatcccaaattgagggcattcttgtcttttattaatagaagacatttccttgaggtttagatgctacttcctccaggaggcattgtgttgaaagaagtgaccttatgttcaaatgctctccatagagtcttattttatgtcttattttcactttagggattcagttctctttttagatttctagggaagaagattgcctgggtattgacccttcagaactagactgctaggtaatgatgctaatagcagttattgtgtgccaagcactatttcaaactttatatgtatacactaactcagttctcacaacagatgtttgagatagatttactattgtgcttcatcaaatctaaatgtgttgatgctgtatcttgattttgctagaagatgcttttgaaaagttttcacacaactgtatttctagtgccattttatttacaaacaattgcaagttgtcatagtttgtaaaactgtgaaatataagatacatcctactaataaaaagttaaaataacaaagcatatacataatagtattaagaatagaatatcattcccatttttaaaatggagaccctgaggcaaaagacattaagttttctaaagtgacatgactgaactcacatgtgttgtgattctagagtccatgtgcttaacctccacttctttctgtctctcaacaatacgttggaattgagtccatgcagacatgtgttagactgcccaagacccacttactcatcctttcaactgtggcattcatgatagaatggcactgagatttttccaagggaggaagtatgtatgatgtgtatctttagggctgtgatgagggttttgccctaatgcatgcaaagtgcttgacatgtgggcatctgacatatttttagtaagagcaatgcaattgggaggccttgatgaactggcttcccaaggatcagtaggttggagtacctgctggaagttgtgtgcacaacatgttgtttgagtgccccaaattctgcattgtgtattttattctgttcccctttgtgtgctaaaataccaacataaaaagagatgggaatactagaccacctgacctgcctcttgagaaacctgtatgcaggtcaggaagcaacagttagaactggacatggaacaacagactggttccaaataggaaaaggagtacgtcacagctgtatattgtcaccctgcttatttaacttctatgcagagtacatcatgagaaatgctgggctggatgaagcacaagctggaatcaagattgccaggagaaatctcaataacctcagatatgcagatgacaccacccttatggaaaaaagtgaagaagaactaaagagcctcttgatgaaagtgaaagagagtgaaaaagctggcttaaagctcaatattcagaaaacgaagatcatggcatctggttctatcacctcatggcaaatagatgggaaacagtggaaacagtggctgactttatttttctgggctccaaaatcactgcagatggtgattgcagccatgaaattaaaagatgcttactccttggaaggaaagttatgaccaacctagacagcatattaaaaagcagagacattactttgtcaacaaaggtctgtctagtcaaggctatggtttttccagtggtcatgtatggatgtgagagttgaactataaagaaagctgagcaccaaagaattgatgcttttgaactgtggtgttggagaagactcttgagagtcccttggactgcaagaagatccaaccagtccatcctaaaggagatcagtcctgggtgttcattggaaggactgatgctgaagctgaaactccaatactttggccacctgatgtcaagagctgactcattggaaaagaccccgatgctgggaaagattgaaggcaggaggagaaggggatgacagaggatgagatggttggatggcatcaccagcttaatggacatgggtttgggtggactccgggagttggtgatggacagggaggtctggtgtgctgcggttcatggggtcgcaaagagtcagacacgactgagcgactgaactgatactgaaaaataattcattatttccataattgaggagtggaatatttttttctcctgaagaataggctccagagacaccactcaggacttgagtaacaaaagtaatttttcgtacgaagatggttctatatgaagacctacctgaatctcagataagaaacctatcaccatcaatatcctgccaaaacactgaaaaatctctattaacaatttgaagacctgcctgttccctgaaaccttgtatttccttgcagcttccttactgtttagaattctggtctctgttaacccaaaccagcctggtcattgtgtccaatttagaacaaactctaaatagcctcccaatttgctgaatgttccgcgcaactgaaatgtatatttcattgttggatcacagatcaatgttttgctgccagatccttgagataagtcaggaggtgagttctcaacccaagaggctggtgtcactcatcatgccttttcctattgtttatcgttttctcctcagacagtgtcctttctcccaaccagtatactgtactccaacatggacatattgttcagttgttgaaaaatactatactgtggtggagatacatttttgagtacagattgtctacaattgtggtgattataaataaaattttaattttattgatttggcataagtttaaaacaccaaaccattgcttttatgcttctgatgatcattttacttttttagtcttaaactgaacatctgatcagtcaatttggacttttttttttaaatgtttattttttggctgcactgggtcttagttgcaacacgtgggatcttcagtcttcattgtggcatgcaaactcttagttgtggcctgtgggatctagttccctgaaagtgaaagtgaaagttgcgcagttgtgtctgactctttaggactccaggccagaataactggaatgggaagcctttcccttctccaggggatcttcccaaccgggggatcaaacccaggttttccacattgcaggcaaattctttaccggctgagccacaagggaagccccgtgttccctgactagggatcacacccaggacccctgcatagaacactgagtctttgcctatggaccaccagggaagtctcaacttggactgttttgaaccagtttttaccttgaactagttacaagtggtttgataaacttagagcaactgtggtccagttagagatagatttaattggtcagtgctaacttgattcagtgaaatttattctgaaccaagcaaacctcatgtgaatcagtcagaacctgcttatccaagtgagagcttatttgagctagctaaaaccagcctgaagcctatttgagctcttgaaaccagacctaaatggttagacacatgtggttttagccaaagtggctttagatcaatcaaaaatggttttgtaggtagaacgtctttgaacttaactctttcattctcaaccagaatgaaccattgaggttcttttgaacaagtatgaattggttagaatggattgaagtgttttatgtaatttaaacctgattttaggctagttctaactcttttgaaaatgacatatctacttaaaattaattgaaaatggttagatttagccaaaaaagagggtcttcttttctgactaagtgaactactccgagccagtcagtaatcttttgtgtcagaaatgcatgtttcaagctgcccagaggctatttcagaattgttttaggtcttcagagccctgtccgatatgtccagagtcgggagaggagcttgagccagcatttactgagtacccagcatctgccaagcattgtcctgggcactccacaaacagtgtctcgttcaatccttagaacaatggggtgaagtagtgtacattatcttctttttcatagaatggaaacctgaaaatccaaggttgaaaaacatctgagtagccagtaggtgggagacgtggaatcagtctagctctgcttggcttcaggagtcacgtgtttcctgttaggctaccttgtatgataccaaacctgggcactttaaaaaatatatatttatctatttatttggctttgtcaggtcttaatcatggtaaagtaggatctttcattgcagcacacagattctctagttgtggcacgtgggctcagtagctccatggcatgtgggatcttagtttcctgtccaggaattggatccacatccccaacattgcaaggtagattcttaaccactgaactaccagggaagtcccccaaacctggtcgcttctaagtccaacatgcatttgtaaaaatctgagtaatggccacaaagcttggggtagaatagacattggacttgaagttaggagacatttgttctagactgtgcaaatgagttaaactctctggattctgttttattgtttagcaaacaacccaggaaatggaaggtctgaacatttattttcaggtaaacaaggcagataattatctaaaggtgtagtctaaagaatataaactatgattaataccaacagtgatgtttgtactgtcagttgcggtatttcgtttgttaatacttcttttatggtggtttggttttgaacagactgttatgtattgctgttaccatgaatagaaaacaaaatccatgaagaccatttatagacttaggtgtataattcttctcccacgataactaaacactttaaatttgggggctctaaagatacagtcatctgtctttgaattccatttaagtaggtttagagagttctagaagagtgtgccattgatgacaacattttctcctgtacctaaagtgatacaaaaacatatttatagaaatgaccaactttttttcaaaataaaaataaagaggaaacaaggtagccacagaaagttcttacatcactctccttgcagaatttggagttgctttctgctttctcatttatttggaggggaacccctctcccccagatggtttgatgttatctggacctacttttcaattcttatctcttatttatgaataacttggagccagtcagatgctgtgatgaaacatgctagtctttatttgtgcccaagtggtcatcttctggagaagtgttctgttgcataccatcaatactggcaacctgcacctgtgcgtacagaagctgtaaatggaaagccatcatctgcactgtgtcactctttacagtgtgcaaacagagtgctgaatgtttgtagaggctttgcccttagtgactgaccagccatatctgaatgtgaggtcatagctctgcactaaggcactctgcagaggtcactgcagcagcttcttgggaatcagaattcaggatttttgagcataaggtgagtcaccaaattgaggaagggctaggggaggcaaccttgaaaagtcagtgaatgtccttgcctgagcttttattaattttatgtatctataggaataatccaataggaagcattgagagttgtggttaagtttctggataggagctgaccgggtgaaaaggggacagtgagagggaaatcagcagaatttttttccctttattttggctacgctgagtctttattgcagtgtgtgggctcttcgttgccacatgtgggctttctctagttgtggctttgcaggggcttctctagttgcagcacatgggcttagttgcctggcagcatgtgggattttagttcccccaccagggatccaacctgcatcctctgcactgggaggtgatacttcaccacgggggaggtcccccaaaccagcagagtttaacggaggacttatgatgtgtatgtggataggtaaatgtgtatgttgatgggcagatagcattgtcagtgataacaggatgattggttttcggattttcaagaggatttgttggtattcgaaatgggaggataaaaagaagtaagcgttccctgaagatagactatgtgtccagtcagattaatatcttgaatagtttgaatctatttaaaggattaaaaataaaatttgaaaagtgctgattgcaaaagataaaaggtaaccatggttaggtcttgctatgaaaacaagagtatttattctcaaaggtagacttgttttggccagtgctgaagagctgaattggtagcatttcctatagactatcaaggcaaatgtaggtaaatgagcccttcataatggaactcagttctcaagtgagtagtgatattccagaaaaatctgatttaatatgtagtaggagaaggcaacggcaacccactccagtactcttgcctggaagatcctatggacggaggagcctgttgggctgcagtccatggggtcgctaagagtcagacactacagagcgacttcactttcacttttcactttcctgcattggagaaggaaatggcaacccactccagtgttcttgcctggagaatcccagggatgggggagcctggtggtcgcacagagtcggacacgactgaagcgacttagcagcagcagcagcagcagcagcagcaggtgacaataataacatgtgaggaagctgcaaaccaagttttattagcattatctttgaagaaactgtaatgacatgtgaaaatgcataggataaacgaaattgcctagatgtccaagagagaagccgaggatatagcactaggagactttgaaaaaggaggtacagttggaaccacttgcactctaagaattattattattcctgtaacattctctttggagaaagaaatggcaatttactccagtattcttgcctgggaaatcccatggacagaggagccttgcaagctatacagtccatggggtccaaaaagagtcagatacaacttaaggactaaacaacaacaaacattctctttcttcccttgttctgttaacttttattatacacaatctttgtgtaagatagtgaccattatcttcttgattttcattctcagttggaatttttgttttaagggtactataacagcacagcacagttcagtagcatatctagcgaatgattaagtctttgggacagtgaataatgtctaaccgtttcttcacagaacccttaggcatataggtgttatgtaggagtatttgttgaactggatattaaaagaagtcactttattagcagaggattctaatattttctaatgagtttttggtaaatatgcatttgtttgtatttttcaggtgacccactgagttcttcattatgtctgatggagactacgattacctcatcaagtttttagctctgggagactcgggagtagggaagaccagtgtgctttatcagtacacagatggtaaatttaactccaaattcatcacaacagtcggcattgatttcagggaaaagagagtggtaagttctgcatccttccatataaaaatgtaatctctgagtcaacctttgcctgtctgttttatttacttcataggaattaggaggacaaaggttggaatctaaaattaaagggtgcatatgaaagtgtattatgttcagtctgagcaatgtgattaaaggctgtaactgaggacacttcacataaaaccaagcaggtaaaataaagtaaaagtgaagattttttaaaaatttccttgatatacttctggctggtatcttccttctgaattctgaaaagtgatttgtctacctttattatgaagcttgcaaaccaccctgcttttctcttaattaaggcctcagcagccccattcactaggtggcggaactcattgaccccaccaggagtgtgaggttgaagaacgggtgggaatgactgtgcatatggatccaggaagtaaccaaaagaacagtagggttctgcagaacaagagaagaggttctttttaacaatcgtatttattttttttgaaggactgcaagacaagttattctcggggtagagaggaagtcaggaggttggtgtgtccaggaactacattttttactaaaaaagcaaccattcccataaagcaggtcaccaaatagtcaggaagactaaggacaaagaccctttggtggagcgtattctacttgggaaatatgcaagtttctggcttcgaggacagaagaattcattctttctgatccactctaagtcttttattctactaccagaagccttttcttctactaccactgttttgttttgttttaaaattatttttaaattaaggtatagtttatatacagtattgtgtaagtttcaggtgtaccatatggtgatttacaatttttaaaggttatattctatttatagttattataaagtattggctatattctctgtgttgtacagtatatccttgtagctcattttatacctttgtctttttcatgattattttgggatgcttgcaatttcaaatgaattttagggtcatcttattaatctctacaaagaaatcagctgaaattctgacagggatcgcactgaatctgtagaacagtttggggagtgcacgcgtgctcagttgtgtcagactctttgtggccccatggcctgtatagtccaccaggttcctctgtccatggaattttccaggcacgagtactggagtgggttgccatttcctactccaagggatcttcctgacccagggattgaacccacatctcctgcattggcaggcagattctttaccactgtgccacctcggaagcattcacatcttaacaatattaagtcttctgatttgtgaacatggaattttttgccatttagatcttctttaatttctttcaacaatattttgtagctttcagaatatattttatactttttaaattaaatttattcctaaatatcttaattttttatgctattgtaaattgttttcttaattttatttttgaattattctttgccagtgtatagaaatacaacttattttgtaagctgagcttgtatactggaacagtactgaacttgtttattgtttctgatataacctgcatgtgtgctggtggagggggtgtctgtatctgtgtgtgtatctgtgtgtgtttattccttaggatttccaatatataagatcctcctatcttctgttatacttcttcttttccaagttggatatgctttctttttttttttcctatttgccctaatgagtgcctccagtaaaatgctgagtagaaatgttgtaggagaacatctttgtcatgtctttgattttaaggagaaaacattcagttgccataaagtataatagaagctgtgtgtttttcatagatggtgttcttcagatccaggatgttatcttctattcctaattgttgagcatttttattatgaaaggtgttggattttttcaggtgctttttctgtgtctgttgagatgattgtgtggttttagtcctttattctagaactgttctgttccattataaatcgatattgattggtttttgtatgttaacccaaccttgttcttacgataaattccactcagtcatggtatataatcctttttatatgttgttggattctgtttgctagtattttggtgtctgtattcaaaatggatattggtctatcctttttccccctcatagctttgttttcggtatcaggataataaagccctcatagaatgaagtgggaaatatttccttcttttctgtattttgaaagagtttgggaaggatggctgttaattctaaacatctgataaaattcactagtgaagacatttgggcctggtcttttctttgtgggaagttacttttattatgaattcagtcttcttactggctatatgtctctttagattttctgttttttcttgagttagtttcaattgtttgtgcctaaaaatttctccatttcttctaagctatccaattttttggaatatggttgttcatactattcctttataatctttttatatatttaaagttggtagtgttgtcctttcatttctgattttaggaatttgaatctcctatttttattcttagtctaactaaaggtttatcaattttcttgagcttttcaaagaaaagataatttatttctactctaatctttattattctttccttctgtttgctttggatttagtttacttttatttttctagttttttaaggttgaagtttaagttattgatttgagatctttcttgttttttaatataggtgtttactgctatacatttacctctgagcactactttagcagtgaagctactttttgtatgttgtgcttttcattcatctaaaaatgcgttctagtttccattatgtttcttctttgacccattggctgtttaagactgtattgtttaatttctacatacttatgaattccccaaattcctttctgtaaatgatttctaatctttttttaaaaccacattatggttagaaaatgtattttgtataactttagtctcttaaacttgtcaagacttgtttgatgacctaacataaggtctgtccttgagaatgtttcatatggaatcgcatgaggtggccaaagtactggagtttcaactttagcatcattccttccaaagaaatcccagggctgacctccttcagaatggactggttggatctccctgcagtccaagggactctcaagagtcttctccaacaccacagttcaaaagcatcaattcttcagcgctcagccttcttcacagtccaactctcacatccatacatggccactggaaaaaccatagccttgactagatggaccttagttggcaaagtaatgtctctgcttttgaatatgctatctacgttggtcataacttttcttccaaggaggaagcgtcttttaatttcatggctgcaattcatggggtcgcaaagagttggacacgactgagcgactgaactgaactgaactgagaagaacgtgtgttttgcagttgttgggtgaggtcttgtataggtgtctatgttatgtctagttgacttagagtgttctgcagctcttctgtttccttgttcatctgcttgcttgttttatccattatcaaaagagtgttgaagtttctaaatattgtcaaattgtttatttctctctttttatctgtatgtattcttaaaggtaactacctgacccttttatcattataaaatatccttttttgtctctttttgtcttcaagtctattttgtctcatattagtataactcaagctctcttttggttattgtttgcatggcattgtatttttttcattcttttcctaacaacctttttgtgtctttgaatctaaagtatgtcttttgtagatagcatatagttggatcacatctttaaatctagtctgctaacccttgcctttcagttggaatcttcaatccatttacagtcaatataattactaaaaaaggaggatttatgtctgccattttgctacttattttctatatgtcttatctttttttgttgttgttctgttacttctttgcaccctctttattttgtgtttggtatagacaaatagacattttctagtataccatttaaattcccttctcactttttattttttgaattgttttcttaatagttcccctgaggattaaaattgttatcttaatttttaacagtctagtttggattaatacctacttaatttcaatgccatactctgctcttacatgggtccatatcttgcccattccttttcactgttattgtcatacaaattgcatacatattgcatctttatgtaatgtgtacctatctacacgagtttataattattgctttatgaaattgtgttttagtcagatgcaggaaagagttatgaaaaaccatttatattgtcttttgtattgacccatgtagttacctttactggtgctctttatttctttgtgtgaatttgaattactgcctagtgtcttttcatctcagcctgaagctcagtctttgttatttcttgcagggcagttctgctggcaatgaattttatgtttttgtttatcagagaatgttttaagttcccttttaattagaaggatagctttgctggaaataggattctcggtttgtagtctttttcctttcagtactttttattgtcctactgccttttggcccccatttttatttatttgtttcttaatgataaatcagttcttagtcttattgagatcccttatatgtattgaatcacttttctcttgatgctttaaaaattctgtcttttgatttttggcagtttggtgatatgtctagtcagtatcagaaagtttatccttcttgaagttcattgagtttcttgaatatgcacatgaatagttttcatcagattttggaagtttttggctattatttctagaagtagtttttctgcctctttctgtctctccctcccacccccaccaaataatatattacttgtacattttaaaatatatttataaagatatataatgtgcttacacattataatgaagagccaactcaatgaaaaagaccctgattctgtgaaagattgagagcaggggagaaagaggcaacagaggatgagatgattggatggcatcatcaattcaacagacatgagtttgagcaaactctaggagatagtgaaggacagggaaccctggcatgctgtagtccatggggtcataaagagtcagacacagctgagtgactgaacaacaaaaatgtgcttacatcatttagtacaaattattgtgttatccagagacaattatttgaaataaaatataaataagattgtattccagatggaattttctttagaagtttaagtacttaggggagttattctgaatagctaagtgagaagagttcaccagcctcagaagttctcttttctctttcattttgccattttaggtgtacagagccaatgggccagatggagctgttggcagaggtcagagaatccacctgcagttatgggacacagctggacaagagaggtaggagatcttcagtcatgtgctctttgctgaaacaaaggggaaaaacaattgcactcttcacacagtgacctgatcaggaaaaggccaactgattcgttgatgtgcacctggataagccatgctgccaaattagcaggaaatttatcagtctgaaatgataatagtggctttatttcatacaaggtcaaagggaaaatgaatccttttaaaaatggatgcttttacttatggacttctttctttttctacccctttttaaaaacctgtatacttgtctccatttacttttgtttactcaaccatagagaaagtagagttgcatgcattttccttacttgattattggaacctagcataaaaatcttgttggaattaacttatatgatcagaggttgcttgacaaaaatgtcaaatgaaatcttcatataaagttactttttttgattgaaatatagttgatttacagtgttgtgttaatttctgctatacagtaaagtgatacagttatacaaatatatacattcttttttatattattttccattatggtttatcacagggtattgagtatagttccctgcactatacaatagaaccttgttgattatccattgtctgtataatagtttggatctgctagtcccaaactcccaatccatccctcccccacctacccctcccttggctaccacaggtctgtttaagttgctttcagttagctacagctgtgttatctctcacactttctttaagggattttatttgtttgtttaactttttcttatggaaaactccaagtatatacagaagtagagaggcgagtacagtgaaatcaggtactgacttgccaatttcaaccaacgtcaggttgtggcccatcttacttcgtgtatatccttcacctcttctcactacccccgccccacaattattttgaagcaaattccaaatatcgaactatttcttttgtaactattttggtccatatctctgaaagatgagtagtctttgtgtaaaacatggattagaaatacttgagaacacttaaaatagctaattaaaggacaaattcttaaccagtattttcttctctggagcccatgcctgtcagttgcaggctttgcataaaggcaaaatgagagaaaacctactacgagagagagagaggcacagagatggcaggataaacccttggtgcatgcatgcacgtgtgtgctcagttgtgtccaactctttgtgaccccatggatattggagccggttaccgtttcctaagtcagaggatctttcccacccagggatcgaacctgcgtcttttgcatcttctgcattggcaggcagattctttaccactgggccacgtgggaagcccaaatccttggtggagagggtacaaagaaaggggaaattgaatctgattaccatcaccctaaagccaaagaatggttctcagagataagtgatttctgtagagactgaaattaaaaggtcatgtgtggaacacatcgtgatgttaaatcaagtcaggctttcacaggacagggaagacacatacacagcaagtaccattgctttgggcctatttaacttttaattgtacaataaattcttgactgagacaaagagatcatgagctagttcttgccatccctgtccagaaggctggtttttcaaatcacgtggcttattaacacataaacttctaccagttagataaataacttattatacacatttggaatatcatcatctaatttgttaaattaaaaaaattgtttttattttaaaagaaaattgcaataactgttggcattttagaaagtctgtgtatgttttcaaatattttttcttgttctaaatacctatttactatatttttaagatactcaatgtcattgattatagtacctaattttacactgttgaaactatctattatataatagcataattcagtaaaccttgtgcaagtaaggtctgtgcatagtgtgcatgtatagtacgaagttagtagaaacagtggcatgttgtttaacatctgacttgttattgatgaactgttgtaaaaggcttgaggggactgctggtggctttatgtttcaaagagtagggatgtggtttaggtgaccaatctgcttttatgttccaggtttcgtagcttgacaactgccttcttcagagatgctatgggctttcttctgctttttgatctgacaaatgagcagagttttctcaatgtcagaaactggataagtaagtagtattgtctccctgctgtttcttcccactccctgaaacagaatctctcttatattctacttcttttgtaagttgttttgtaagagctcctaatgctgtttaaaatgctatttaaaggagcacggctcttagttcaggagcaaaggtaactgaagtcctctgctttccctggtcatgctaacctccatttgttgagtgcatcttgcactctagatccatggagtgttttctgtgtaatctcttcaccagtctttcccacaaggaggactcttatccccattttatagatgaggagatagaagcctagagaagtgctatcgagtctgataccatcccagggttcaaaacatgtagtacattgacccttttgaaaaattaatgaatcctaaccctgtctagtactcttgcctggaaaatcccatggatggaggagcctggaaggctgcagtccacggggttgctgagggttggacacggcagagcgacttcactttcactttttactttcatgcattggagaaggaaatggcaacccactccaatgttcttgcctggagaatcccagggacagaggagcctggtgggctgccatctatggggttgcacagaatcggacatgactgaagcgatttagcagcagcagcagcaaccctgtctcaaggtctcttctgtatttaaagggccagagcacttgccaggaggatcttgtcatagaaacctctagaacttggccagagtggtccccagcacagtatacatgaacctgcattttggctctttggagacagcctgatagcttacaatagtggttagtagtcatttagaatcctactacttggccaaatgtacattttcctctgttggttgtattggtggaatcatagagaacctactagagaggcctgtgatattaaattcctaacagccaaatctttagaatgaacttatttataaacccctactacataacaacttcttatagtttcagtattatgaaagggtaatgggctgtaatttttatagtagaaaaccttgtttttaaaaatgagtttttaaataagtcattaatgaatgtcttgtggttttcaaagcattttcacattgtttgtgtccagtccccatgttccccccatgaggagatccagggaggtggtgtatcctcattttaggataaagatgcttagtcttatggaataataggcttgcccaaggacatggagcttttggcttttgattcagtggcctttttggggatggggggattcagtggctttttatgctctttctcaactaagttaatcactaagaattgaagagctatttaataccttaaatacaggttccccaggtcagtcatgcttcggcttcacgttgttaagtgcctgtctgagtcacacacccttttggctgaatggcagtgactgtttctaatcacttatcctcattccctgctcatcatccttcattcaaaccagttctggggctttcttaagcactttctaaggattgttgttagaaatgggctcatagaatcttagcacagcatggtgggaagagcatcaacccgcctgtttttcactgggagaaaccaaaactctggacaaggtaaatctcgtccattgggcttcatggctagttacgtgcaggataaaatcatgtgaaattctgtatattattttgtttttttcttatagtgtaaaagaattcttcttgctcagttaggcaaagaaaacatacatattggagatttcacatcttcagtataaagtgtgtattcactgtcagaaaaattcagtgtcagaggtagtaataacaaatcttaactaggaataaaaatttgtcaattatatatatattttatttttcctctgcctgttagtagtttgaatattaaggggatcattcttctttgggggatcgaattaaatatatattttatatttaatgtatattttaatatttaatgtatttttatgtttaatgtatttaatatatataaattatatatatatacacacacacaagcatatatatatgtgtacacatatatacatataccaatggtggatagcagagcagaggcagtattgcattgaacaggtaactgagtcctgggtgctgaaggcagaaaccaggtctgcactctccctttgcttctccagagatgcactgcagtcctttctcccttgaactcagatctctcctgtcctcatgggaaacgggtaagagttccaagttgatccctgctgagcttaggagactgaacagagatctgtgtcctctgggccggaatttgaaatcaaagaggaattggatagtcttgtatcactcacctgtttttctggagcttgaggatgaaccagttgtacctatgggcagcatgttttatagggaaactccaaagtaggctatatttctaaattgttcttctgtagcctcacataagtgggtcaagagcccaacaagtatattttttaacatatttttgcctttatatttttattcctattattccctctgtctgaaaagccctctccatactcactcccattgtcttaaaaatttagagttcaatttactctttaaaatctgacaaaatatggcccccatgaaattttctgtgataactttgttgaattaaattttttctctcctcttttaaaaaaattatattaaaatatagctgatttacaatgttgtattagtttcaagtgtacagcaaaataaatcagttatacatgtatccattctttattttttaaagatctttctccctataggccattacagaatattgaggtgagttccctgtgctatacagcagactcttattatctattttatatatcctgtgctgtgcttagtcgctcagtcatgttcgactctttgcaactccatggactgcaggaggggttcctttgtccatggggattctccaggcaagaatactggagtggattgccatgccctcttccaggggaatcttcccaacccagggattaaacccaggtctccacattgcaggcagattctttaccatctgagccagtggggtgtggatgtcagttttattcctctcaaatggagttaagtttcctattatgttttatactgcttacacatgatccttatcacataccgtatcaagttgtagttatttatgtgcttttttttctttggtgagatattttaaaagaattcataaatttattttttatataaataattcacaacctttgtagaaaagttaggaaaaaagaaaaatgatcaattatcatacttcccagactctacaaaataaatactattaaacattattactggtaatacacaatatctctaaatgctttattgcattaaaagaatgattttcaagtgtgagcatgcatctagatccccccagagaacttgttaaaacagattccagacttcaaacccagccttcctccttcagtagatatggggtggtacctgagaatttgcatttctagcaagttcctaggtgatggttgttaggctgctggtccatggaccttacctcaagactcactgaattaactcacttaacctttaccttacccctatgaagtaaatactgtcattgtcttcctttaaagagggggaaactgaggcacagagtggccatgtaacttcctcaaggccacacagctagtaaatggcacagccaggattcagccttaaacaccctcggtcccaagttcatttcataaccttgacactgaacagataaggtgttaacagagcactgagcctctctggagaccagaaaggttcctcagtagaagtgactgagaggcaagttgtaacagaagtaggggatgtccctgaaggaaggctgtgtttggttattcagagtctagggacagaatgcataacagcctggagacagaaaggatgtggctgttggaaatggtacagtttggtcttgcctgtataggtcctgttcccctcttccgtcccgtgagggcaaaggtcagtgccctgaaattctgcaccaagtatcaggcctccgttattgctcagtaaatactaactgacttgactttctcatgataagatataatgaacatgacttgataatgaggaactaatggttaaccatgataaaaaataaattaggccatacatttttgaggatgtcttattgtgcaagtttgggtaactttaatttcactgtgaggcatgatgagtatgaaataagacttattttccttatttgggagattaaactctttagttgaagttcctttgcttttgttactgttaatatgcctactaacagattttcatgtgaaaagaaatagaagctatagagtgagaattgtagtctcttgcttcttgggtctggtgacagaatcattgactatatattctgggttttctgtcttcatttgatcctaaattttatttgttttagataaattgattctgccttaggataatagaaaaatgtgaaaaatctttcagatagaaataggtttatagaaagacaattcattttaaaaacgccactgctgtggagagaaaatatatgaaaaacagagctttaaggttagtcatgagcactaggaaatcctccaagtgtggttttttcttttcaaatgatcttcataaggaaaacagctatgtggtatatgtgtatgtgtgggtacgtaagttttggatggataacaaattctctcattcctctctaatataaataagctggagtatgtgcataaggacaggattagttttacatctctgccccatccatttagttttatagcttggggtattggtgttttgaaagcattatagagaattttgcagttcttatatctgtatatccatttacagttttaaagcagttttgtatatattctccactgatcatagacttatattacttaactgtaacaaattttcttatcttcttctactaataggtcagctgcaaatgcatgcttattgtgaaaacccagatatagtattatgtggaaataagagtgatctggaagaccaaagagtagtaaaagaagaagaagccagaggacttgcagagaaatacgggtgagtattttgggggaggagtctacagcacaaatttccgatgcaagcattggcacgtgaacgggtaacaaaaagggcaaaagcaaaaaactgagagggatgtaggccttgggagaaggtgtcaaacacctcctttgcatattagtattacatgatttgagaaccatagaaaaagccattggtgaggtccttccttcagtgctttagtaccattttctcagtctcttggtgtttgaagaaagacagcttcagggacaaacaccctaactgtgtaaggcctcctttccaagatgcaggtacgagatgcccaggataaggaaattctgtatatttattcagtgaggaaaattcagagccagtccatattctgctttggcgagttctaggatacaagaaggccttcttggccttgaaatacctatgctggtggaggagtgtgaagatctcctttggtttaagctgtgttttgttgtgtgcttagtcacttcagtcgtttctcccatggactgaagccctccaggctcctctctctgtgggattctctggagcaaggatactggattgagtggccatgccctcctccagggaatcttcctgacccagggattgaacccgtgtctcctgtactgcagggattctttaccactgagccactgaggaagccccatttttgtggtggagagtcagctaaatactgtcttcctccttgagctcagggggtaggatcatagtagcagcagcattaacggacatgaaagaaggggtcagccactgctcaataaagtactacaaagcaatttgtgctgtactttcttcctccaatataatgagaatgcaaatacgcatgtaataattactcttattattagtgggagacagcaagtagggtagagaaggaaggggagggagggagaaagagaaaggaagagagaagggtgctgtgggtggcgtactgtgtgtagagggtgttactgcctagtggcctctgttgtgagacaaatccaaggaagctataggagggactttgcctttttatcatgtgaaccctgcctttttcttttttgggctgatggagttcagaaagcactcaaggatggggttcacactggagagggagtggaatcataggttgactgggcaggaaggaaccaagagtctggagagatttgaatactagggaagaagagtagacttgatctgcgggggctcaggaagttgctgaagacctttgaacatggagtgctgctatgtctacttccccaggtcagactggggtgacggggaggatggagtggagagctcctgggcagtccctgtgaagggctgctgtgtgtctgatgctgaggcccttaggatgggcagtcagaggggtaggtggatttgaagtgagggagagccagaaccagctgggaccatgaccatggcctgaagctgtgtcagtccctgttgcttctgacctggttggtatgggtggccaacagaagccaatgctctttgcacagagctaaacacaaacacatctggcccaggagctggagaagctaaaggaggatctaggggaaggtggaaaaggagacaggtctggttgctggtttgtgccaatgaggtgagccagcggataagcgacaaaatttgagagccgcagaatggctgctgcctcacttccaccctgcatatctcccgtgcatctctctgcggtccaccttaactgcaaagggagttctgggaagtgttcaatttagacaagctgacaggtcataaagctaccacagatagagagtggggctgggcattgatgtcttttagaagctttccatgtgatttttttttttttaaagcaacagtcccactgacatttatttatttatttttaattaatttaaattttgactgcactgtgtcttcattgcagcatgtgggcttcctctagttgcagcaaggaggagctactctctagttgcggtgcacagccttctcattatggtgtcctctcttgttggggagcacaggctctaggttcacggtcccagtagttgtggcccttgggcttagttgccctgtggcatgtgctatcttcttagaccagggattgaacccacacccctttcattggcaggtgaattcttaaccattggaccaccaggaaagtccctccatatgatttttgaagcagaacttgagaacctctgactgaggtgattctgaccaagctctgagggcgagtctgatcacctgatatgcccacttctatcttgatagtcactgttgtaaagcagtggaaggaaagagggatcagataccatggtggattctgaagtgttgaagctgggggctgtgttgcaatggggtggggaggaagtaagtgatgaagcaatggaagctgtggatctagctagaccaggcttttgagaagtgtatttgcaaagacaagaaaaaaaaataataaaatagggcagctaggaaagttagctagacccaacaattatactgtcaagtgttgtgggggggtctggattgactcattccctccctgggctttacctgccctttgcttgtttcctctgtgcccatcctcaggattccacatcctgcccagtattggagagcctgccattaccttctgactatatggaaactcgggtacaaaaggggccttctttcctcagtgctcagctcagatctgggcagtatttcataagagaggatcagtgtaaagtttctgaactcggttaaaatgagcagaggagagattagcagataagatagtggagggtgttgaagatgggaagggatggaaacagacttcccttaggatttaaggagcataaaatagagttctgtaggctgttgggagtttcagaggaagatgtggaagagaaatttggttcacatggattggacagatttgacatttaagtttaatgataattttcacagaaatttttttttcatttttaataattgtaatattttcattgattgcacatgcactaaaagactatgctggttaatccatctatgtgctaacaatcagaaaacagtagtttatgggatatcttcatatcatttgtacgttatctgataaatttgtggtttttgttactgttgcattaccgtctatcttcagttcataagaatgggtcattggttcacaagtggctctctgaaatatacgtgtatttaagaatgaaagactatgactcagaaaaactttgcaaacctaataagaacatgctgcagtgcaaataagaaatataaatgtgtgtctgctgggacaagtaaatttgagaatgaggacttcatgcagcagcccaaaatagaaagggtgaattggatgcatgatgatgaatatttgaaaatttatttttagtagactaagaatccttttacccctaatcccctcccccctttttttgctacagcatttgtttaaattgtaacatgaagctcttaggtcactttctaatacaacaaagcaatgtggcccataaaccagcttttttagaacaactacaaaataatgctttccaatattgaataatattaacaatgaaatcggagaagagagcaaaacagagggttattcagatttgtacttctgccagtcaaaaccatgatattcactttgttgctgaaacacttttaaaaatatctgcaaagtcagtgacaaatatgttagaagaaaaagcagaaagcatattggcaacattcctcttttagatggtactgttagatctcagacttaagtgtgccccagcatcacctgaactctgggtcccactgagtctctcatttagtgggactgggatgaagccccacattttacatttctagctgactcctagatgttgccgccaccagtgactgaggatagcactttgagaagcactcgtgtaggtgtcacgttaccatgatctctgcatgctggcagatgtcttccttgcccacagaactggacaaaatgatggtgcaacagaatatgaagcaggtgtctacttgtgccacatttggggagggacatgtgctcaccgactaatcactggaaaatccatgctaagtccagcagtattttttctcttacacagttaatgatatcagctgtgctatagatggggcaaggacagggattgttaccaagagagcacgagccataagcttatagaaaaagacttcattgtaagtgaaaatggttgcatctaagtgtccttctatcctctttactcacagaaggtagttgttggtcagtataagccttttgttcttgattcagggttaagggaaatagaggacataatgaatatgatgaaagtatggtaattgaatgtatgtatatcacatgtgctgtgcaaagaaatcagcagtaaattttcacagaatgagataaaactatcatattacattgtattagttttaggtatatgacttaatggtttgatttaagtatatgttgtgaaatgatcaccacaataagtttagttaacatccattaccggcataattacagtttgtttgttttttcttttttgctgaacctcaaggcatttgggatcttagtttccagaggaggggtggaaactggacaccctgctgtggaagcatgaagtcttaagcacagtactgccagggaagtcccctgtagttaaaaaaaaaattttttttcttgtgatgatgaggacttttaggattgattcttagggacagcaaagagaagacaactccgccccacccccaccccccaactggagactactagctaatgatgagaaaggtgctcaagagtttctggaatggaggatgtgttaaaaacttttatttattaataatatgagtacagaccgttttggggattcccagtggtttagctcagcatgcggcactctatttcatctagtctgaactaggtgaaatgtatgaatagcttgatctctggtactttgattctttgaaaacttgatgatatcttctctttattcaagaaataaataatgacttatcattgggcacattttaaaaccacacacataagctgcaactaaaaagacaaaactgatttccagggccccacagagctcagaagatgatctggctttcatttgccgctttcaccctttcctctaaaggcttgttcactcagcagccagcaggctataaaaagtagcgagacttgctttttagtttagtgaaaaattcctccatcatttgtggatacacatgtgaaccaaatatctaaaaccgttgcgcagaatcaccaaatacccttgcttttcattcctgggaacctctaagtgggatctgggatattctcgttttgtagaaataagagaagagagaacacctaaaaattggatcctaaactatgacatgagctggatataggtatctcggtgaaaaactgcaaatgatcatgttcccctcatttccttaaatttaaaaatttgtgatgtatcagtttattaaaagcacatcaaaactggagttctgcaggtgttccaaaatccatttagtgcacatttatggattggtatcggttagctgcacaggattttttctgaaggttgatgaactgcttcctagctgttctgcaccagcaccatcatgtggcgagaaggaacaatacaccggctctatgcttgaaagtggggcagttgatccacttgaatttaagctaagattactaaaattttgcctggaaagttttaggaaaagcagaacattatgtttagagaagaagagaatcccactgggtgaacattgattgagcacttgccggacgctaggcttgtgttaagccctttacctgtattatcttattgcttctttatgaagacaccacgaagcactgttaaacctctttacagatacagagaactgttcagataaagtagcccaagtaccttctaaaagtgaacatcaagaagatatgggcataaaaatatgtctgactcttatactagaatttctatgctgttaggacaagctgagcagtccaattttcaaatgtgagcacagggcatcattgtttgtttgtttggtcacaccacatagcttgagggattttagttccctgatcagggattgaactcatgccctcatcagtgaaagcttagagtcctaaccactggactgccagggaattcccagagacatcattttatgatggaaagaaagttttaattcaggatctttgctgtccttctcatttagtttactttttgtctggcagctcaaagagctgagggtggcaaggagtaaactctagcattcatttattcctataataataaaaaccatattacctcagttgcttagaagactctgaataattagtctgaagattttaagattgttaacctgactcctggtcacatcacctggaggttcacaaatggtcagaaaatacacttttaatttttagtttgttagtagaatttgggattaaaactctatatcttcttaatattgtacctcttttaatatgagtgacttcaaaatgtatgctttcactcagataccctgaaattctatcaagtaagtatttacttaagttagtaaacattagagaatagctcatagttctgctagaagtgtcagtcatttgttgttcagttgtgtctgactctttgtgaccccatgaactgcagcatgttttgtttgtttgaaactgtgtttgaaatagaaaatgtttattaatgacacatttgtcagaaatgacacatttcttatatgtcagactccagtctaagtcctttagatgttaactcaattaatccttaataggaagatagagatattttctggttttatagataaagcaactgaggcacagatatttatactctgccagtgctacacagttagcatgaagttgtaataggacttgaatccaggcaacctggctccagaagttatggctgttaaccattgtccagactgtctttaagtgtctgactctttgcgaccccatgtacaaatggggtcccctttatttagcccactgggcacttctgtgcatggaattctccaggcaagaatactggagtgggtggtggtgttcagttgctaagtcacgtctgactttttgtgaccccatgaactgtagcatgccagtcttccgtgtccttcactatctcccagagtttgccaaaattcttgtccattgagtcagtgatgccctccaaccatctcatcctctgttgtccccttctcctcttggtctcaatctttcccagcatcagtcttttccggtgagtcagctctttgcatcaggtggccaaagtattgtagtttcagcttcagcaccaatccttccaatgaatattcagggttgatttcctttaggattgactggtttaatctccttgctgtccaggggactctcaagagtcttctccagcaccacagttcaaaagcatcaatattttggtgctcagccctttttagggtccaaccttcacatccatacatgactactggaaaaaccgtagttttaactgggtagccattcccttctccagggtatcttcctgacccagggatcaaaccctggtctcctgcattgcaggcagattctttaccatctgagccgccggggaaaccctcatgtataggttttatcatttttagactatttataattttttcatttatacctttaaatgattatgggatatgaggagctgagatggaagaaactatgaaaagtagaaatagcataatggagagagatcctgttagggaattcagtgaggctgaggactctatagttggaaagatatttatgatggactttgaggaaatgttaaaaatgagatgtgaaccattgtaaccagagtttacaaggaagttttctgctcaactacttttttatttttgtatttccaattttaacccagtattctcatagggaaagatgaatttttcagttgctttttcatgaaacaatagctttctgaatggtgatagaatgatcaagccttctccttaagtataagcaatattcttagacattaaatgattgtccttgggagtaactgagaaagagcacgatggagaaaatctaagtatttaaattttgagaattcttaatctaaaattcagttcatataaaaatagcagcatcaaaaagtgtccctgggacttaataacatagatagttgataaataagtattttttgagtttccacaaagaatatcttcttcaaacttggtagagaaatactacatgtgaccagggggatgggaaaaatgcatttccttcattttgtagataaggcaccagatgaagatgtagaaaaaaaaaaaaaaagactgaaagtaaccaaagagataggcaggcaagaggtttaaaaatcactaagatgatgtaatttggccagtgagaccttctctgattaagatattttactttattttttaaaagatttatttatttatggctgtgctaggcctttctccagatgcgccgattgggggctactctcagttgtggtgcacgggcttctcattgtggtggcttctcttgttgagcacacaggctctagggcatcagggtttaagtagttgtggcacatgggcttagctgctccttggcatgtgggatcctcttggattaggaattgaacccttgtcccctgccttggcaggcagattcttagccactggaccaccagggaagcacctgattaaggtattttagagtcagcatatgaagggctgtgaacatgggcatggtagaatcagtgggacagctatgtccatcagacctcacagatagacggatagatgctcaaatgaagtgatggttcctcaagcagtttttatgagctacactccaacaggaaagaatatagagtccagttgcaaggcctgttatttcctgtaggaagcaagcagataataaggcagcatcttgaggaatcataatggacagataaccttccatgcctccacatgtacctctactgtgattcttaggaagcagaacagttctgaaaatatctgtcaaagcactaagaaggttaaaacaattctgttaaagctctcctgtggaagctgctcctagtcaggaagtaatgaaagaattaccagaattgtagtcagagtcactgatgtagtgttaacatgctatgagaacacaggaaaacaaagacattcttcaggaagagtaatagagatggatgttaaagtatctataaatgtaaggaatattttactgaattcaattgcaggactcctgaaggagctaaacaagtttattttgtagtttttatatctaagagtatttttggtcagactcctgactaagtggtgggaatgaagttaacagtttgaagaaaatataactatatcattattttcatgactttattaagaagggggaagaatttggcaggtaattgattaatccccttgcaaagacgaagtatgaagggtgaccaccgcaagaagactgatgatgtcttaagaacatgtgaacaataaccttatagttttgaagcgatgctttgtaagttactaaagaattatacctaaactcaggtcctgggataacaaaataaacatgcttaagattgttatgcttgaggaacccggaagtgctataaaattcagaatgtcttgtcttcaaaggtgtggtccaggaataccgcctggagctgacaagtggccaagcccttgacgaatatggccagggacctctgatgtctcatgttggcttgcattttttttcccccattgacagcaagtgagagttctctattttggagaacttcatacaacattatgtaaatttggaaccagtagagcctatggttgagttggttacacttgaacagctgtggattcaaatcctggttccactcctttctagcattatgaaattgggcccattacttcatcttactgaggtatagtttcatcatttgtgaaatggggataaaaacttccagaagttttacatctctgttaggaatgcagtgtcagttattattttacttttaatgtgctaaaatgcctttcttgtcttatatatttatattcttctgattttctaagttgaattatcaagggcaaagtgacctttcccatcacatgctgtaacccaagttgttgctgtctttcagagtcccctactttgaaactagtgctgccaatgggacaaacataaacgaggcaattgagatgctcctggacctgataatgaagcgaatggaacggtgtgtggacaagtcctggattcctgaaggcgtggtgcgctccaacggtcacacctctgcagatcagctgaatgaagaaaaggagaaggggtcatgtggctgttgagggggctagtgagctgaacagccattcgaggggttcatgtctgtgaccttccctatggtgatacatgactcagagagaggcaaacaggccttgcatacaaactgcttctcaccatcccaattaaacctatcagtgaagcatcccattttaaaattactttgctgcagctttgtaaatattctctaagattcagcctgagagttaggcaaaatatctcacatagccaaaagtgccttataaaacattagccccatggcagtagatcgtttaaggattcaggattttgtagccacagaacagcgcatttatgatgtagaatgactgaagttatcatccctgctttaccatagatagacccagagtctcacctttaagatattagatgtaatatcagtctttaatgcaaatttaagacccttcttgcaccacaggggactttctaaaatgtcatctaaacaatttaaatattaaataagaatatacacaaatgatggttcaat

SEQ ID NO: 89 - DNA, 63281 bp, Hippotragus equinus
  source 1..63281: mol_type = genomic DNA
ctgtctaccctgcgaggcggaggcgcagcccacgacctcaagagttttgtgttccgccagaccggttacctaccgtctgtctccccgcaattctcttaactttttagacactctcacttgccaaacctgaaaactgaaacccacacctccagctttgtggccaagattacaggcgagaaaagcacttcggaaactgtcaggggctgtaacgaatagcctctgcaaaagggcctctgcgcgtgagcctccccagtcccgggggcccaggaatcgctcgggtctccccccgagccgcgcgggcggggtgagcaggggtgtcagcccgcgaggcgcgggtctgggcgtttctgcagcggccggggaggagttccgccctcgcccccgtcccgccccgccgccgcctcgcgcccgcactcgcgctccacgagtctctccggcccggcccgcggcggcgcttcccgggttcgcagccagcaccgcgcggcgggcgggccgccaccatgcaggtcccgcacaaggagcacctgtacaagttactggtgatcggcgacctgggagtgggtaagaccagcatcatcaagcgctacgtgcaccagaacttctcctcgcactaccgggccaccatcggcgtggacttcgcgctcaaggtgctccactgggacccggagaccgtggtgcgcctgcagctctgggacatcgccggtgagccccggggccgggaactggggcgggggcacctagcagaccatctcctgtgccagggcagcggctcgcggccccgcggagacccgggtctgcctcccgggcgctgagccgcgagagactttccggggtggactgcaaacttggtttcaaaggaaacaaaaaaagtttctccctagcgcgcggcaacttcacgtgcgtcccctggagctttgcggcggctgctttctctccctcccacagcctcccctgggatctctgggctcagcgcgggcctccccgggatccagagggagaccctccggaattgcactcggttcttgatccccagctcactttccaggcaccggcagtccttcgggtgacggcgcccggagcgtcccgcccgccctttccagcccggtgccgccgggaccgccgaggggaagcccctagaccgggtcacagcgggaacccggagagttccgaactagaggcgttgcccaattcctgttcctaactgctccctttatttcaactttcgacacccgtttttctaccattcagtcaagaaagctggaggttctctgctttgagaaaacctttctgtgtctgctttgggggtaaatctatcactgtttctgtttgtccttctgtctctctcgtctatgaaaaggagattgagtatatatattcctgttagggtcacttttgtctaagggtctattctttgcgaccccatggactctgggctcttctgtccatggaattctccaggcaagaatacaggggcgggtaatcattcccttctccaagggatcttcccaacacagtgatggaagccaggtctcttgcgttgcaggctgatttcttaccgtgtgagccaccggggcaacccctttctatgacatttgccacagatttcttgatttgtccctaaagttttcactgagaggtctggaaaatgaggagcctcttacaatgtttgaaatcagaatttgattcccagggtttgtaccaggagttggggcttcagtctaaggtggaggtgcaaagagaccctggacccagactgtcggggtgtcccacccctccctgctgatcccggagctcaccatcctgctccccacaaaccccttcagctcagccgcttcccggttaagttggaagtcagtcagacaatgacaacttggggacccttctgctaagaaattttcaggtcccctgggattccttgtgaaccccttcacacaatcagtccacttcacctgggtctatttcatagtctgtggcactaggaacctttacaagtgttggacccaaaccagccacttctctttcagaaagtaggttcattttagcaggtgcatttgactggaaactttatcatggcttgaagtgagaacatatgtgggaagttttccaaagggcatttctcattctggggagtccagtgcctctttactcgcgagctgccaggtcttatgataaaacttggcatgtgaacaggttcatgcctttagtgtcatcgttaactgctctagtagtacaaggattagcggagaccagaagatgtcggtggccactgtctgattgggctctatatctagaaagtcctctgtgagtctgggcactttgctgctgctgtttttagtgtctaacacctctgatgttgcatcaacatctctaggacccaggtgtagaattagcttactctttgaacaggggtgtagctgtaatttagttttttatgtgaaaatcaaatgaggatgtgacctcagacatgttacataaattagtctgtgagtctcagtgtcctaagtatactagggtttagagacgaagaacctaaatcccactcgaaatgcttccatcagaatccctgtttcacctcatatttcttcggcaattttaagtaagtttccttacttcctagtctccgttccttatctgtaaatagaatgctttctcccaacaaaggagaaaacgagaggaaaaccgacaaatgctagctgaactcattagtacttactccctaggagaactgcaggaattgttgctatactagctttgtttgctatttgtatttttgaatatgtgtaaatgctaggcaagaaggacatgatataagtgtgctaattagatcttattaaatgataattcctgatgaacgaatataacctgttctaaaacacccagcaccattttccagctttctccatattacaacatgctgtcttgagcaatttcattcccaagcttagaaatacctccttcagttctgaagttgccgtggaggctatagtcacagaagtctgtgtatataagaaatccaaggagccttggaaagtcagttctatagatatggtggtgtataccatctctgtagggaagtttatttttcccagagctttgatgttcagtgctaacctgtcatttcagcctccagaccaaagagccctgcgggctgggtttgaagttcttggtggtgctggtgtagtcagtcagttgtgtctgactctttgcaacgccatggattgtagcccaccaggcttatctgtccaggggatttcccaggcaagaatgctggagtaggtagccatttccttctgcatgggatcttcctgacccaaggatcaaactggggccccctacactgcaggcagactctttaaccaactgagctacccagaaagccagcttagaagttgggcagcaggcaaagctggttggggtggggtggagctgggccattgtggggaaggatgattggagtgtagaatggacatgtttccagctccatagctagttctgtgaagagtaagtgcatatggaacccaacctcagcagcccagtcagaccccagttagaccccctcagctaagtgtatcttagagcatctttagatctgcctgtcggtccaaccttggggaatgcttcctgtctcctcgctgcttacttctggcgtatgtcttacaggcccgggtagtgacactcattttgagcttgctacgggtgttgatgaagtagaggaaacttgccctgtcctgagatatcacatccatctgctatcaagggaatcttttgctcaattagagttttaatatccatttggttcagggccaagttgggtcctatttgttcaactaattcctgtgatctttgtcttgtggtcacttagactggccagtctgcttctgaaaaaagactgcagaaagtaccttttaggaacttgtgaagcagaccttgaaatcactgagatgaatcccacaaaccccatagaagactctgaatcccagtgattccaccatagaggagcatctgagttagctttggatttggaaactcttgatagagtcagagaaattaagtaattttgcccaaggccacccagctagtaagtggaagagctgaatttgactcaggtctgtttgatttggaatcaagccatgctctttataaccatagccctgtgagggcctggtgtacagctgacccactggggttatacacaattcctctttaagggcactgcttatttagtggatagattatcgtcgccttctttcccttattgctaatatgtttttggatggtaccacagtgcagagagtggaaagaaaaggaacagaaatatatttctgggcttccctgatggctcaatggtaaagaatcagcctgcaatcctcgcgagacatggattcgatccctgatctgagaagattccacatgctgtggggctcaagcctgagtgctcgactattgagcctgtgctttggagcccagagccatagctgctgagccctcgtgctccagatactgaagcccacgcgccctggagcccaggctctgcaacaagagaaggcgccacagtgagaagccctcacaccgcaactagagaggagcccccgctcattaaagccagcgagaagcctgagcagaaaccaagacagagcacagtcataaatacataaataaatacaaattaaaaaaaaaaaacactcaaagtttccacccagttacaaaaacactagtttcaaaaaataaaaagaaagaaaatcttatttctgaaaatttgattcttagttatagggttttttcattttatagaataatcaaaaaaaaaaagaaaaagttcaccgttgagacactcttttactactcctctccgaatcctgatgctttgactattccattaagtaacttgcacaagtcacaaagctagtaagcaaagttggaataagctgctcagtactaacggcacagagggaccacgttagagcagacggaggctgcaagaggtaccatcgtatgaacatgtgacatcgcagggaaagaaaatgatcgccatttgaaagatgggcagctgagatccagcaaagtttcacggtttgcccaatgtcaagtgttacagctttagaatatccataattcataatccataattaatatattagaatacatctgaagtattctattgattactttgatgactccattagcactttcaaagagaacaacacaattttgtctacaaatcttgctgtgctttgggaaccaggtactggaattaggacagtgatagtaataatagctaacatctttagacatttattcttacaattttctgtgcatatgtaatttttaatttcccagtaaaatagctggttaagtggtagtgctggaacttaaaacttggtcattgattgaatctagcacctaggttcctaatagttttgcgctacctcccacagttcaaaaatagaatacttcagatgtagtctaataaatataaattatggctattctaaaacggtaatacttgacattgggcaaatcatgaagccttgctggatcccagtccccatctttaaaatgacgattgtcttcctgtgacatctgctgcacggtgttctctcttgcagtctctttagctctgatatggtctctctgtgcccagtagcttctctggtagctcagctggtaaagaatccgcctgcaatgcaggagaccctggttcaattcctgagtcaggaagatcccccggagctggggtaggctacccactccagtattcatgggctttcttggtggctcagatggtaaggaatccacctgcaatgcgagagacctggcttcaatccctgggtctgatccctgggttgggaagttttcttggaggagggcatggcaacccactccagtattaacatgcccagttagtatgtaacagcttattccaactttacttactagctttgtgacttgtgcaagttacttaatttctgtgcctttgtttcctgtctaaaacctggggacaacggcagacgctgcatcttagaattaaaagaatgagatgggttaattcacgtaaagctatgcctgacgcattctgaatgttagctattactcttcttttttcaactgttatcacaaacttctttcacatacattttcctgcttgatcttctcagagttgctgagggtatagacagagcaggtggtatcaaacctattttatattagatcaagaatcagagacccaagatcacaagagctctcatgtggcagaggagagcaggaagaggacgtctgtttaactccatctttgatgcatatacttgagaaaaatgaccagatctgtgggtcatcagaaaactcaatcccagatttaacaaatacaggagaaaataaagttggcaagtgatgtagagaatccttctctcccacgtgaaagtttcacggcaagactctcctaagtaatatattcccctaaatagttaaaacccaacacgtaggaaaaatatttccccgcagggcacatctgtactgactttccccacctaagctgtgtgacgaagccctggaggacattaactctccaacaggcagaggggcagcgcgaggcagcccgggtttagagttacccgcgtctagaggcaggagcccagagcaccagtggccctgagagtcagctgggaaacagtgctccgttgttttagtgtctgtgaagtgtttccacatcgtaatattcagctgaggttttggacttgacctctcttcaatagagacttcagctgagacttccctggtggctcagacggtaaagcgtctgcctacaatgcgggaggcctgggttcagtccctgggtcaggacgatctgctggagaaggaaatggcaacccactctagtattcttgcctggaaaatcccatggacggaggagcccggtaggcgacagtccacggggttgcaaagagtcaggaatgactgggtgacttcactttctcttcaatatctatttcttttttttttaattgtttatcggcttgctgggtctttggggctgtgcggcctttcactagttatggtgagcagaggctatgctctgcttgcagggcatggactgccctgggcctctctcgttgtgcagccaggctgcagggcgcagggcttccgtgcttgtggcttctgggccctggagcacgggctcgatggctgtggcccccgggtctagtggtcctgtggcacgtgggatcttcccggatcagggattgaacccgtgtctcctacactggcaagtggattctttaccactgagccaccagggaagcccttttatatctatttctaaaagacaaattctctgggacgttttagaagcatcttaaatattaatgcaatggatctgaaaatgtagagagtgctaaatttggcaaccgccgtgccaggcaaaaaaaataaaaatgcatggcaagtctgggccacgttcaagtgggcagttattgtcgtgtttctagcctggctaattacagagtttctgaataccatgtgggttaacgtgctaggtgcttacaagtaaataatatgtatactgaagggaacagtgaactttcgacacaaggtaagggctgagtggggaacgcacctcagggcttcttacaaggaggtcgttagactctctgggcatcacagacacgtgggcattaggcctgtgggataatctaggctttagaggactggttctgacaggtgggcacagaggagcctgaccaaggggcgctaacatgcttgagaggagggaatgtgaggagcagctcctgtgtgtgtgtttgatttcttcagcaaacgtgtctactaaatgcctgctgcttccgggtggctcagacggtgaagaatctgcctgcaattgcaggagacccgggttccatccctgggtcgggaagatcccctggagaagggcatggcaacccgctccagcattcttgcctggagaattccacggacagaggagcctggagggctacagtccatggggtcacacagagtcagacatgactgagcgactaacacacatgcacacacacacgcacacacacacacacgtatctgttaggcactgtactggttggggaaacaagaatgaagacttgagcaagaccttaacaagttcatggcttagtgggcatgatagcgtgagagcaaatacactgtaatggtgagcaaattgtgttggtgaacgtgactccaaaattctctggtgatacagaaggggtcctgtccacaccatatccttccattctctgagattaagcctgatcagactaaacaaagcctctggctagggtgatttcctgagctctttcctagcaccagtggactccccgggagcgacttaaaggccacacaccttgagacaaaagttcatcctctggctctttttaattctgtctccttctcctgaggagctcatgcattcctgtggttttaaactctgtaccagtgactcccaaactgtgcttataaccttgccttctcatgaggttcagacctacaatttcatcttcctgctggacattgcctttatgatatctcagatatattgcaagatcaatatgtcatagccaagttgcatagaaaagcaaaattgcttgttttctctagcagtaaagtaaaatatgctcaacgtagcaaatgtggaacgtacaaaagaaaacaaaaatacgacacaacaataaagaatatagacatgaccgctcttcatgaaagcagtaaatgatgtctttgtaaatcttaaccacgtatagctctccacatattgatctttgtagtgtagtgagctatactgcttttcacccagttactaagacccgaaacctctgccatcctttctccccctcttttgagcttcacatgctctctgtcatccaggtcagatagcgattgtgcctctccagcgcctgctctaaaccaggcacagcactgttatcccctgtcctgctgtcataactccctggctagttctggtctcctcctcctcccgttcttatgtggactaaggtcgcgtttatcgtcccagaatatcgcttcggtggttcttcattgccaacagattataaacatcatggcgaaaggaatgaaagtccttgggatgagatgattggagaaatgatggctagaaagaggacagattctaaattttagagctgttgagggagaagttcatggggtcctagatggtcagaagtaagcggagtccttgaggcctgacctggtccgaatgaaatccgggatctgtctcattgtggacttgtcagaacacagttactctcactgagcgtcaaatgatacttaagatttttgtttaatgtatttaacttaaaaagtcattttacaatatgagaatttgagaagtgtaagatcctgcctgggaaaatttgttcattcatttgataagcacagggtttttaggaggggatgaagtaggcattggtgtggaatctgatattccacgggggacataaagttatttaaatataatcatggagatgattactgactgttttgataaacctctgaaggagaaatgtcaggtgctaaagaaagtcaaatcatggcccctgccatcgccatggtatggaggagagggctgtgggtaggaggaggtggagagaggcagcagccgacaaattacaaaagggtgcctttgctctgccagcggttaagaggggtcattctgtacacatcaatttatcagactaaatctttgcagtttaaacagcaccatgattctggcaaataggtcattttatttccagatttataagtgaggagactgggccaagggtaagtagaacgtggtgcctggtacgctgtagttgctcagtaaaagtgggtttggtgttaaatggccagtggggttgatactacagtcattgctcaactgaaacatttcgaggagagttgtcttgtggaatgtttagacttgattgctccctcttctgaaaattaactttggaaaaccctgcaaagctttcaacccattgagaatctttttaacattgtattctctttgcttctggaatggaccttcccagatggatatggtggccctgctgctccttgggtggaaataggtttattctgtgaagggaagagcctcatcttctagatgggtgtattagagtagtctccatcaacttgacaaggtcaagtctgagactctagcctgggattccaaattattgagttccactaactttttccagttgtttgagagcttgcttgagaagttatatggtcttaaattactctctgaaaatatgtcagggtttaaactgcaccattccccactccctttagttttctattctcaggtatgaatcctgtcctatcttttctatcttagaaaatggctctctcttctccctcctttcagtagccacgtcttcctcacaactcgtctgaactgctgcagcattgcactaaagctcatcccttcctccagctttcccgcccatcagcttgcaatccgcagaggtgaagcttcgtaacgcagtgtcggtctccagttaggtgttctccagtgtggcagccgcagtggaccctcatcactttcagagtgagaggctaagcattttagcatgaagttcaaggccttccttgatctggtcattgttacccatcctagtcccatctcctgtacctgtgattcttgaccattctggatatcttaactgtggcttcagttcaactaccgttctctttctactgtggcttgtacagttgtctctggctaactacactttcctctttcttttcttaaatagctcctataggccttttgtcatcacccctctcacttccttcaggaagtctcttttgagtccaggtgaccgaggaagatactctttatctgctcccataatatcccatgcttcccccagattagaagtcctctaccactgcattgatatgctttttcttcccaattataaccctagaacttggttctagtccgtgtttagtgagttttattcaataaaaagcttcagtcaactatttcatcattgctctaaaaatttcttcaataaacaaaagaaactttttgtttacaaacaaaaggttatcatgcttcaaagactttgtaattttctcaatactaacagaaaaatgcatgccttttagaactgatgaatacagcaatcatttttattaaggtggcattccattttatttttccccgtaaaaactggggagtgaccttaaagagcattcttaagaactgtgcttcttcatttaacaaaatcttcctaattcaaagtgaaatgtcattcatttggaggtcaaatgacaaagctgtattttccttttatgatttttgaatagattagatgaagtaataaaggtaattttcacagagttaaaacctgtaggtcatcaaaacaaatcctgcattttaaaggtgaggaagctctgctctgaaagggggtgcctattgatttctcaggctcagagagctagtcagaggtagaactggaacaagaatgctggcttctctggtttattagggacgacatgtgaggaattaaaaaattctttttaaacaccaggtgttttggcattgtcttagtcctggggcacacgaataaatgaatttagtaggtgctcagctttgagagttcacaataaagcaataaagaagagagaatgttggtatggcgttgaggtgaaccagaggcacccacggtttgggttcaaaagacatgcctgatttaatttccccagtgctctgttacaggctcactatgtcgccccttggacttcctcttccttattcacaccccctatttatcgcctccgcacctctgctcctgtgcgtcttactaattaattcacgtgcccttccctttatctccacatacccaaaccctatctgatgtttaagagccgtctgaaagggacctcctgtgcaaagacttccctacttccctccttccgtggtaactctttcctcccttgagtcaacacagctccacctcctgtcctgactattagcaacttattagagttctattgtacctctccagatatcctttccagtttttagcagagcttgctgcaattatttgtctcatgatttaatgaaatgactgtggagttagccaagaggtggagaaagagaaagtaccgtggacgagagtgaagcaaaagaggtttgggatgcaaaggcaagcgagttcaagaagaagatagtcaatcatttcaaatgtccgggagaaatcggaattattgctctttgctctgaaccattatgttttctagtctgtgttatcctgattcattatttaatcttccttcctcatcagccttgtataaatgtgctctctcaggaaggacaatggacagcttagcttcttgtctaccacctcagcctattggagatcaagaaattatctattgtgtgagggatgcaaatacatttcaacctaatttgtaggatgaagtttgacagcaaatgatttaaattactttttgacaggcctgtttccccctgtaatataacgtattattaataccaccatttattgggtgtcaggcatggtactgtgcattttttatgcatcattttatttactgctcacaaggaactgatcttatagtttctgttactaacctcatcatagaggtctacgcttacaagggctaaaaaaacagataaacacacaaaactcttcaaaaggtgcatagaaggtaagagatagtgctgggatatgaactgagatatacctggttacaaagtagtagctgttttctaactgctccatctactattgcctgtggggtaatatgacagtgcgatagtttgacagtgcgatagttttcacatatcaaggattaagttgcattttgaaaatgcatagtatttattttaaaggaatatttattattatttttaacccttctactttggatggagctaagaattgaatgagctgaattctttgcatacatcattgcttagatcatgtggttggtttgacttaataagaaatatctaaatatactatatttagacaggaaaaccacagtacataagggatatagactctagtttgaaaattaaagataagagtagctaagatgcttgatggtattggaataaaaattaagtcttgatggtggtagaagacggggtgtgtgtgtgtgtgtgtgcattttaaacttaataaaagaatcctctaggctagactcaaaaagctacaatagagtttctcaaactcctcagttcacagaacctttagtatcaaagtacagataattttttcatggtgtctttaggccaacagaagtaattaaaagctctgttattttttaattaaaaattttttaatatatattcatcaattttttattttttattatttttttgtaatatgtattttattgaagcatagttgacttacaatgtttcaggtgcacagcaaagtgattcagttatacacatacattatttttgaaattattttccattaaagcttattttaagatattgactatagtttgttaagtaattagcaccaaacaatttcataaatattatagcctaataatttaatagtcctttgggacaatggggaacagaaatgaaaatgatttttatttcatttctaatagatatgactgttcactatagggacatgtgttgctttgggccatagaatagcttcttaaaactgagtccaagtggtcactatcaccctcatttcctgtttccttattgattttcacatgatcttgctttttatcacacaaactgcaaaaaggccagcttcaaaaagatatgagcacatcaaagggaacgtcgcacaatctaatgttaaaattgtgaactgcctctagctagtagctcctaaggtgtctgattgatcttgagcaccactgcttgccttgaaatttaaaattacccagttgtaatcctgtgacttcactgaggcaccccagagcaccttggcacacattttgggaattgtacctacgaaggaatctgaattatttaaaagtgaaacccttagagtccaggatccctggaccccgtgagttatttataaaagtatctttaaagaaactgtggcgaggcggttctgaactggggacagactcttttccagagtggattttaagagtgagcaggagtttagtagtcatggaaagtcaatgagctggatcagagatcttgctttattcagtccactcctctccctgatggggctccctctctcaaataagaagtcattattcattgttactttattgtgtaaagagtatgtatgttaccagctccattctgtttcgcaagtccattgtgaacacagactaagagcttctcaaagtgcatgtgagagagagagattgctgtcgttaagtcgctatgtctagctctttgcaaccccatggactgcagcacggcaggcttgcatgtcctccactatctcccagagcttgctcaaactcgtgcccattgagtcagtgatgtcatccaaccatcacatcctctgtcatccccttctcctcctgccctctatctttcccagcatcagggtcttttccagtgagttggctcttcccatcaggtggccaaagtattggagtttcaacttcagcctcagtccttccaatgaatattcagggttgatttcctttaagattgactggtttgatctccttgctggccaagggactctcaggagtcttcttcagcaccacaattctaaagcatcaatagagatcagtattagaggaattccacagcgggcctgaggagactacagtgtaactggacacacggtctgcagagtttgcggcatgtaaaatgcagtatggggcagggcctgattggacgggcgagccagtgacccatcgtcagcgctgtctgatatctgggaggaacaaactgagcctggggccaggtagtcagaaaaagctccaaggaggtagggtttggtacaaccttgaagaataggtaggatttagttcagcagagagtcagagatggtgtatgttccagtgaggatgggaaagccgtggaatggtgaatgaaagcaagaggcagaatttagtgagtccagcaaggcgtagattgctggattgcacccagcaatccacagtctgaggattagcctttgacttgtagatcaagctgtgcagccttaaaaataccacaggagcccaagggggaaaataaatgaactcttttctctacctggcaatcactcgttcatctttcctaaagtcttctctgaaaaaatctgttctctcttctggaccactcacgcttctgctccctgtttccctaggaactgggcgtaaaacttcccctaaatcctggctcccattttgtttctctgcaaaatttcatgtacagctggatagttgtatagaaatgaggctgaatgtgttgaagagtattttgaggcaatgaaccaaccacaggatcctacgtaagcatgtataagagacttcaaataaaaaaaaagtggatcaatagcaatgatttactttaaaattatataaatatcattgaattccaaatagtttgttataattatttgaataaaatggatatagatacatacatttacgtttaaggcagtgttatctaacaatgtgaaaggaatagtatcttagccattttttttttttttactttaagtttgagtgtttggctatggaagacagtttggcagttatttacaaaactaaatatacgcgaaccatataatccagcagttgtgctccttggtatttacccaaaggagctgaaaaattatgtcgacacaaaagctacacacagatgtttatagcagctgtgttgctaactgccaaaagttgggagccacagaaatgtccttcagtaggtgaattgttggggctcccccggtggctgagctgtaaagaatctgcctgccaacgcaggagactcgggtttgatccctgagtcaggaagatcccctggagaaggaaatggcaacccactacagtattcttgcctgataaatcccagggacagaggcgcctggtgggctgcagtccacagggtcacagaagagtcagatgtgactgaacacacacatgcgggcatggttaaactgatacatccagataatggaatatgattcccactaaaaagaagtgagctatgaagccatgagaggacatggagggaactggaacatatattactaaggtgacagaacccaactcgaagaggccgtacagtatgtgattccaactccatcacattctgagaaaggcaacactacggggacagtgaaaagaaccgtggtcgccagagttggggtggggagaggggaaataatggagcaagaggatgttcagggcaatggaagaaccctggatgtctgatacagtaatgaggaatacgtgtccttaaacgtttgtccagtgccacagaatagacaacactaagaattcacccgaaggtacaccatgagggattatgatatgtcagtttagcttcaccaattataactgttagtgcatcactctggtgggtgatattgataacaagggaagctatacatgtattggggcagagagtatatgggaaatctctatacctttcactcagttttgctgtgaacctaaaacagttttcaaaaaattaagtctcaataatgataaacagataaaaaagactgagggcttggtactgatcagctcaaatgaacttgacagagtaattcataaaatattgaccccagatttctgcatatactgaattttcaagacattgcaatatttgtatttatcttccaatttgcaactgttgggaaattgttcaagttgctttaaatcttgtgtaggtcacataacatgtgagcagcccaatctcccattttggcacttgctgtgggcagcagtagatttaattaagcaaattataaagtgacaacagggctttggatggtaaatctggcagaggtgtacagaaattaaaatacaagtaaatctccagtcctgaccacctcagccctggaacttcagactcacatatccagctgcctactcaccacatctgcataacggacatctcaaagtcccaatcaacttccatgaaacctgtgcctcccaaaacccgctccatttcagctaatggcagctccacactttcagtaattcaggtcaaaagcttggtagtcgtgtctggatcatctcataagttatagttcacctatcttctctgtctccaaatatatctggaaagcagccagtctagaccatcctcaccaccctttggtcagcaccgttgtctcttgcctggactgttgtttcctgtcagcaccgttgtctcttgcctggactgttgtttccccacttccaacttcaactcctgcgtgtcatccctcaatgcagcaaccatagggatccatttacttctatcggttcttgtttctcatctgtgcagtctttcagtactttcctctttcatccagaatagcaggtagcctcaggataatggcctgaaactgtccacagtctgggtcctgtgatccaggatcattgcacattcttcttctccttgctcagctctctccagccaacaacagtctccctgtgttctctgcatgcgtggcagacacttctgagcctcagcatctttgtacttgccactcctcctgtctgaagcccttttctcctaaacatcctaatggcttgctcctttatttctttttggtctttactcaaatgataccttctcactgagccttccttatccatcttgcttttctttatcctggcctcttgtggctcagctggtaaagaatccgcccgcaatgcaggagacctgggttagatccctgggttgggaagaccccctggagaagggaaaggctacccactctaatattctggcctggagaattccatggactgtatggtctacagggttgcaaagagtcagacacgacagagcaactttcactagcgtactcatttctcctctgctgctttatttatttaatagtatatatttggctgcattgggtcttagttgcagagtgtagcctcagtagttgtgacatgtgggcttaggtgacctgtggcacgtgggatcttagttccctgaccagggatgggacccacatatgtcctctgcattgcaaggtggattcttaaccactggaccaccaggaagtccctgcttttctccacagcacttttcgccagataatataatatgtctcttactggttttgtttcctgtggatctctttttactagaatgtaaacttcatgcgggcttccctggtggctcagtggtaaagaacccacctgccaggaaggcaatttttaatgttttttttttttccccccttagttgctgatttttttcattgcatgtttctagtgcttggaaattcattgccattgagaattttttgttagatgaatgaaagaagtaaagtggtaagacataacttaaataaagtgatttcagtgggagtggaaagaaagtgataattgctagtgacatgacagaggatgattcttaaagacttggtaagcctgaaagtaatcagagggagtgaagagtcaggggttatttattcactcagtaaggagatcttattgaccacctactaggtgcacaggtcagtgtttgtcatggagttgcagaaacttggctctgggcagggaaagaggctggcaattttgtaggggataattacccaaggttaattcaagcctaagtgacttggaaaaatggtgattgattgacacttctctgtcactgatttggtggagcaaagaagtgaggagagatgatgaaaaagttccagaaccactgctagagggtcagatgggctcttgaaaaatgatgagaaccatgttctccagcaatagcctgactctgatccttgttggggggtttccctgagccttcaaaacctgcttataccacaggaaattcagtggccatttaatcttcgcagcaactggctagtttttttttttctttctccagatccttgttcaaagttcatatttacttttggttttatctacttgcttttcatgccatttctctctagaaataaagagcgtaccttggtgtggtgtacttttaatcctattgattttgccatgacccccaaattttatatttggaataaattgattccaagggattatttcttaagatgagaattactgtgaaagcacaacattccagtctgaaattcattgcaaagatatgcacgtaaccctgttgtaataatgttaattttctccatcaatgaacatctattgattatttactgaaaacaagagtagaatatagagtaagtgtattagtaggtggcactggctcatgaaaacaagataatgctgtattttagaggaaggacgaattttaatttcagtttatttctaccacaatacttggaactcttaactatatccaaacagtagaggaataaacttcagatatacagtgtaaaatgtgaccagcctgctctccaggtttttgcaatgccaagttggagacagaagcatgaagacagagcatggtaagtgtggatggaacaggataaagaaaatgctgtggggttgtgaaaaagggagccagggttctggctggcaggttctgtgaggtttcagggcacagagataggatacacaggatgtaattgaaggtgagacgggagatgtggaaggaattcagactttgggaacagagctgaaaaaaaaaaaaaaaaggccaggaaagccagagagttatgaaggatgtgttctgggaaggacaggtcatccggtgtggcttggttgtggggtactcggaaagaagggacgggagaagagcttggaagggtggttggaggcagtctccaaatgtgtggtcttcattcgagtgtctttttttaaagcatggaagagtcactgaagggctacaatggcagagaataatggtaatatttgtattttgaaagtgattctaatagaaatagaagttttaaaacttcagctagggaaggcttaaaaaaacagtttcctaggccccacacagaagcagtacaataagaatctctgaggaggatgccctggggacgggtgttctgtaaatactttgggtgatttcttttgtccccccagccctactgagatatgtgttagtcgctcagtcgtgtctgactctttgtgaccctatggactataatccgccaggctcctctgtccatggaattttccaggcaagaacactggagtgggtatttattgccttctccaggggatcttccctacctagggatcgaatcaagtcccttacactgcaggcattttctttactgtctgagccaccggggaagcctctgttgagatataagcttactcagtttaggtaagtttaaggtgtatgacatgatgatttcatatatgtgtatattgtgcaatcattaccacagtgaggtgaataccatctccatcacctcccacagggcctcccaggtggctcagtgggtaaagaatctgcctgcaatgcaggagatgctggagttcaattcctggttcgggaatatcccctggaggagagcacggcaacccactccagtatccttgcctagagaatcccatggatggagaagcgggtcgggctacagtccataggtcgcaaagagtcggatatgactgaggcgacagaacacacacctcacctaatgaccttcttgtgtttgctgagagtatttgaggcttactctttgagcaactttccattatgtaatacagtattgttgactacagtcactgtgctgtacctgagatctccagaatttattcatcttataactggaaattcagacctttaaccaacatctccccgggtctcccatcccctagcccctgacaaccgctgttttgctctttgtttttatgaatttttggctgttatggagtttttagtttcttcatataagtgagatcaaatggtatttttcttcctctgacttattcctctaacatattactaatgttattgcaaaagataggatttccttcttttttactagtattctgttgtacatgtatatagttggtcctctgtatctacaaattccacatgcacagattataaaggacagagtgcattttataagggacttgagcacctgtggattttcatgtttagtgggccctggaaccaatgttctgcatatactgagggaagaccaaccacattttctttgtccattgctctgtcaatggacatgagtgcgcctgttcaaggtagtgatttcatttcctttatatacacccatcaggtgatttcttgtgctgccagaacagcaactgtctgaagacctgtgttagttatatttatatttattttaaggggaaatgggggtgataaaaactgagatgccaagaacctcaggagctttcaggggtccagatgagggcttgaactggagcagagagactgctgatggagcagaggggcaaagtcaagagccccttttaaactagaagtgttggtgcgatgtgggagaccctttgtatgtggcgatgaggaaggagctggaagatgactttagggaccactctggtggcggtgtggatggtgtttctgggaaccagcgcaaggaacacaggaagagagatagctggatgtcttcatatgggggaggctgatcaaagggggttggccagaggcgataatgaacttaatgtaggtgtgtaattcagttccttattttcccaatgaggtaactgagactctgaatgaggaagtgacccatttgaggtcacacagctagttggttattagaaaatcctcttgtttttatacctgtctagaagattcacaggcataggggagcctggtgggctgccatctctgggatcgcacagagtcggacacaactgtagcaacttagcagcagcagcagaagattcactgcttggttatgttgagagcatttagataatactattaaataattaccaagtgaaaaatattattaaatatacactatagcagtgttgctggtgtatgtttttagctgaatcaatgacagcaaatgggccattgcaggccgttggaagagagaaccaggtcttgatttcatggtgttatcatggggctaagcctcttcagtcatatctgactctctgtgatcccagggaccgtagctgccaggctcctctgtccacgggattctccaggcaagaatactggagtggactgccatgccttcctccatgggatcttcctgacccagggatcgaacccgcatctaagtctcctgcattggcaggcgggttttttaccactagcactgccttggaagcccaacatagagctgctgctgctaagtcacttcagtcgtgtctgactctgtgtgaccccatagacagcagcccaccaggctcccccatccctgggattctccaggcatgaaaatagcaaggtgacttagagattggccagaacaaattcattttacagatgagaaaactgagtctcagggagagacgtatagttgtataaggacgcacaggtaacaagggattaaaatgaagcctccccgccacccctgccccactcccacctgccatcttctgacccttcgacttagtgatttctgtgggaggttatccaaactattaccacagccattgtactaacctttgtgatttggctgattgctttatcatttaacacccctttagactgaaaactgaatcatgagccacgtctacacggctatggagtgtgtgtttaggttcgacaagtaatggggacctacgtggagaaccaactcattttcaatctgggcctctatgacacttcttggtttagaagttccttgaggacaaaaattctgtatctacagcacaaagcacagaacctggaccatactgtctattcaataaatgtgggtcaagtgtgatttgaccccagtggcatttttttttttttgaattatagtctttgtttaaaaagtaaatcacctgtgcctgtgatggattcatcaggtctctactgggcccacatgtaggcactcactaagcatcacatggttctcattcttttcttaagacacagcagagagggctgtcagctgacaaaggcacgataaaatgagtgctggaaaacccttggtctgaatgtgacctcttgctggaatgccaaaaatacaaacttgccaagtctcctggcccagtgacctccatatacaaaggtcttttctttctagaaacaaacctttttcttctggtttctgatctgacacacataccctcacaaactcaaacacacacacacacaatccctacaaaggtgtaagtctacgcagtctatgtagtatgtcttttttttttttttttttttctgtatagaccctttgccatatatttgaaatgtaaaatctttcttcttaaaggctgccttattgtactatgaaaaccccggacaagcagattattgaattacccatgactttgcccttcatctgattatttctctgaaagggatcataagacatcctgaaaaagcccagaggccttcagagttccaaatgatcacagagggcctttttcccctgtcttcttgaaatgtcatggccaccctgatcagtatcaaaggaaatctctgtatgcataaggatctaaaacaacaaaatacggaaataaaagaaatttagaactcatttcggaaaaatgaaagttcatctgtgggctttgggtcatatgaggagtgttataccactctctttcattgactagatgactgtggggagttttttttaaatgctggtataacccaagtggcggatattttaggacggtcatgtggctctgacaaagtgctcttctttccagggatacgtgcttgaggacacaggctcacacactaggtgaggcagccttgaccttcatgtgttttcattaagtgtgtatggatcagttcctcttacaatccgcagtactaatgccagtgtgaacatgacctatgaaagaatttggtaacttgaattaaaactcaccgtcacaaaaccttgaacggaaatgttaagtgtccttagaggtatattgacctacaggtacatgccagtttcagcagtttttttttttttaaagagaagttggctttttcaatacacacttgactttgttataatttctgaaactttataaaactctgaacacgaagaagttcccaaatcacaataaaataactctgcctggtcatacacttctggagtttggggttcagaaaacataaacccagtcttcagtatctcccatcttcagcaattacttgtggacagagttacaagcaataggattttttccatatttgttgatcagctcaaattcctgtaatgttctttcataaactctggtctagaactctgatttcactacctttgtcatattgtcttttataatttttaacatgctggagaaagggagggaaagctcaagtaccagctagttgcaagggactgtgctgggtgctctacatacatcagttcttttcatccatgtaacagccctgtgaggtacatattattacttctgttttgcagatgaggaaggctaaacttattgtgtttaagaaacttgctaatattcatttagaaaattaagaatcagaacaaaactgattctagctgattggtctaaataagaccaatccatttatttatttatgtatttatgggcttcccttgtagctcagctggtaaagaatctacctgcaatgtgggagacctgggttcattgggaagatcccctggagaagggaaaggctacccactccagtattctggcctggagaattccatggactgtataatccatgggatcgcaaagagtcggacatgactgagccactttcacaacaacaacaatgtatttatatgtcagaaggctttccttatccaatagattgcagactagttaagggtataggtcatctagttcactgtcatattcctagcatgtagctcagaaactggcatcgatggataaacatgtgttctgttcagttgacttgaatgggacacttctggtacataaacccaggggagagatagtacaagactatggtttagtaactgagggtattcactgttggtaaatgactatgagctttggattcaaaaagctcaactttggattgtaacttcttaagcctgcatctatataatttgaagaagttacttagcctctcttggtctcactttaaaatgggaatattagttgtaccttcatgattatttatggaaatcatatttctgatggttagtgaatgtcctattatccttaataggagttgactgcggatgcctttgtaacatgctaatctaattagtactaattgtcccactaaaatgtaaactccatgatgggaggtattttcgttttaatcattgtattccaaatatttaggacagtactgtccaatagagcatcctgtgataatgaaaatgttctctattggggtgtctaatactgtagccacaaccacatatggctattgaacacttgaaatgtgattgaggaactgaattttaaattttatttcattttaattaaaccaaggtaggcatatgtgctaggggtatactgtattagcacagtcctggagtgttacatggtccaaggatatttcaataattacttattacatgaatgaatccccttgggattaaaaaaaaagaaaaaccctaaacaagagtatcctggttgtgtatttagtgcattttttttatagataagcaatgaaacactttacggagtgatctgctcattctggaagccttgttagggtccagtatatgattcagtttacaacagaaatgaatttttgatttctgtttctttttggtgataggtcaagaaagatttggaaacatgacacgggtctattaccgagaagctatgggcgcatttattgtcttcgatgtcaccaggccagctacatttgaagcagtgacaaagtggaagaacgacttggactcaaagttaagtctccctaacggcaaaccagtttcagtggttttgttggccaacaaatgtgaccaggggaaggatgtgctcctgaacaatggcctcaagatggaccagttctgcaaggagcatggtttcgtgggatggtttgaaacatcggcaaaggtaatgtgaccttaaaggataaacttattgtaggcaggattcacaaagaaaatggcctataatcatcatcattattaccataatgatagtatatgtttgtttagtgatttgtagttctcaaactgctttaagctctttctcatttcaaggggatgggtgcaactgtgacccacaatttaaggtgtttgtggctaaggcagcaaagcaacctgtatgtgatcacactgacagtattcaataactgtgttcatgtgtggagtgcttatgatatgtcatggggtttttgtgttttctcatttaggcctcacaatagccctcgtaggtaagaatgattttagtcaatgaaagaaacaagcttcgccttcagtgtcagtgctttactcaagtattagttgactccatcaacacttaatatgtttcactgtgtatcaggaactgtgttttgccctagaaatgaaaagacggccaaagcacagaacaagcacattgggaatgttggaacagtgggcagagagtgagtggatggcaaatacgcctgtaaggaacatagtgtggcttggcactgctcaccctcctggtggcagccagtagcaggaagtgcgggcagagtcagggctggaagacgcagaatccagtgtgagctggtgagaggctgacactcccctctgtgccccacgctgttatctaacgtatcaggggcacaacatttactctgctccctttctctctgtgtcagtatcagagagaaagatagcttcatcatagattttgaaaaaaatttttaaatcataaattaaaagtaaatggtttaatatgtttttctgatattctctatatgcatatacatatatgtatgttttctattactaagattgcattccgcatagttgtaaatcacaatttttctacttatttatttgtggaatacacatattgtatacttgtggagcacaggcactgtgctaattgtttgggattcatctttgagtaagataggcattgtctctgcactgagggaaattaacacctaggccttgctgtgaacctttgagcgcatggtttggaactacagcttgaatggacatcatttaaataggcttaaagaaagaaagtgaagtcactcaattgtgtccaactctttgcgaccccatggactgtaacccaccaggttcctccctccatggggttttccaggcaagaatgctggagtgggttgccgcttccttctccaggggatcttcccgacgcggggactgaaccgaggtctcccgcgtggcaggcagaagctttaccgtctgagccactaggaaataggctgagtaagagcttctgaagtatcttataccagagcgtagagtggccagatttgtccttggggactctggaaaggcagatcgacatggtagttattgcattcttacgagaaaacgacaaagccttgagctaaggtaatggctgtagagattacagagaaaaacctgatgtgagactatcactacagtgaaaacttgagcaggaagactgaactgctcggggtgggaggcgccggagcgggaggcggtgatgcctcttatctgacctcttggttccgtctttgggggcgggtctcagtgcctgccttctcccagtgctgcctctaagttggccttatgtttagaaagttttacttcttggttccttgttttccttcttgaggcctcagcatgcttgtacgtgcttccccctttttccttttaaaaccctttgttttccttattatttttgaggattttttccttagatttgggacacagtacctgttttctatttcctggctcccattgaaccatgtctgtttgtttcaagaatttactgttgtaaagatacatcagccaagtagtactcgcggatgtgattaagtgaacatttaagaaacactatccccccctccctccccacccgcctaccatcccccacaccaagtggctcatggaatctcggttccctgacccgggatcgaacctgtgccacatgcattggaagcagagtcttaactgctggaccgccatggaagtcccagaaataggacgtttttaatagtctggttattgggtgttagtctggctttaaaaaaaaatccaaaatgtgggtgaatacatccatttacccattccttagccccatactcaacttcattccacagatctttgaatattctttcaaattcctttctttcccaagagtctccagcccagaagcctctaggcacaagggtaaaagacccaagttttggagaactccttttctcaattaattaccttacacctggagggcagtctatattgaatgactcatattatataaggatatatttagatccatcattctttcattcagcaaatgttatggaatgcctgttatataccaggcactgggaacagagaaatttatgaaacaggatcctgacttcatgtataacaataacaacaaaagctaagtaaaaatatatggatatatccaatatatattggacagccaataagtaccaacagaaaaataagagaaaaggaaggaagaggcctgtgaatttgtggggagggctgaaatgtcttgtgggacaaggactttctttcacttcatgctgacattccttgctcaatgattgcagtgtcaaactctacttaagggcatgatgttaattaacttcaggcctggctgacccacatgcacttcaatgctggatttctaatcctccaaatccccgaaagtgtaaactttgaagagaagctttgtacagagagagggcggagggagtttcccaaggctaaagggcattgaacagctaatatgaccaagagggtacaaggcctcactgtagaaggcagaacctacacctctcttccctccaagcatactgcggttgaaattgtccttccggatgtcctaataatgaaaatggtttcccagagccgggctggttttcaaagctgacacgaggtgtgcaggaacaatcctgcatccttgattagtcaaattgttcccaaagtctttttatttttaagatctctgataaagctctgcttcctttctgaggatagtatttcagcatttacaaaacagaggcccagctcagactgtctgcctgaagctaagatggcagcatttggaggcagccaccaattcattctttgattacctttgggcccggggaacatttcccataaagatctttgtcttagaaaagtgtctctcctaacaacttgagtcctcttgggtcacatcattatcagtctggtgataaacatctgattttcttttttttagtgtttccaaaacttctaatgagctaacgtccacagcctctggctttgttctcccggcgcctcttgcacaaatcctgtgggtatcatcagcagtttggccatgcccgaagctgaaagtagcaggatgttagaggagcttgttctttagacaagcctcctttctgctgctgaccccactgccaaagtaaatttgacctcttgctctttaatcttctcaagaaactttctgcaagaattttcaggccgtgtgctgttgctggaataagcatggtaccctctggctgtgaattaagagagggggaaaaaaaaattaaaagtaaatgtttgctagcatctttggtttttcacatcatctcttcaaataccaaaagcaaaggaaggaaaagaaaagcagtctcctaagtcaggttttctttagttttcaacctttgcattatcttcttttcttagccatgtttagttgaattctgcctggggattcactacagccaggtaacatataactggggtgagcatatgtcccattttctggaaccttcctgatttatgcttaggatcctagcacaattatttttaacacctccatttctggtctgtaatttaatttaattggtcaacctgtaggtcaggaactctgatgcattgcactgtccacatcataccttatctctaataatggctcttatgcatttttgtgtccaagcccggtatttataatatgctttggtagatttgtctatttagaatgagggccctggcctgctcttgctagagcattcccaagactgagaatcctatcttttgagcccatatcaatggctgatggagccccctgaccttctgctccatttacctggtgctttcttgatgctttttgcctgaatctccaaagctacttcctttggattcacactatggccggatccaattacctttcagagtttctatgagattaagcgacccaggggtccctggatgttttatgtctgatctcaccgcacacacatcccaccttgtctcaatcgcttgttcccatagcccatctgcccttgtgggtgtcatcatctgtagcttactctgatgctcacaaaagctgcactcagaagaagggtctgtttctgcatctcagtccttcccaggctgctccatcttactcttatgctgtagtggttcccgtgaggttgtgttcagaagcagaacaccaggaaaatgccatgtagatgggaaagaatggggcgggtgggatctccccgagtggccacaagaacaatctcaaaaagaactgcagtgtcttctgttcatgcagcctccatggcatgctctacttctggcagatttccttgtctgtttctatacaatttatagtgacctttaggcccaccctcgatctcagaatattctaagatcaatgggtaccctagaagaaactttctgacattaaactcgattgaattttagtctcttccctacaactaaaaagcaagatgttgatgtgtggcctgctaagggaaggaatatacccagtagtattctctataagacattagtagcttttagggggaggagaagactcttgagagtcctttggactgaagggagatccaaccagtccattctaaagtagatcagccctgagtgttctttggaaggactgatgctaaagctgaaactccaatactttggccacctaatgcgaagagcctacttattagaaaagaccctgatactggaaaagattgaaggcaggaggagaagggggcaacagaggatgaaatggttggatggtatcacaaacccaatggacatgagtttgaacaaactctgggtaatggtgaaggacagggaagcatggcgttctgcagttcatggggtcacaaaaagtcagacacaacttagcaactgaacaacaaataggggtttcatggtgcagtgaaacacctatttttcatgcgttttgggtttccagtaactgttgaaaacgcatttgttatctttagggagcttctcgccagggaaggctcacctccccagggagagcccataaaactttcttcttttgctttctttgcagctagaaaacagacatatgacctagattccacctacagactgattcataagtgagcaactagaggatgaagggacaatgcagaacccgttttttgccccctctgtgaagggtggtggcagaacagacttccactcttgggagagagtgtggtttgctgagtcctatgctggatgcagaatcaagatccggccccaggaacaactgcattcaagttgagttcctcagagctttgcagatgacaggacctagtgttcagtggtggctggtagctgtgttctcgtcacacttgttctatatgggatctgagtttctggaagcttaggctaaatctggtttttctagactactgtttctgtaggctactgagtaattctgcaagcaacctaacatgccttgaataaatgatttcatgtttagctagcactggcttctgagtcttatgactgaaaattcaaattaatatacgtgatcagatggatttgagaaaaccaacttcactgtcccctttgctgttggaattctcaggcctttgatatcttaggcacatgctgaatctctagtaataacaatgtctaggttcttcctgtttgctgaatgttaactttgtgtagaaatttttatgtgtgtgaactcattcaatcctggcatgatcctatagagtaagtaataatgttattacaattaaaaaaaagttgagatgaaacctaggcaatttccctaaagctatatagttattaccttacttctttgattctaacagacactttttgtttcttcttagattaagatttcaaaatcaagatatgtctctagttagtgtggatttctaaaacgatagtgtgtcacacttgtagtggtatttttttgtattatctcctccaaagtacactctctcaggcatcagtttgtaaattatttttggccacatagaacactaacaaactaatagaacactttacggagaaggcaacggcacctcactccagtactcttgcctggagaatcccatggacagaggagcctggtgggctgcagtccatggggtcgctaagggtcagacacaactgagcgacttccctttcacttttcactttcatgcactggagaaagaaatggcaacacactccagtgttcttgcctggagaatcccagggacaggggagcctggtgggccgccgtctatgggatcacacagagtcggacacgactgaagtgacttagcagaacactttaaggaaatgctgtgaaagggaaagactgaagaggcaaaaggagaagagggcagcagaaaatgaggtggttggatagcatcaccgactcaacggacatggatctgagcaaactccgggagatagtggggacggcggagcctagcatgctgtagtccatgcggtcggagagtcagacacagctgagcaacaacagtaaggaaatgctggcctagaattctcttgtaaagggagtgttttctgtatttcgtcgtattgttttaaaactgttttgaatttgttacaatattgcttctgttttaccttttggttttttgaccttgagtcatgtggaatcttagctccctgaccagggatcaaagcctcacctcctgcattggaaggccaactcataaccactggactgccagggaaatccctgtatttaatcgtttagtaagcttttattcattatcattattattttttaattgctctgaaagctgaaataagcagcagttaagtggctcgttttctagaaactgcttgaagggtaggatcacacatcatttatttttataggcttttagaaaatatgtaattagaaatacaatgcatttatacaaaccggaaatgcattgctgagcttgggtatgggtagatggttattctaattcattttttaatgaattgagtataggacattattcttaaaaaatccttttatttttcaatcgagtagtaagccatctctggcttactcccaaattttaaatgtcaatccatgaaaaaattcttaatagtcactggtgaattcattgattcaacacaatttatatcgaacgactgtttaagtctgtgctgtgaacaatgtatattaaaccttttctgggctcagagcatgcttttaggttcctgttcctaaaatgtcagaattcgctatgggaagtagatatgccacattttagacatctgtctccaaagactatttggagttgtaggctgtgcctcccctgactcggttggggtacagcatgtttaacctggcatttttaaccaatcttcttaaagctggttgtccttaggaacataaaagggcaggcccaatctgaaaatccaaaactagagcaaagttagaaggtatcatttacaggaaatggtgccaatggttaagagccatgatcatttcatacagtgaccactagtctgtggtacaactgtttgcatcatcatttctaacagattcttaatgccctcccctgcatgaaaaatggaatcattgcttgaaactgagagtagcttaagtatgagtctcaaattcaagcaactcatctgtttaggagtcagtataaattaagaatagcattttaatttttaactttagctaattaattctccagaggttttctaggtctatgctaattatttgctaggtaatatgggaagaagcacaacctggaatcaagattgccgggagaaatatcaatatcctcagatatgcagatgacaccacccttaaggcagaaagtaaagaggaactaaaaagcctattgaaagtgaaagaggagagtgaaaaattggcttaaagctcaacattcagaaaactaagatcagggcatctggtcctatcacttcatggcaaatagatggagaaacagtggaaacagtggctggctttatttttctgggctccaaaatcactgcagatggtgattgcagccatgaaattaaaagatgcttactccttgaaaggaaagttatgaccaacctagatagcattttaagaagcagagacattactttgccaacaaaggtccatctagtcaaggctatggtttttccagtggtcatatatggatgtgagagttggactgtgaagaaagctgagcaccaaagaattgatgcttttgaactgtggtgttggagaagactcttgagagtcccttggactgcaaaggagatcagtcctggtgttcactggaatgactaatgctgaagctgaaactctaatactttggccacctgatgcaaagagttgattcattggaaaagactctgatgctgggagggattgggggcaggagaagaaggggacaacagaggatgagatggctggatggcatcacggactcgatggatatgagtttgagtgaactccgggagttggtgatggacagggaggcctggcgtgctgcgattcatcgggtcgcaaagaatcggacacgactgagcgactgaactgaactgatgggctccaacgatgactaagccattgtaggaaaatacagacagaccctcagcgggtattaccgcagctgggtgtgcgggaggcaaggagctgcgattgccatcttctcctgcagggttcgcgtttgtatcacccacggtgcaggtccttcctgtctcatgcctagacaattgttacagactgcagacctggcttgaggtagactatacagcatgatgcgaaaaattcagcctatccaaggaatcactttgatgttttcatagtccagttcaagaatcttctgtagagtgtacttcttgattcaaatttaggcatctgaaagcagaggtcagcggctgtgacctgcgggccaaatgtggctgcttctctatagtaaatgaagggttagcagagcacagccatgctcattggtgcacatgttatctgtggctgcttttctactacaagtgcagagtagagtagttgcaacagcagccttgtggctttcaaagcctgaactatttatcatctgatctgaccctctactcattatgtcttacaacagcaattgcttctcttttgtgcttgtggctttacatgtaatagctcatccttaaaagattcttgtaagtcgttttattattcttgttttatggatgaagggattaaagtttaaattggagaacataaatgacttgctaaagatctcacagttgggaggttgtaaagttgggatttcaagccagatgtgctaattgtacacccagccaccaccctgcactatcttatagccttttccaatctagccttattatataataactgtttatggagcaactgatacttggttggctagagactgggattgatcaataaatattgcattggccaaaaagttcatttgggttttcccatcgtgtcttatagacatcctagagtgcacagtacacaccctcaaacacacttcccgaaagaatgatttggccccaaatttcaatagtcctgagcctgagaaaccccatagatcatgctttatattagaattttctaaatcctctaaggaaaaggtactaattgaatacaagttcctgttggttgccagttttctcttaaggaaaatcaagtagggtggacttttgagttttgtctgtttaccaggtatgtaattatatgaaaaaagttataattcttgcccagtggtaacagttgttagattgtgggattgtgggtgatcttgtttctggttttcatcttttagtgtgattatgttgtttttacaatgacaaagataaatttataaataaagataaaataaaaaaaaaaaaagaaactgttgaggcttctgtagccttttaaggattctctgcctgaggagctgatgctaagggacatagtctgactcatggtggagttttgctttctctgtttgccacccacctactactttgatatctgaattttagtattcccagtattcatctccatgctttttcatgcagctccttctgcttcagatatccttctctggtctttgccttaggtaattccagactttccacatcattgttctcttcctacccacaccgtacagcctctacagatgtttccttaagggactccgtctctgccgcctacgcgtctgctgctgggcggtggccctctgctgggccagctcaccccgggaggctcagccctccctccagatgatgggtgttgcttacaggctgaggcaggctacgagtctctgagagaccatgtctctctgagcccagaaaatccaccttttcctctgctggattcaggctgtaggatcactgtggatttttgaacctgggaaaagactctgagaagcacagagaggcacgaaggcagagtatggtgagtgtgggcatggaggccatgtagatgggggtcaggctctcgccttggacccaaagtgatgtggttttgggccaaacacttaatcatgctgagcctctatttctcatatgaaaaatggagctgtcataagaatcaatgatagtaagtacaaaatgtctggaagattagtatgcaataaatggctggtctctctcttaaaaaaatacacgtatgtacaaaaattgctcccagtttcagaggcttcccaggcaatcctgcccactgagtcacggatgcttgttctagaagcagcccatggcaccttcaattgcttaattcctttccaattatatctttagaaaaatgtgttaggattaggggactcctggagaaaaagttctattcagctggggcaggaattttatgttggggtagagtatcagacccagaaagggaacagggagccttgtcaaacaaaactctctcctcggatttttgcacaacccctctgttgatggtttgttactgtccactcatcccctttgagaatctttgcgtgtactgagagatgttgcccctgggagtgtgttgccctccttcatggtgtggaagcaggacctggaagctggcaaatgatgcgcttaattagaggaagagtggagactgaagaaaggacgtatcagctctgttctaaaggacagtagaagagttcagaacaacttgatgggtttcctggtgccaagacagggcaccaaaattcgaggcagggaaaatctgaaatctttgtaagatttccatgttttcacttttaaaaatcgtatcctatctgtccatcataatgatttctgtaaaaatcttttaaaggaaaaaggcctatctttcaggatttccaggaggagggatattcctgaggttctatcctgtctggaacttaatctgcatcagaggcgagaggtatggaaaagtgtaggtgaaggaggatgggaaaagcaagtagaatccagtgcctttgggaatgaaaatgttgcctcggtgcagaccatgacagatatgtcctatttggtctctgattttcagtagtaaaccatggttgccattcccagactcaaagaatgattaaataccagacctagcttctggaatcagcattcttcctggatctctacctccagcatggcttgcttccaaacctcagacttccaggtccctctggatctctgcttagatctcacctctatgactcttcaaatccaacatgctggaaacggaatttattagctcttctgcaaattagatcatcttcatcggagacctcacatccacccagacatttgatccatactcccatagaataagatccatactcccataagtaaccaggttacttgtccttcagaaagcccaaattcctgagcaaaaaaaaaaaaaaaaaaaaaaaacccatagtgaggctcttctctgcctctctgagtctatccctggctacttcctacctgtttatcccctagtgatcctaaactgcattaagtcccctgttcacttttggaattcctgcttcctggaacacgcttcctacagttaattcacctgtcctccactcttccttcaggactcagctcaagcatcatctgccactgactctcaggtagtctgtcctatctcttaccacatatgttaaacttctttctctatggacctgtctcctgcgctgcactttgaaatcctcctgtttacccatccaagtgaacattgatcacttggtcagtgattacgtggtctgtttattggctgaaacagaatttttctgctgcagtgcttttcaagcacttattcagaagattcatttttctgtattattctttcttctgcctgttgtggggatatttctgtccttagagaactgtgaagaagaagcaggaaaattaatttactgctgtatttcccaggagcataccacattatgtaactcctttcatccagaaagctccctagacactttgcacagcagggagattgcagcgtcccacagcatgaagtaggggtagagacaaaaactgaagacgagggagactgtcccccctagtgccttgggcccaaactagcaactgcagagtttttagcttggtgattccactaacactacccaagaatctaccaacagcctgtggattttattagccagcatattccttcttcataccccaaaaccagcatcgagaagtttcctcctcattgaaattctcatgtacctctcactggtttcagctattgtcatttgagccacacagactattgtatttgtcttttattttttaactaataaacagagttgcagagaggtttttcagcgattttcattgaagaaacgaagcctagacaacagatctaggctagaactctctccagtgatgtgattcctggatagagtcgtacatcaggaatacccgaggagcttgttgaaatatactgcaggtgccttggccctaatttcggaaatatccggaggggcagaggaggtatgtttttggaaaacagtcctttggtgattttcatatgcacaagctgttttacacttgctcactcactccttcattcatttctgatatattccttgaagacctgttgtatatccaggcacttttctaagcactgaggccctggtgatgaagggtacagtttcttcccattaagacgttctcagtctcctggaagaaaaatcatacaaatgaataattacaacatagtaggaagttccgtaaatactagtggattctacagggctgtgagagcacttggaggagaaggtgttacctctacctgcgaatgaggcagcttacttgatatttgttctgagttagcaaggataagagagtccccaaaggaagatccaaggagaccgctgggaggagcttctttttaacacgtctgtgcagaggggcataaggaagccacctttagaaatccctgggtgttttaaaaagcaaggagagtttctcatattttaaaaatatttttgctgttgaaatatacttgatttacaatgttgcactatttacaatagccaagacgtggaagcaacctaaagtgtccattgacagatgaatggataaagaagatgtggtgtttatatacacaatggaatattagtcataaaaataatggaatcccatttgcagcaacatagatagacctagccatcatcatgctaagtgaagtaagtcaagacagagaaagacaaatattatctttaccgtaaaatatctaagtaagaatgtgtcactactgcagttacctagctttatcagccgtcagagaattgtcaatataagaccatggagacttactattaaaaataatagtatgacatcccctatatgcagaatctaaaaagataccaatgaacttatttacaaaacagatgcttagacttagagaatgaacttatgatggccaggagagaagggcagggaaggggtagctagggagtttggggttgatatgtgcacactgctatatcctcaatatattgtcaagtaaaaaaaaaaagcagattaaaaattagtatgttccctgtgaattcttctatgtaaaaatagaaatctatatatacttagaaaatctggaaagttatactgcacattaaacttttaaaaatggcaagctttgggaagaatttaaaatttcctattttcactcttccggattaaaaataagcttttataataaaaaatggataaccaacaagatcttactgtatagctcagggaactctcgatattatgtaacaacctaagtgggtaaagaatttaagaaagaatagatgcatgtatgcatgtatacctgaatcactttgctatacacttgaaactatcacaacattgttaatcagctacactccggtagaaaataaaaagttaagtaatgatagagaaatgtagaaactaaagtccagcaggatttaagacactcacccaaaggagtaccagcgttaggatttaagctaggtctgattgattctgaatctacctggtgctttctttcccacctccctactcttaaaagcgtgggcaaaggctctgtctcctctctctacaccactgtcagaaacttctggaaggggttgcttccttgtcgcatgaggggtttgtggcggagacatgtttgctttcctcctctgtgtgtctccccgctttttctcagtgttgccttggtctgttcctgttttgtggtcctttccctccttcagtgggtcttgtgtgccagccttggaggacccttaggtttgtgtgcagcagcgttgccctcccacggccttgtttcatctctgcttcgctgaccagtgaggtattgatttcttgggagaaactgctgggacaggggatgaaggcaggggctcagtagtccattagacagaagcgggaagcaacggcagctgcttcccggtcagcctgctcactgacccaacatgcgggagtgctgttcaagggtgaggttagcctggggtgtccaagggtgatctgaaggggtgaggttgttcctggaataatgtagcaaagccacggacagaaagatcgagagctctaaatcacgtccttgaactaaatgaagcagagccatcttttgagaataaatttgcctgtcacaggttgcttcaagggaaggaaattctgctgagaccttttctaattcttaggtcactttgaattctctaatgtaagcatgatctttgtgaatcgtgaggcaagtcatttagctttcattttgggggctcccgaaatgaaagagaggggtggctgcagtgggtggctagcagtgcttgtacagtgtgtttctgaaacattgtatgtaaatcccgcttttacatgctgcctcaacgggctcactgtggcaggtctcccaggatgagtccctttgaaaaggaagagtttcttgggaaagagaagtatcattgtctgtttcatgtggttataaatgtagttccatgttgcagatttttgtaaagaaggacagacatgggcagtaaatttaaattatcaaagtctcaagaggccttgtgttaccacggtaatagaaacccatactcggattcccattatcacctcattgtgtcttctaccattgtatggaaacccaggaaaaattagatttggagagtacctcaaaatcttcttgtcatctaactccttattttacggtttcctttattcattctttagaaactctgagtacctctgttccatgtgacggacactgttaggctgtaggattatgcctgggcgaaacagatcaagtccttgtcttctgagagcctgtattgtagtgtggctgcaggtaattaaaagataaatacgtttgtcccatagaactaagagctagagggttcgtttgtacaggaaaggaacctagagcttgagtcacatgtatgcatggggattcagagaggaaagcagttttagacaggtgactagggaaggtttcactcaggtttttttttttttttttttaaattaaacatttggaagagggccagcatggagtcgtttagattccctggaggggaatggtcatggaagagggtttagcatgggcagaggtgcctctggaactggtatctgggctttgctaggatgacagagatgaagtaagaggtgatgtgtccagtctttaaagcattgtgaccactttgggttttgctctcagtgagatgagaagacatctgctttgagcagtgctatgatttgatttagacagttgttctggtggttatgttgagcttggactatagtaggaaaggttggaagcaggaaatcagctaggactctattgtgtatctagggaagaaaaattctgaaaaataatcaaactctatatgctttaaaaaatatattttatcttttaactttttggccacatgtgcaggaacttagttccctaaccagggatcaaacccatgcgccctgcagtggaactttgaagtgttaatcattggatcgccaaggaagtgcctacatgtacttttgaacatacagcaggcaggactaactgatgatctggataaaggttatgagaggaagaggacgtttggggatggctccacagattttgttctgagcaactggagaagtcgagttgccactgtctgagctgggggtcctgagatgtgggtgggctgtagggaaagctatacggactcagttctgggtatgttaaaatctaggagacatctaacagcacctgtcaagtaggtagttgtgtatgattctggagttcaagagaaacatctaggccgtgataagaggaccaaggactgatctctgggtatgaccaacattttgacaagaaaatgaggccaccgagagaggaaggggtagaggaactgtgtatttcacagaagagctaagactggaaaccagtggactcttctcagtgcacaataaggttccatttaggtagcctgggttttcatcttcttttcctgtgctactcctctcagtaatacagtgggaagatgttggacaagagaaaaacaaaaagcaaaaccagattgcacagcattggtgctctctctttctctttctaagtcaccaacaattagatttattcactgtgtctctgctaggcggtgggtctgaaaagcaaagcagacaagtaagatgactaaatgatggtctccctctatgccaacaaccatgcactttcttttaagttgccagtagttctaacataggtcagaggtgtctaggatatgattgaagcatgccttctgctaggtttttggctggctggagatatttaaatctaactttaagagtaattatgcaaatttttttcagatcttgaaagggccaaaatatttagaaaccttgtaaattacgttcatcacataaatcaaaagtctgcttttgttatttgccaagaatatttaaaataatgatatttaacatttgtatagtcctttaaaatttagaatgcttccagcatctacttatgtatttgctgctgctaactcacttcagtcgtgtccaactctgtgcgaccccatagacggcagcccaccaggctcccccatccctgggattctccaggcaagaacactggagtgggttgccatttccttctccaatgcatgaaagtgaaaagtgaaagtgaagttgctcagttgtatccaactcttagtaaccccatggactgcagcctaccaggctcctctgtccatgggattttccaggcaagagtactgtagtggggtgccattgccttctccaacttatgtgtttggttggctacaaatcctcagcacaaaaagatttgtttcactcttttgtaagacttctctttgttaaactcctgcctgtagttgatgtgaaatggctttaagaacctttaccattctggtttccctacctggatattctctaatatgtccatatgcctttttccttttattaatgtagtgaccagatctgttgtcaacataccagatatagaagcatagcataacgaaactttaacttaccttgcctaagtcacctttctattttagatagtaaaattagtcctgtgctaatttcttttaacagccagatcaaactgtcgacacatgctgcactcttggtcatctaaatgtccccacccttttttttctgcaaataatagaccatcaaataagttcttatgcatttaagctattgataattcgaaccaaagtgtggtattttagctataggatttccctatagctcagatggtaaagaatctgcctgcaatgcaggagagctaggttcaatcctgggtcaggaagatcccctggagaaggaaatggcaacccagtcctggagaatcccgtggacagaggagtctggccagctacagtccatgggctcacaaagtgtcggatgtgactaagtgattaacacacacacctggtagtattttatattaatgtctattaaatcttattctgaggcttcaatttatgattccagcttcatttttaatctactactttgcttatcaaagtcaaatgtcagtttcccttaggatcatgtccatctacctttgaaagagactctaaaatcagtgacagctggcagttggctgtggttgtggttagattctagaggctgacttgggttcccagccacagccttctcacaacacagcagaagaagaatctctttccagttggctatgacagaggcttatataaggcagcgtaaccaagggggtgactgttccaccttgtttacaggtccagtctatactcagtggtcacgtgtcccaggaggtagaactctcatcgacagctctgagatttctgtgtgccgtagtggtttccaggcagaaacaagttttctggaaagtttaagagcaaacgacatgtaacaactaagtgccctctccatcctttttgactgccaaaaaacaagttttactggaagccccacctagctgacttctgcttatatttcattaccacaactaccacaaggaaaccaggaaaatcaagttttcactatctacttgtaattaggtttctgttagaaaggaagaggagatgttacatattgcataaatacaatagccagggcatgaatggaaatgccaaatggagaaaacaaatcttgtctagtttaggaaaaatggaagttaataatgaaaaataatcacataaaaactcccacacaggattaatcagtgttaacattgtcatatttcttaactacattgtattatatgcaacttaaattatgaacatttttgtgataaactctttgcaaatatagtttaataactgtataatgttccatcataaggatacaccatagtgaaagtgaagttgctcagtcatgtccaactcttcgcgaccccatggaccgtagcctaccaggctcctccctccatgggattctccaggcaagagtactggagtgggttgccatttccttctccaaggatacaccataatatctcataattaattctcatcagttcttcagtgctcagctttcttacatctgtacaagactactagaaaaaccctacatttgggtagattgcactattgtaaataatgtcatgatgagtactttttatgtaaaatattttatatatttaagattattttattagactttatttttagtcttgttgttcagttgctcagtcatgtacaactcttcatgaccccatggactgcagcacaccaggcttccctgtcaatcaccatctggtggagcttgctcaaactcatgtccattgagtcagtgatgtcatccaaccatctcatcctctgtcaccccttcttctattgccctcaatctttcccagcatcagggtcttttccaatgagtcagctctttgcattaggtggccaaagcactggagctccagcttcagcatcagtccttccaatgaatattgagggttgatttcctttaggattgactggtttggtcttgcagtccaagggaccctcaagagtcttctctaacaccacagtttgacagcatcaattctacggtgctcagctttctttacagtacaactctcacatctgtacatgactactggaaaaaccgtaactttgactatatggacctttgtcagtgaagtagaatttagtagaattactgaatcaaaagatggactttttatggatcttattacataatttcatacctactttccaaaatgatgagctaatttatacttgccaacaatggatagatgttttcatatttctatgaagacactctaaaatcccaattttatcatgtcagtctgctttttacctttgtatctaaaaaaaattgctaagtatgccttttatgacttcctcaaaatttctaatacaaaaaatgaggttaattctttataagatcagaggtttgagttttgtgtcattacatgaaaaactattcttgtttagcgtaatcaaataattagtagtcctcaagcaccatctgagacaattaaatttaccaagttcactttgcctccaacctacagctacctcgtccataggacattatggtgggtattatactaaacataatgcagaaggcagtcttctgaacattcaatctgaaatctttattacagaaaaaaacagagttagtctttttgtgttagccttctctgtgtcatctatttgtcccataccatattcttcaagcattggcctgcccctttgtgatactactttgctctgaataaactccaatactgtgtttttctggctttagcactttctccaggcatgttcttagactcggtctgagcttcctgacccaatctggatgagttcagaccacccgtgaatctgttctgagttcacttcccttcttctatcttttgtatgtattatttttaaacctgatcttacctgagatattcctgtagccaaactggtctgttttaaagatctctttcctctttcttcttcactgggttacttgtgactgtatagttagaatccctgtttctgagcgtcctgatcttattttttcctagactcagtcttatggatagttttccatctgtgaggaaaacctacataactttccattcattctcgtctatttctgttttaaagttcatgaaatatttatagatgtactctttccttcctgctgtatgggattcaggggtgaaataaagatattaggacttcctacaccattcatggttcaaaattaatcactcttattttctttgtgctacacttttgaatgtcagtattcaaaaatatatactctgtatgaagaacttagaaaacagctagaattctgaaacagaagataaaaatgatttgtaatcaaactaccaatagatttcagtgttaagatttggtctgtttcctttctaagcagaaatttgtatatattaaaaagaatttcatcctatatttaagcaatatttatccataaagtgtcaacccatagaattggcttgttagatacagacttatagttacatacatataataccagcaggaggaggaaggaaaaaagaagtaaaaggtacacaggattaacaacaacaacaaaatattaaatggtcttctgaacaatattttacgatgcaagaaagcatgtaatacatcttaagtggttctcaggaataaagtcaatatttttaaagtttacatttgaaacagaagcatcctttatctggaaaagttattgtccttttgaacctatttaattcagtagatttctatcaaaaaaagaaacagaaaatcagaactggggttgttttaagctccaagtagcctcttttgttctttctattttattttgttccagaagaaagtattcagtaactacttatgcctttctgaagaggtatttcttgtcaggtcatttatgtttcaacttcatttttctctttttttttttgtccaatatgggagcctcaatttcccacttattctgcatatgttgaagttatcagatgccactagatatgtatctgacagcacacaactttgtggaaaaatagttttctatttcttttacaaattatacgttgcttgtatctgtttaaaaagttcatgcatatatctgcactgctatagatgattgcaaatgtccataaaacaatatagtgttaataaataccactgaaggtttcctgatatttgcagtgattctttcgtgggcagttttgtgcttttaccccaggcgttccctttcagctctccctacaggttgtccatagataagtctccatctcctatgtattccatctctgaaatcacagtgttagcccaaagtgttcacatgacctaaatcgggctcactcctaataccacttctctcctagacagagtcgctttagtctcaagtgtgaatgcgagacggaagccaaactcatcagcgttctcccccaagattcctccaactgagtttgagggaaggaggctttttctctttagtgccaaagctacaaggatataagcccagaggctgctggcatctgtctccctcttttttgtgtgtggctatgctgggtcttagttaaggtatgcaggctcctctagctgagaagggttgaggggaggttaattgccctaaggcttgtgggctgcagttcctgactagggatcacacccattcccccgcatctgcattgaagagggtttcttaatcacaggacttccagggaactcctatctatctccctctttatatggaaaaaaatagctggacagagaaaaacaagctgacctgctggtgtttgagagcctaagggcattttataagggtcttggtgtggactgaatcttttaccaattctgtttcccctgggagctagcctccagaggacctaggcaattcaatgagttcctgatttttgcaaaccaagaactcctggctgatcatgtagatggagcacactcatgctagtaatgactggttaaatgaacgtctcatacttaaactttcaatttgagaaatgtttcccattaaggaagcattattcttaggactcttatgaatttaactacactagtcaagcactggagatggtctcaagagtcatcttcagtcctgtttggaaaaaggcagagtataaatactctcctcctgtgcctgatgaaactgacgtcagagaggaggcttgatccttttataatgtctgagctaatttgtagcagcatcaaggctaggaccaggggcccttaattctcttgtctaaagctatcccgagtttaaggggaacttcactataatagatttcaacatagagcagctcacagtattttttgtgatttttaatcagtccatttttctttcccttcccctggccagtccattcataagatacttgttgagcacataccatgccaataggccctgtgtcaggtgctggtaacactcccaaatgcataaagggccactttctctcttaagaattttactatctggtgagaaggtaaatttctaggagtcattgcaattgtgcatgactagaatttcaatagggaactgctatggatgcacctaagagaactacccagccctaccttgctcagggtggggtgaggcgctggtcggagaagactcaccagagggaataatctcaggatctcatcattccaaatcaggcctgtggcttacaattttgtgatctcaccctcctctgttaaagtcatgttaaaacaaaaagtaaaaacaaacgaacaaaagaaaacatgtcagaatttccataatggtctattggctaagactccacactccaatgcaaggagcctgggttcgactcctggtcagggaactggatcccacatgctgcaagtaagggtttgcgtgccacaatgaaagatgctggagtgttgcaactaagaactggcccagtcaaataaaaaaaaaataacaaacaaacaaaaacatgtacttcttttcaggtgaggctcagaaaaatggaaaaaggcaaaaatggaggcaacactccctaggaaaaggttaaaaaagccaccagtataacacaaaatcgggtaataagtgtctctacccacccagccctccagaggccaccacagccactcccatttattctaccactgctctcaatcaaaagttgccaaattgtgcaaagaggaacaccagccctgtgagacagagcctgagatcagtgttctgtgatcagataagttcacagactcctgcatactcattctctgcttggagataggaggggagaaggggaacagcttgcttctttctaagcctcccctcccaacctgaatctgcctgaggaatcctgtgataaagaaacattatgaattatttttaacttaacatgcctaaaattatttaaccatagatgcttttttcccccggtaccaccttacaaaactgcaaaactgctttaagatcgtttactctgacaaagaggtatgtttgtcccttcaaacattctcatataaaacttactatgcaatgttggattatttccaaagtgttgtattttcttctcaggggctcttgcgtgcctaaactattgctgcattctttcaaatatctcatctcatcttatacacattcacaacaaccttgcaaaaccgtcattattttaatcacagattataggtaaagtaattgtggtacagaatgaggagagtgaggttatggtgacttctctgagattactcagctagcactgacggagctagtatagttctgagtctttctaccacactgttcctcttcaataaatacatgcgcaagtaataaacattgaaaataactaaaagattctaaaactgggtaacgtacttgaatttcatccaaaaattcaaagcagaacgcaatggaatccttgtgaatcaagtagacaccagcagctatattcttccaaatgaattgtgtttggcagatacagatggaataagaataacccaagcaaaacacacggagggaatggcctgtggcttaactcaactggaacttagccaagtgaggagaaccggaggagaggagacaacagagtcaaggcgtggctgagctggctggccctcaagggtcaagggtcaagggtcaagtatcagggtctgcactgattctgagcaggcagtgggagccaactcagagtttttgagctgggaatgggattgaggcatgaccatcagtacactttaatgagagtggtcaggagacagtctggcaggaacatggaggatgcttgccgtgggaaaaaaacgaaggcctgtgatcagagaagagaggcgattacacagggctgactcaggctgaaatgtcagaatctgattgtgagaaaggagcatatcaccatcctcatctcaaagcaggggtggaagaggcctgggctaatgagatagtcacagcctggctgactccgtagtgtaagaaagcacagagtgtagactttgatgaatagtgcctggtccctggagagtgctcaatgattatttgctgaaaaatgaattatttcgtttagttacatgatctttcaacattacatgataggaacttcaaattgatgtatcacctcctttttttttttccctattacaagtgtgtagaaggaagaaaaggataatgttattccacatcaggaagagaaaaaattatatagcacatgcaaagtactgccccagcgaggtggcccaggctaagaatgacttgatatctgactgaggaatttaggagttagacatcaggggttagtggcaaagagtagacatagattctaggccacagttctggtagctagcttgcatcatgaacttcctaatataaaaaggggatggaaagatggatttgtttagttttatccacatattcacttttactcatagttcttttctctatattttcacccaagagagtattattctaaacagaggacgtttaaaagctcctctgtgcccccctggaggagagcatggcaacacactccagtattcttcccttgagaatctcatggacaaaggaggctggagagctatagtccgtagggtcacaaagagtcggacaggactgaagcgacttagcatgcacacacttgtttctgtatgttttcacttgtttctgtatgttttctataagagaacattattttaaacaaaggatgttgcagccatcaaaccatcacattacagccacctgcacagtaggccctgagggatctcagggtagaaatgggatgccctccacttagcagtcagctactgcagccacccttgaggagactcaggatgaaaaagcccaggatactggccccagacagctgatgtgcatatcaaaggaataatttcattgagcccagacccttgcattttcccatacttgcgatatttggttttccttagttaacagtaattttttgatgttctaactacctgattattgttgcaaaaccttctatgtatccaggcttctcctttccatcttcagaacagccgctcagagctatcaagaggctatgtcccgggtttacatcctcagtttggcctgcaaacacagcatcattctcgactttacaacatttcagttttctcagctctcaacttttcattccaacaatactttctaaaaaagtaaagatttcaaactctctactaaaaagtgagttaagggctggataaaaggagcatatgtaaagaaaagataaactaaataaatttttcagctagaattgaccttccattcagtttcataaaagttcttaagaggagatgatgatattaaaataattttgtataatatagagtcattaaaatacataatgttacccaccttctactttttgccccaaataagatatttctaatcatgctaattctgtcaagtgggtgttattctctctaaattgcaggtaaggtccagaaaaattaagtatttttctaagttcacctacttattaaatagcataggtcacctgaaatagtttttgaagcaacaagatatgaagagttatttttaaaagagaaaagtcagtactctgacataggtccactcgactgcaaagcctttagcagttcagctcagtttttataaactggttcagtcagtcttccttcattttacctaaaaagaattgtgtcaaatcgtagctggaacacaagataggaacaggcagtttgacttgtgaagtaaattctgttgtgcatatgttttcctttttaccccctgcagaaatacctcacatctgaaattatcttcaggttgaaacctgaacttgttgctgttctgagggcctccttgattaggtcaggcattccttacccagtaccttccaagtgcctactacttgcgggcactgtgctagacactaggctacagcagtaagcccccaggagcctcctgtgctgtgaaaatacggacaaacaagccatcgtagtgactagcgataggtgcccacagaaaggggcacttgtctcagccgggggagttagaggcaacttcttatgaaagtgatcactgaagaatgacctaaagggagaaggtgaagagagacagattcaaaaacggagcatgtattcatctgagggcatatgtgtgatgtctaggtgcttcctctgtgtctatcatttaatctaacaggtaccttatcaaccatagttgtcattagcctcattttacagactaagcgaaggaggctcaggctttggactttcccttggccctgcagtaaatggcaaccaactttccaagtttgactccaagcctcattctctttccattacttcctgggacggcaatgttctagtctcagttctctacttggcacatagagatatcagaatggaaacctttaatcatggtagaaatgtccgactctgtgagcccatggactgcaacccgccaggctcctctttccatgggattctccaggcaaggataccggagtgggttgccgtttccttctccagggcatcttcctgccctagggattgaactcgtgtttcctgcttggcaggcaaattctttactactctgcaagctaagagcttggttgctcagtcctgtctgactctatgcaaccccgtggactgtagctggcccaccaggctcctctgcccatggaattttccaggttccaggaaatcttcccaatccagggatcaaacccatgtctcttgtctcttgcattggcaggtaggtttttcaccagtagggctacttggggaactaagaggtagcctgtgtgatgccaggcacgtcactgccctcctctgttgccttaatttcctaatgcatcaaagtcaggctgaattagtgcatcacctgaattagtgatgtctactttccctctctctttaatactgggtggttctctataaacttggagatgctccatggctggactggggctctaggtgctgggagagggatgagagggagacaaggagaatgggctggaaggtaggaggccctgggactgtaggaaagcggggagaaagagggtgtgaaatggacttttacatcgagtgcgtgagggacacgggctgaacttgggtgacggtggggatagggaagttattgtcagagggacgcggtctttggagctgatcttatctgacaatgggactctatcctgtgttgaaatcagtgacaatatgattccacccgtccttcccagtgcccattaggtagaccaaagtctgatatctttcagatctgtcttcctttcattgagaacatgtggcaaaatgcaaaactatgggctctggactgaggtagaccctcacttgggcccttacaaactgtcagccgggaactataagacatcaatgagaagaagagaagatatagaacctttgaggattggattggaagccagattttgctccttactgtctctgagaccttgactatgtccttttagccgctctgagcttcactttcctgttctctcaaataatgtcaatacttcccatctcggctttgtcgtgaagattatatgaaattccagcttctgagaacaaggtctgagatgtagggttcagtttagaggagtctcaggagaagctcatgactgccagtgggaggaagtacttgcccaaaggcagggaggagtggtctggggggtgagggaagaaaacgcgctgtacacgcagaaatacgggtgtcaatcacgcttgccccacattagactggaccgacagtcaatgggagctcgcagaaggtttggcacttatgcactccataaacaagcgccggatcttcttagagaaagtattttcaaagcacttgttctgcgtaagacttcttgcactggcattattatctggtgggccatctgctctaattaaaatttcacggagctgaggaatttagtaccctaacctcagagtgcctggtacacttggtgtgttggagggtgatgtatttggaaagattagaggaggatgaattctcttccagcttctaacgaagcagaagtgaaggttttctgctaggatgtttttgctctctggcaccggggggtcagagattaaataatttgccaccagacagatgttctaaagagctaattaaaaaaactgacacgtacccaagacctcagatagttagatttatatgcctttctctctgggaagatcaaaatcactgcagcttaaaattgctgcactcaatgctatttccagagagttcacgattgaaatgaaaggagcatctttaaagacattcttaatgatatgatatgtgtctcttaatgatatgagtgtgtctgaaatctgaaggcacatttcaaagaagtggaaaatcttaaaaaaaaaaaaaagcccatgctgggcctcatcccagaccaatgtttggaaggagggccctggcaacaaattttcttaaactcgctgaatgaatatgcagccgggattgtgtactgctgatttagaaataaaactactttaatatctgttctaatcttggagataaggtcatgtcatatatgggagcaggatagaaaatggagttaggcctatttggttagaatgacagattggccaagctcttattctgttctagttaagttacttaaccttggtaaaggttaaagtttccttacctttaaaatatggctgttagttctttaatagattattgtaaggattggatgtgaacagtgtgtccataagtaaagcacctgctatatgcccagcacagagtggacactcaataatactatggtagttaccaccattttttttttttactaaaatgctttgttggccattttaagcctacttctcggggcaagcgcattgatataaatgaaaagatgctgagcagaaatgtgaagatgagcacatatctacctaaagtagtcagcaccgtagaccaccttgtcatactgcaaatacgtaaagaaatcacagccagattcagtctaagtgaatgtgtcttggaagtcataggagcgataaattacctttactgtgaaagatcctcctgaaagtgttgttaaaactctctagaagaaatgtcaataaaaattcccaggtagtattttgcacttaaaccaacagctgattctcaacaatcacctagaaagtgtgggcctggctgtgtctacttggctgccaagaagcacagtcagttatatcacaatataattgtcccaaaggtccaaacctatagttttatcaggcagggtttgattgttcatgctcatgtttcacagaaatgggagagggaaggtagttctgtattgctctcccttctgctagtctagactttggctgtgactttaagagtgaacagaaagacagaaggaccagcagggcagagcagccatgcctgaggccccgaccccaacttcttacccttttaaggatggaaatgaatgccctgtttatactgtgctcctttgtttctttggggaaaatacttagggggagttgagataaggctgtgccctaaacgctatacagcttgcctttttgcagttggtatattatagagatcatggcaaacactggtgtttactgttcgccttagactcacctctggctgtgggccagccacctgccccttctcaatctcagtttcctcagctgcaaagtaaaggcatagaatacacacattatcatgttctcctgatgattaaatgaggagaatatgtagataaatggctgagaaaagaagagaagctaaaggcaaaggagaaaaggaaacttatacccatgtgaattcacctgcatggcgggagacctgggtccgatcccttggttgggaagatcccctggagaagggaaaggctacccactccagtattctggcctggagaattccatggactgtatagttcacggggtcacaaagagtccgatatgactgagcaacttcactttcactttcacccatctgaatgcagagttccaaagaatagcaaggagatataaggaagccttcctcagtgatcagtgcaaagaaatagaggaaaacaatagaatgggaaagacaagagatctcttcaagaaaattagagataccaagggaatatttcatgcaaagatgagcacaataaaggacagaaatggtatggacctaacagaagcagaagatactttgaggaggtggcaaaaatacacagaactatacaaaaaagatcttcatgacccagataactatgatggtgtaataacccacctagggccagacatcccggaatgagaagtcaagtgggcctcaggaagcatcactacaaataaagccagtggaggtgttagaatttcagttgagttatttcaaatcctgaaagatgagctgtgaaagtgctgcactcaatatgccagcaaatttggaaaactcagcagtggccacaggactggaaaaggttggttttcattccaatcccaaagaaaggcaatgcccaagaatgttcaaactactgcacaattgtattcatctcacatgcttgcaaagtaatactcaaaattctccaagctgggcttcaacagtacatgaaccgtgaacttctagatgttcaagcttgttttagaaaaggcagaggaacaagagatcaaactgccaacattcactagatcatcaaaaaaacaagagaattccagaaaaacatctacttctgctttatcaattatgacaaaacctttcactgtttagatcacaacaaactgtggaaaattctgaaagagatgggaataccagaccacctgacctgcctcctgagaaatctgtatgcaggtcaggaagcaacagttagaactgcacatggaacaacagactggttccaaataggaaaaggagtacgtcaaggctgtacattgtcaccctgcttatttaacttatatgcagagtacatcataagaaatgctgggctggatgaggcacaagctggaatcaagatttctgggagaaatattagtaacctcagatatgcagatgacatcacccttatggcagaaagtgaagaggaactaaagagcctcttgatgaaagtgaaagaggagagtgaaaaagttggcttgaaactcaacattcagaaaactaagatcatggcatttggtcccatcacttcatggcaaatagatggggaaacaatggaaacagtgacagactttatttatttatttattttggctccacaatcactgcagatagtgactgcagccataaaattaaaagacacttgctccttggaagaaaagttatgaccagcctagacagcatattaaaaagcagagacattacttcaccaacaaaggtccatctagtcaaagctatggtttttccaatagtcatgtatggatgtgagagttggactataaagaaagctgagcactgaagaactgatgcttttgaactgtggtgttggagaagactcttgtgagtcccttagactgcaaggagatccatccagtctgtcctaaaggaagtcagtcttgaatattcattgaaaggactgatgctgaagctgaaactccaatattttggccacctgatgcgaagaaccgactcattggaaaagacactgatgctgggaaaaattgaagacaggaggagaaggggatgacagaggatgagatgtttggatggcatcaccgacttgatggacatgagtttcagtaggctccagcagttggtgatggacaaggaagccttgtgtgctacagtccatgacatcccaaagagtcagacatgactgagcaactgaactgaactgaactgctccttggaagaaaagctgtggccaacctagacagcatattaaaaagcagagacattactttgccaacaaagatctgtcttgttaaagctatggtttttccagtagtcatgtatggatgtgagaattggactataaagaaagctgagtgccaaagaatcgatgcttttgaactgtagtgttggagaagactcttgagagtcctttggactccacggagatcaaaccagtccatcctaaaggaaatcagtcctgaatattcattggaaggactgattccaaactaaagtccatcaccaacctgatggacatgagtttgagtgcgctctgggagttggtgatggacagggaagcctggtgtgctgcagtccatggggtgacaaagagctggacacgactgagtgactgaactgagatgtagataacatttattaaatgtatgctatgtcctcttcactgttctaagtgtcttgcatgttgtaagtattaacatgtattaacttacaatcatctgtaaaatagattccctttacagatggggaaactaaggtggggagtggttgaaagagttttgccaaggtcacaccaccagaaagggagctgcagtgtttggcttcaggcttgtgccatgtgtattatatcctgtgctgttttgtggaatgcacgtggtcagtatagtgcttgctcctcttcctggcttcctctgataggctccaatctgaaatagatgtgccgtggcaaccatggtacacataacaagtatttcccaagtgctcactgataaattaagtaattaaaaagagtactaagtgtccagcgcttccctgatggcctactggtaagaaatccacctgccaatgcaggagacatgggtttgatccctcggtcaggaagatcccctggagaaggaaatgataagccacttcggtattcttgtctggagaattccatggctatagaagcctggtgggctacagttaatatggctgcaagagttggacatgacttggtgactaaaccacaaccacccaagggtccatctagttttgtctagtaatggatttgtattgaattgtgtgttttgatacttcacttgcaaagaaatctcagtggctctatctggccgagttttcattcaaggctcatagtagccaggttccagatgcccttttcaaccttattatacctctgctgtttaccttgctagtataaggtctcgcaaggacagactttagcgttgtctttgtatgcctcatacttagaagcaatctaagattgcttagattgaatgattgaatgactgtgagtcatcatgaattgctacccttgttcccaggtacaatctaaaagcaggcgcggccactcctgggctctgacggtttccttagtctagagccccatcctccataatctcacatcctagtcctgacaccaccagctaatgtgttaaaagccacagtttccctggcatcatcttatcttttactaaaatgaccctgctaggctgccactaatttggcttaagttttagttgtttttctcatgaggatgatggattttcattcatttgtccacacttcactctcttcattagtagattttgccaatttatgctttacaatgaaagaaccctattttcctggcaagttaatataggagtggaggtttaaaaatactactgtcaaatctaacttatattgcttatccaggagggccctttttaatgcttaaaactagctttatgaaagagaaaggatctaagatttattttgcacccactggtcctaacattgtagtaagaacttttgttattgctcttgattttgaaaagttgaaaaaggaataaaacttggtaagagccaggccttgatgtcagcaacatctggttgtgaattctggccctcaaacccttctgctgtatgatcttggcactgggaggagtctcttaatctctctaaatttaagttgtcttacctgtgaacagatatgatatcccacattttatatttgtgactgagcaggcagcacgtgcattatcatcaagactgtcacatggatgaggaaagggaggcccagggacatgaattctggctctccagcttccaggccaatggcaggactgcactgctccagctgctctgaagttgggtgtgaacacatgactttcatggggcaatgaaatgggaggataaacgctgtgtctccctttcacttttctccggaagcaataagagccagtgctcaattcaccatgttcttttctccctgcttctgcaagcatggcaagcacggagatggaatttctcttggcctaggttgatggcagaaaagccaggtatcctatgatgcatgtaggatgagtgacagttatgactttgttgctttaagctgctgatttgggagtgtgaatgaattctggtataaaaaccagtaagaccaacaacaacatcacaaacaaacaaaaaaacaaccagaacttcaccttattttagatttagaaaccctcagaggaatttttattaaggctctgttaaatgggagaggtttgttgtttgtggaactcgaaaagttaccataagctttcatagcaagtgaactcagggttgagcttgaatgaccaaaaacgtgttaaggaatatttacaaaacaaatccatatatttacttttgtgaaagactaaaatgtaaagttcttagaaggaatcaacgagagcgaggggaatagaaagaggatgcatgggacagggtttgcagctgctgctgctgagtcgcgtcagccgtgtccgactctgtgcgaccccagggatggcagcccaccaggctcccccgtccctgggattctccaggcaagaaccctggagtgggttgccatttccttctccaatgcatgaaaagtgaaagtgaagttgctcagtcctgtccgactcctagcgaccccatggactgcagcctaccaggcccctccgtccatgggattttccaggcaagagtactggagtgggttgccattgccttctccggggacagggtttagaaagagatatttaagtactgccctttgtttcatataaatctctgcgctagtgttattctagaatactgaatactaaaagctgttttctccccttaggaaaatatcaacatcgatgaggcctccagatgcctggtgaaacatatacttgccaatgagtgtgacctgatggagtccattcagcctgacatcgtgaagccgcatctcacatcgcccagggttgtcagctgctccagctgttccaaatcctagtaggctcctgtgctggagtatggtggtgggaggaatccatcatctcatgaattgtgtctcaaattctaccatcttggataaatgtcaggatggggatacacctggggcaagccaaagacctatgcctctaactttctttcctccaagagaaatagcaaatcttcctttttatgtttttttttccccaccacagcatcagcacagtgtttacaagcttttaaaatatttagtctgttacaaaattctgccttgtagctgactgtaattctgcacaaacagagttggccctattatttgcctctttgggtcagccagggcctcaggtctgaaagagaaaggggacaagaacagactagctgtcaagttaagcgctggctttcactttgcccctggtgtctttgtccagacctcagtacatcctctgctgctctgacaggcctattaagtagaagctgtcctttctccagagatgacctccattcccagcagacctggagctg

SEQ ID NO: 90 - DNA, 7113 bp, Hippotragus equinus
  source 1..7113: mol_type = genomic DNA
ctctggaataaatgaactgaaattcttagcacagtgggaatggagggggtatttatgagatatcatggaaaagtgcggaggccatccactgatataggtaacatgaaggccaaaggttaggctggaaggagaggagccaatgatattttttgacttctggagttccaggtgtctcttgaacacccaggtgatacctaataggcttatgaatacgtgtgtgtctgtattttttttttttccattattacagtttgcaagacacgtggactggagatacaagtctgagtgccattggcagtacaggtagcaagagtgtcgatgtagtcactcagagaaagtgtgggccagaaggtctgtggactcaggactgagctctgaggagctccaactccaagcggttgaaggctcggatttgttaacattctttcaggagcagggtgtgaagaaaggagcagtaggaaaggagatcaacataatttagaggaaaacaagctgaagagatgagaagagagggacgaaactgcaggagagaccagaacacggtgtcaagtcgaggaaagtcagtagcatcaaacactgcagaggtcaacgaagataaagacaggaaacttcatgttaggtttggcaactaagaggtggccagtgcggccagagtgaggtcactcgagcgctgaaagggtgagtttccggctgttgaagaaattttttcagctgaaacgcagtttgagcagctggctgggaactgcaccccgcgctgctttcccgagctcatcagagttaagcgttcacactaatacttcaccagaaggctaacagggacttggcgtttttcgaacagagcgcgcaggaatcctgcgcaggcgtttccggagtcggaagctctcctgcgggcccctccccaggcctgcagagggcgctgtgcctcggagaagccagggagtgacgccgctctagccagcgctcgggctcggtggcgggcgccgcagctccgcgtcccgctcgcctcctcccagcacaggtgggtccgcccgcggggggcagcagtgcttgggagccttggggcgggcgggtagcggcaacctctgggcacggagtggtctccataacctaagtgccccaactcgggcccggctccggcggatcgggctgtgggcagggccgcacgtgtgcaagtccagttcgggtgggttcctcctggacttgcagtgtctgtcccgggaccccttaacaccccagggatctccgcccgggcttgctcacggtttcctggggacatcgaggggcggggctccaaggggcgggactcccatgattgacacgtctttcgccaggtttcacgggcaccactggacccttcccctgccctgaatctgagccagcaccatggtgagaaccctgagtccagctcctcacctccgcatgcgcatgcccttgcccttgtccggcgtgggcttgcctccgttgcccgatataaacctggggctccgccggggtggttccggtgggtctgccccagcaaggcagcctgcactcttgcaaccatagcacgggcgcctgaaggtgaagacatcggaagagcaagcggaagccaaaagactagagcgggaacagaagctgaagctataccaggcagccacccagactgtcttccagaaggtggggccctcagaggtagtcccctcccaccgtggctcctttagcatagcacttggccaagaactgcgccttaagagtcaggttgcttgaatccacatctaggttctatcacttactagctgtgtgtctttaggcaagctactgaatctctttggacctcaatttgcccatctgtaaaacagggctaacgattgcacttactgcataaggctgttgtgaaaatcagtgattgcaagattacatattatcccataaagggctttgtatagtacttgtagtaaagtgtggcattcacagaacattcagtagctctatttatgttatggagctctgtagcagaagagtgatgtgatccctgatcctgctatctatcttctcagcgccaggctggagagctggatgagtcagtgctggaactgacaagccagattctgggagccaaccctgactttgccaccctctggaactgtcgacgagaggtgctccagcagctggaggcccagaagtatgtaggggtttagggcccaaggaagatggccctcgctctggccctgcccagcctaggtccaggggtggaagaagaatggggcagccaggggcataggaagagggcagtggagggctaggtgcagaaagtcaggggtgaactaagactgggtgttggagggccctgacccccattcgtctgggcacaggtcccccgaggagttggccgctttggtgaagtcagaactgggcttcctggagagctgcctgagggtgaaccccaagtcttatggtacctggcaccaccgctgctggctgctgggccgcctgccagagcccaactgggcccgggagctggaattgtgtgcccgcttcctcgaagttgacgagcggaactgtacgtgcctgcagattctgtctccctgcctacacctgccccatgtcctggtagtagggcctcagtaaggtccagagttgggagggatggccaggatgagtccactgagctgatgacagaagggatgacgaggccaaatgtgtcctccatggagggcacagaggtgtttcttggggtctccaaggggatgccacggtcccagccaggcagctcttctttccctgcttctgcgatgtgttgtctacctatccccccagttcactgctgggactaccggcggtttgtggctgcacaggcagctgtgccccctgcagaggagcttgccttcactgacagcctcatcacccgaaacttctccaactactcctcctggcattaccgctcctgcctcttgccccagctgcaccctcagccagactctggaccccaggggcgcctccctgaggatgtgctgctcaaaggtaagcagggtcagggagtgcttgagaggactcttccatgctgcccttctgaccctgatgcctaggcctgctcctgaacctaccactcgggaaaatgcccggctctggggatgcataagatacagcccctggctgcagagagcccaagtgtccacttggctcctgatgtacgcagcccctgggtaaggctggcatataagtgaaactgaaggcaggaagttctccaaagagagggcagtatgtgggggtagacaggagcccagaagggtcctaagcaaagcaccatgcctccttggcccctgcagagctggagctggtgcagaatgccttcttcactgaccccaatgatcagagtgcctggttctaccatcgctggctcctgggacgaggtgaacagtagggaagaggtgggggattggagccaagaaggaatggaaggatatttaaggagacctgagactgtttcttcccacagctgatccccaggacgccctgcgctgcctgcacgtgagccgggatgaggcatgcctgactgtctccttctctcggcccctcctcgtgagtcccgaagcttttgctgaagggtaccgtggatggtgggcctggtgccgttggagtgatggtctgtctctgtcccctgtgccaggtgggctccggcatggagaccttgctgctcatggttgatgagtcacccctggctgtggagtggaggaccccagagggcaggaaccggcctagccacgtctgggtatcccagggttggtgggtggagtcggggttgggacagggctggggtgggacagtcagaaaagtggtgcagcctgggctttctcttaaccctgtgctcccaagctctgtgacctgcccgccacctccctcaacgaccagataccccagcatacatttcgtgtcatttggacggcaggcgatgcccagaaggagtgtgtgctcttaaaaggtgagccagcctgcagcctcccccctttgcagcagcgccccccatccctgtcttcctctcatgggtgtcctctcccacccctgctctgtctctcaggccgccaagagggctggtgccgggactccgccacggatgagcagctcttcaggtgatgcgcacagggaagcacacagatcggagcagggctgtgcactctgggcagctgggtgggatgccgagggctcaagtagatgtctcagactggctcctggggatgaccagcactgctccccgaccctgcccaccctcaggtgtgagctgtcagtggagaagtccaccgtactacagtcggagctggagtgctgtaaggagctgcaggacctggagcctgagaacaaatgtgaggcccgattcccctgagcccctgcttctctgagggcccatcctaggcaggctccttgccgggaggatccttccgtcctaatccccaccctctccccagggtgcctgctcaccatcatcttgctgatgagggcgctggaccccctgcactacgagaaggagacactgcagtacttccaaaccctcaaggcaagttgggtccgcgggagttggcacggaggcagcccagcacgcaggggccaggcagctgacacacagtacctgtgccctcttctccccgccaggctgtggacccaatgagggcagcgtacctggacgacctgcgcagcaagttcctgctggagaacagcgtgctcaagatggagtacgcggaggtgcgcgtgctgcacctgggtcacaaggtagggcgtgcgcatgcgccttccccaccctcaccccgctggcccgcctccctcttcctcagcaccggcagtgtctatatctgctcctcaggccccagccaagacactcaccgtcccccgccttgccttccatctcacgtgcccttctggacatttcttccttagctcattccatgcttctctccctggggcagaccccaacacctaacggctgaatagttctcagagatttctgacaaactcctgactctgtttttcctctgtagtccttcctaatcaatctccccaacacgttatttttatcacggtgctgctgcccacctttgctcccaccaaaccaactccgggctcactgggccctctcccgctagtatctgtgttcatcccagcaccgtgtacctgccccgctccctgcactacaggccaccccggcccggtgtccttgatcaggagcatgtactgctgggggtggtgaggtatgcttctcagctgctccctcctgtcctcagctggggacccccagggcctgtgtggggcgcactgggcaaagacctgataaacgacagctgagagctgtccgccaggcctcgctgggtatctcgtcccctcctcaggatctgacggtgctttgccatctggagcagctgctcttggtcactcaccttgacctgtcacacaatcgtctccgagccctgccccctgccctggctgccctgcgctgccttgaggtaaagcccccaatcctctgtcattgttctgggtttccctttccccttcctccacctcacaagtcactccaccctactaagaggtgccgggtcctcccagcccccacagatgacccccgccttctcctctgtcacccagcctgaccccaggagcctttccatgccctgtgagctgatcaccctgggctccccggtggcttgtgccaatcccatactggcggctgcctgcctccctgccttgtcttccctgctcccaggtgctgcaggccaatgataacgcaatcgaatccctggatggtgtcaccaacctgccccggttgcaggagcttgtcctgtgtaacaaccgtatccttccgtctgggtgccattcagacagcagggagggcaaggtgccataccaggaagggatggccaagaggcagggcgggcatgccctgggcgtgaggagggggcattggccatctaagctgaggagaggatagcctggctctgtatgaggctgtcattgactctcactggtagagttttgcaggatggaaggaagtggctccctcaaacctgagttcacaaaccactgcctacagatgttcttgggtaccacattgtatgtttaaaatcaggaggttttatattctttaaaaatctagaattccgattattctcaaacgtgtaagttgaagcacgctttggcctgcatttccacttgggagcccttggccattgatgaatcatgggcacttctgcagcaggggctggctttccccttggccacagtttccaccactcctccgggaccatatcccctcagggtcctgcacctcctgcctggcccccaggggcaggaatctgcagcctagaggcctgtgtcctacagggaagtggccaaggggcccatccagcgggctgctcagtagcagtgctcgatctgcagtgacaggtgttcaggagcaggcggatctggagaaccagctgagctttccttgactcctgcccaaggcctccagcagcctgcagtgctccagcctctcgcctcctgccccaggctgaccctcctcaacctgcagggcaacccgctgtgccaggcggagggcagctcggagcacctggccgagctgctgccttcggttagcagcatcctcacctaagaggccctgcccccacccttgccctttaacttattggaactgaataaacaatgaagaggtccctgagcgctgctaagctgctgccgccaccacggttattgctgtcaccactgcttttctggacaagaaagggagagagatgtgtcggctcccccgccgtgcttccattttatgctcagtcttgctgttccctgtcggggagaagcagaacctccatgttgggggcagaatcagggccaaggctggattggagtctgccttctgctttggggctgggctgcgcctaagctccaggctggcatcaggtttgggttcaggttctagttggagtggggctacaaagcatctggaagtctctccaactagaagggctgagagaagtttcttccgtgatctgtgccccttccagataccctgtttgccctggctgtccttcaccaaagctgttcccaggaggtgtgttcagggcgccctggctccactctcttataacaacacta

SEQ ID NO: 91 - DNA, 31125 bp, Hippotragus equinus
  source 1..31125: mol_type = genomic DNA
gcaggccgccgcagtcccgacagccctgggccatctgcattatgtgcaaagctacctgtttggcgccacatcaggtgtctgcagagaaggccttctgtgacagcgaccctcctaggagctggcttagtccacacgtcccacatcacggctggttgcctgccaccttcatttcccgtctgagcgcggtggttgttccaaagacactcctgcagtgtctttggacactggccatcagcagccacgggtgtgtctggaggaggtcggctcatgagctcgggagccgccgggggagcaggatacaccagctggcaaatggcttcctcctcccagggcagcaagggcagaaaaggcaacgtgaagttaaggccctgttgagtggtgtagaaggtccttagcagcagcttctcggaagaccagctccgtccccacagaaagagcacagacggtggtgcctgctgaccgcccttcccaccggcagcctgggcagaggcacagggccgctagaagacgggcagccgaggggacgtggtcagcgtgcaggcgtttatgtcctcggtgtgggccgcccggtgcagggagggctccgaggcgctccggttgatcttgggcagagagtgctggagcagctcgatggaagacaggatctgaaagaggtgccagggccgtctcggggggtgcgccgggtgtccccgcagcagcttcccctcgggccccagacaggcctttcccacccccacgcatggcgtgtgcaggacgcatgtctgcccacctccacatcactcagttcagtcgctcagtcgtgtccgactctgtgaccccatgaatcacagcacgccaggcctccctgtccatcaccaactcccggagttcactcagacttgcgtccatcgagtcagtgatgccatccagccatctcatcctctgtcgtccccttctcctgcccccaatccctcccagcatcagacccgctctaacgcgctcgagcgcctggacccagccttacctggggaaagagaggcctctcttccttcactttcttcacacagtcagctaccagcctcttcatggctttggggcagttcttgtatagcttgctgaggtctggggaggcgtacccgcggcccaccatgaagatgatctggggaagcagcgggggagggcgggcggtgagcagagcgcctctgaccctgccgctcagatggcggcccagcttcccagaaccagcgggtgggcgccggggacacacctggtcacggttgttgatgtgggagtaagggagctcccccgtcatgagctcatacagcacgatgccgtaggagtagacgtcagactggaagctgaacgggttattatcctgcatccggatcacctctggggcctacagaaccaagtgcatctgtcactgggcgccccagccgtccaggagccaggctgtctgtcccagggctgagtgtgccggtcctatcctcagaaagccccgcggctgctcatccccaagggctcccacgctcagatccatgagctcagagcccaacgtgaacccagcacccctgccacccaactccacgctgtgctgtgccgccagctccctccaggaagcccgtaatgcccgggagctgccggcacaggacacggcatggaggtgctctgggcttggcctggagttggcccccgggcccccggcccccggcccgctgtgggtgccgagccgcctcaccatccacaggacggagccagtgggctgctcgacctgctgagaaccgctccagcgcgacttcactgtggccaatccaaaatcgccgattttcaccgtcaggccttcgtggagaaatatatctcaatgctcgttaaggacactagtttagaaggacggtcccgttcctcctgaaaagccgccccaagttccccctggcaccacctctcggccctccctgctctggacctatggtgctgccgaggggaccagagcgagaggcccaggcagccctgttccttccgctgcgcgcacgggcagctggggctccccacagcctgcagggcctcacaccccaagactgcgagctcggcctgcacctcgccctcccatgaccaagagaaacacctcagtcctgagtgctgtctgccttcagacatttcccatgagaacaggtaccgcggtgacttcaaaatcagaaccaaacttgcctctgtcccgggtaaagtagtcaggcggtttaaggccgacgcgtgcgatctgctgatgcccagtaatccatacctccttagaattgggtgtctgctttcgcggtatgatgtgttggcccccaaacccaccactccttgcctcagacacatgccccaagtaggtcacatcccaaattccagcccaacacaactgctgtgcctcccacgggccaggagcaaagctggctgcaaagccgctcctctgagaggcgggggcgggaggcaggtatgcaacttgcctactccacgcctacagccccttctgcaaaagcacattccagtcggaaaagggctggttccaaccgtctctaaggaaaccatttctgtacattcaagaaagacaatttcaagtaatgattctaaaaatcttataactttcgacttacatctactttctgaccagatataatccacaaaccagaaataaacatgatacaaaaggccccttccccccagttagatttactaataaataacattctaaattaggcctgtttcatgcataaccaaaacaagtatctcaactttggtggaactctttccaaagtcacttttgctgaggtaaactttaaaagtcttctaaatttagaactgagcagtctgatgaaaccaccaccaaaggatactattggatttcatgtctctgtggatgatgttctttgcatgcaaatagctgtgaagggaaaataaatctatcaaaaaccagtttgagagacattggtaaaaagcagcttccttcaaattacatcaaagaagcaaaccacttggaaggcctgactcccaggtgaggagttatggggttggccaaaatgttagttcagttatttatttggttgcatcttacagaaaagcctaactgaactttttggccaccccagtacggggtactggtcctgccctggttcagggtggtccctgttaggactcacacctgaaagcaaggccacagcacaaacagggttgtcttttagcatcagttttattcaaaaggtaattctgacaacccagatgtccatcagctgataaacaagtaaaaccatatctgtacagcagactgttcagccacagaaaggactgcagtactaacacactgcaacacagatgaacgcctcaaaaacatgccaagggaaagaagccagacacaaaagacttccatctaattaatcttgaaagtgttctaaaattagatagtggtaatggctgcacaactctgaataaaacgagtcactagtcatttctgaaaatgtattccatgcaaattccgtatgaattttacaagcatgacaggagattttataaaccacttgcgagcacaacttaggctcagttgagtcgctcagtcatgtccgactctttgcgaccccatgaatcgcagcacgccaggcctccctttcaatctccatcactcaaactcatgtccattgagtcggtgatgcaaatgatcagaaaagtgacatctgataaaccctcaggaggataaaccacactggacggctacacctcagaggcgtggtgcaccccagaagccgccggcccactctgtgttctggggtgtctggctgaactctgagggcagcagctggaacctgaatctgagctccaagcaggtagacagctcaggcaagaaacccgacattctcattctttcagtccaccccacaggtttacttccagctgtgcaaaaatatcacagaatccacttaacagactgagctttcccgaatcttggttttgatttagggacaaggtgcacggaccccagacctcctactcgtcaagccatccactcactccattccctgagccgtctgccgggcaatgtcgatcagctggaacatctggaacttggtctcctggacgtgcaggtgtttgtagaggctgctgccctcgcaccactgggtcactatcgccaggttgtccttcgtcatgtaccccatgaagagcaagatgttcacgtgccgggttttgctggagggggaggaacaaaaggctctgcgcttctgcagacagggagatgcatcctgcccccgagcacagctggtgtgctcccgacaccgccgtgcttacaatcccggggctcgcaaagcaagcatggcagactgcgcccacacagccgctgctctgggctagcagggcagccgcccgggtgccggcctggacggcagagaaggcgtcccctcccagcagcacagacccaccaagctccccacgggggtcacagggaccccgcatctgcggagcccatccactcagcctagtcctgagtctaattagggactccacaaagattgaaaagctgatgattttgaagtccaaatgaaggccatttggctataaaaagttcttggaaataaatatgaaaatagaacctatttctccctatgtcaaaccaaaacccagcaacagaacctgagctgttgaggtggtgagcccagaggctgaggcggtgggagggcagtgccatcagagcggctcttctcaaggcctaacgagcacaggagctggaagaaggttccactcctttccacttgaaagggagctccacaggagcacgcccgcagaggcaggtcccacccgcccctccacagccgccacagaggcccgctctccactcaccggaggacagccacctcgttcctgaaggcctggaactgctctggggtggggtcaacaaccttcagaatctttactgcaacatctcctgcaaatgagtttacagtcagaacagctgaatgatcttaacttcatttttcacgtacactcgtctgaggaagagatagtaaatcccttattcaaaaatcatagacctacacaggacaaatactatgccaatttctgaattattcaagtggctgaaaaaaaaaataagttatactactatccttaaaattccgccccaaggccctgaaccggcttggtttcagctgttcctgtcaaccctggcattcccggtggtgaggtgaccgtcacaacctgggcccatgaggatgagagcagcggggtgtgaaccgcctagcagatgctgagtctccgaggccagaggctggtgcccagaagcgggccagtgacagcccagatgctccttgcacagattcaaagatctgcattgtaatgaagctcctctgccttcaatcccattagaaaccaatcctctcgacgacccctgaccactcactaaacctgacacgctgccttcatggggcggcgctgctccaatcctcagctgccttctcccgctagcactgctgacctcaccctataaataatgcaggggctcggccagttggccacggtagcattgcccaaaaggccagagccaggctagaaccccagtccaacagctgtacttataactaacatactgtcaatcacttatgtaacttcagaaacagccacagagcaactctattttataggtacggctgatttagaagccactttcagtaacagtgctgatgacaaaccgcctgaagccctacagggacgtcagctttcaggaaaagcgatcagtcagaggagtccagctcagcggcaccccagaggtgaccgagttcccccgcatcctgggcccgtgcccacagcaccccggcacctctgctggggcactcatttcatttggggggcaccaaacggtagagagatggttctcatgacggatcgctgccctgcgatctctgcatcatttgaaaataaaatcacctaacagcagcttccacgctggttcttaaccagttttctgccacatgaagttgcggagggcccaggctgcctgtggacagcagagacgcactctgtgttcagagctgccttctacctgggtagatggagctggtgaaccgtgcggccccgaccccaagctctgatgacggacagaaggacaagagccttgtgggtaactgtccattctggagcatctgagccaagacacaatgcaggtgagggtgctgacccagagaggagcaagtatgccagcagagatggtggcggtcttcggagggagatgggaggtcagccaaggcaagaggcagttctggatgaggaacgccaggagcagtgaggtgagggggaggggagagaggccagggaaacgctagcgtgtgctgcgacgcctgcaggccaggagggggctgagggagcctgcagcaggcccagctcggcgcaggcagagctgacggagggctggaagggacagaggccagaaccctgtgaaggtgaactggctcaacggcggcggcagtagaggcagggccggggccagggtcggccggggcgcaaagggccaggctggggaggatgtgggagggagccaggcgaggctggccgcccctcgggggaaccgctccccacactgagcctggtcgggcacaccctgccccctcacggctctcctcccacaggcacacgcagtccagctgtggactgattagcacggcaaccgcagagagggcagcagcagccacagctgccccagcaacgccccccgagctgagctcagctggcaccctcccctctagcctctactttctggagctgggaacaagacggactcctgtgagagagtcatctgttctctgttccaccatcactctcaagtccaaaccctactccgcaggttgtgcccgtcactgatggggagacgggacccagaggcctgccagctcaggttagcagttctgccagtggactgtgcattaagactacagtctgggtcacagcacccccaaggaggccatcatagggatccagtttgctgggaacaatggacaaacaagacaggaaaactgatttcaactcccatacagaacggctctctgctggtgggaaccgcccagagcaaggctgagttttcaggtcactcagaagctccagtcactggtcttcaggccaaggctgggcagcctcctgaaggccgggcagagtccgggatgcccgctgcgcccagtgagaccagggtctctccgggccctcacaggccacagcctgaccccagtgccccagcctctccctcgcacctccccagcagcccctcagagctcctggggtccctgagacaggcctggggtgcggcccactccacctctgctgcttccctcacggactccccactgacccatcaactaaaagcgaggcctgccactcctcacccgccttcttccaagttcctcctgagcgctcagcacacaccatctgctgggctttccttggttattatccccaccagaatattaactccgtaagagaaagaatttgtatccattttgctcagggcttcagtcccagccctgagagaaatgcttggtattagaagaatgctcaggaaacactggctgaagaaatgagtggattctaagaggcactggtcagcaagccaagtcatgagctgaaaagctgtctgtctgaagctctggagctggaagtgggcacagcctctgacagggaacagtgggcattgagatggcccgcggggcccagcgtgtcaggaccactcagcgtcgccctctcagcgctccgtgcagcaggctcagcgccactgctgagtgaccgcgtgacgtgggcgctactcatcaaaccagaacggctcactttccctccacagtgatgtcagaggcaaacgtggtacaagctctaagatacatcgctactggttatcacagttttaataagacactgagctggtatgattcatccaccactgaagaagaaagagctgccatcactgatgaatctcaagtgggtttttttttttccctttttatttttacctttttatacttcaattaacttccctgttttaatcatctgggattgcctaaaacttactgtacacaaccctgctttctagaacagaaacagactgaaccccattcctcctcttcgtactgactcagtcaagatgagcctcagcctgaggcggggctgggggtgcccacacatggctccgccagctgcagacctcacacgtggcccctgagtgtcggtctggggatctgctgcctcttctcaccctgagagaccgaccctgctaacagtctgacagcttcagctgctgtcgtcttcacttttaatgcgtttttgcaattaggagacccaaattcacactcaaaaggagacttggctctcgggcccaaagggtctcttctgtatgtgaagtcaataggctccgttcacggatctgaggcctccaccttggctgctttaagaccttttctgttttttatttttgttcttgcagctgggaaaaataaaaagcatttaaaaatcaccaaaacagctttaatttttaaggaatcgaataaaacattatatatataggaatcagaaaagcatgggggaggggcgcaaaaaggaagcaagcatagcataaaacattcactcttgaaatcatggtttccttgaccctctccttcgtcttcatttgcagaccacagcttgctttctgagaggctgacctaaaagtccacagctcctcactcctctgaattttgagactcttaactcagaaaagttagaattaaaagcattagatgttatccacattctaatggttgtctttatggaagtaacactagcgcaatatacctccttacagtaatctacaagctcacaactgagagaaaacctacaatctcaaaggcagtactgtggcaaatctaatgctctaaaaaattatgaacccccaataaaagtgctcaattggaggaggtttaaatttgggcaacatttaaactgcatgtaactggcttttggcagaggctttaaaatgtataaaaatgataaaatgctcctaatggaagcattaaaagaagtattttctgctccacttcctgcaattacttacaggcttgctgtctcaaatataagcactctatctcacaaaattgtgtttttcttttctaagggatcaccaagacatttatgacatctatttacaaaatattcagcaatagcataatttctcggtgacctgaatcccccttcatgtaatttacaaatattcagtcctttttcagttcttacaaagaaccagagacttgtcagatagttagttataagtggaaaacccataggttaatgaataagctactcgcaacgctgcaagtgttctcagttgttaacaagttgaatcttaatgctccaacgcattttatgctcatgacttctcagcctttgtccatttatgtgtaaagataaacacagtggcatccaaagtagaaatgcaggcactctagattctgtgtgtggtttcgtggggcttttggtggtctgcttgcttgcctttttgttttattaaaatctgaatttaggagagatgtcttttggggaacatgtagcattttcaagaaaatactctatctgctgacattctaaaggcacaggcaataaaaacctgacagagaaatgttaagtgtgttgccaaaataaagaagctgtggctacagaccttaaaatagaaagtttcttccaagtgatgaagtatttccattcaaataagaacatcaactccatacagattcaagaatacagtctgtgcattcctgtctgacagaggttcccacaaccaattccagggcagagcaaagaaattctgccttaggaggctccagactttactgtgctgactgtctgaccatgggtgtgccagttccccttcttgagaccttgcttttctgcatgtaaaatctccaagggccttgccaattttaacttgctggaatgcatgagcctaacagactcctaaacacatttaaggagcttcaaagcatgtccctcccaggttcacactatctagtcaatttataagaaagaagagactgtgacatttgactatagtgttcaacccttgttcaccgatttcaagttatcctgaaaacttttttgtaccaattatagattgttgagtcttacaaagaacagtgtgcaacatcactgagacagaataggtacccttggacagtgctgctgtgagcccgcctggccctctctggactgaaacaggacttcaccctggtagttggcgggggcaaggtgggtaccaaacttaccatgccacttgcccttataaacagtcccgaaggagcctgatccaatccgagtggacagcatcacttcactggcttctatctcccagtaatagctcgaatctctctgtccacgaggcctctaaagcaagcacagatcattaatatgttccatgaatggttaaaactgtttaatgagggtgtcaaagaaaggatcaacccaactccatccattcccagatcttttaaaaatacctattaactataagtctagtttttgtcatttgagaaaataccattttagttgtgccctgccttgcaacaaaccagcaagttttctggtgcaagcatgcgaaaaacagcactgacacgtgtaacatgttcacttaattagcctttcccacccctaaaattaacggcatccccatttctgactaggcttctcttgttgaacccggacatgcagggggtgctgtgggcacactcacaattttgttcttctcctgggtgctggagcctggcgcccgctctctctgtgcaggcgcaggggttttgggctgtgaccagcctgtcgggctcagattgttggggctgctggacaaggctgaaggggagccttaatagacaagacaaacaggatccactcatggataagccaacagaatacgcaacagcataaagagaaggagcccattactatctgctaaatgacttaagcaggtacctgattcactgtgacttcgaattgcatcctgaaacagaaaagcaaagtgtcaatttctgccctagaaaagatgtcctctaggggagggagagggaggataaggatttacaagagcaaaagagattataaaatctctaaatcacaaaaggtctaattacatacactaacttttatttgattcaattcatccaatgtctgtggccagtatctccaggactgttaacacatattaggaggactgatgctagtttctcatacacgatggacacgacattcttatttctctgaagaaagcaatgcacacagcagactggtactctttaaaggaaggctaacaaagttactatcaagctgagagatttccaatggttggggatcttgctccactgaagctcaaaaaaaagaataataatttttagcaagggattcagtgcccagttcactcttactcccctaggagttagacttgcgaagggtaagcaccatgactacatactttatccaagcctaaaatcatggaaagctgggagaaccataaatcccctagtctgaaacctactttttacatacaagaaaacatatggaaacaggcaaaggggcgtggcaagggccacacaaccagcaggtagaagaaactgaactaaacataccacccaaggacctcagccaggagcgcactcatcacaaagtgttcctcagaccctgtgggtgcactcggaaatgagccacattctactcaggtgagagggcaaagattacctttagaatttattagaaactgtttagttggaacagtttaaatcacagggctctcccatgaggcctaaatcctcattttataaaaagctcacttggagtatataaataacatcagtataaaaccacttcatccccatatccttgaaaaggatatttttcttggaagtcctactctgttttccttgtgtaaccacagatacttttttcacagaattattaccaaaatgcttgcaactctgtggtatctttacaagagatgagagaaatcacaggccaagccccccaacattggcagccccatcttcagagtttaccaataaagcttggttctagggttcccccaattggtcagttttcagaattacctggagaggtatgtaagaacacagattcccaagcccctccaccagtagaattgatctaagaatgtctgggagaaaaggtgggaaatctaggaatctgcacgcttttaagaatgacaagatgactgccaggtggacaatcctttatccaaaaaaaccctgaatttcagtagatatttaccagctgtagttttattattcaactaatctattgttttcagtcaaagcatggcacaacgtatttttattgaccagaattatataccccatgcattaggatttttttcttaatgccatactaattttcttccctgttttttctgtgctaatttctacagctggattgacttgtcatcttgaaatctaaatattaaagagaactaagatggtttatacaaagcaagaaagtgtactttaaaaatgctgaatcaaaattttaaaacacaggagtcaaaattttgctctgcttctgaagtacagacaggattaaggacaacacatgtgccagttattctacaattcaagaattttcacatttaatgttctctccaactataatacagtgtttatacaagaacagattatatatcagaagaaaactgatatactactggctcatcacaataaaatagtaagattcacagtctgcatacacacaacctcacaataatcgtgtcatgaccgaagtgcccctaagtgaccaatttagaccccacattcaaaggacaagtatgttagaaatgacttgaggtctgagcatggtgaggtgtggctgaaggtgcaggtggccctgaggtttttcaagggccaattcaggaggcagacagagcacagctgtctgattttaagaaacctcttatcacagggttttcagggtgtaccaaccaagctgacacattgtgtttctaaacaaaatgtaaacaggatactgatggtgttcaatatgaagtaaataaactagcattagtctctggctgaaaattatttttaaagaacaatttttaatacccttagactcaaaatcccacctgagaaactggtatttttttaaactcctaaatatgctgctgccaaaaaagaaaacatgaaagcaagtctgatgagaaatataaaatgcagtgattgtctcatttttgatagtctactgtctgacagtctaagaaatcctgttaagttcacaagaaagcaaaggcatgaagaagaatacctactcttcccctcacacaaaaccgtctggacctcgccctaggagaagccctcaggctgttactctagtccaaagcagtgagaaacaggaagaataaagaacaaaggaagtattttaagtgcattcagttgttaataaagatgaaccagaaagcaaaccaaacaaatagaacataccataaagcaaagcaaagaaaaagcagtttgaaaacactagcttgggcactttcatatatccctaaatacctgcttattaaaatcttaggcctccacccttttatttctaaataaaatcacaaagtctttcagagagttcatagtcctccatcactgttattttcttttccccactccccctccaaaacaacaggactctctattctaacttatccaccagttcactgaaattctcttcatatctaacctggaaagaatgagctcaaatgttaacatctcttcaggaaatatcagttctccatttgaatgatataccaacaggattattaagctagtctgaggatatactgaacaagaaattcagaaagtccaagggcctcagaaactgctgcaacattccttaccaggttagaaacccaaacctctcggacacaactgtcaacctgcccgacagctgactcctgcctccgcccgcgggccgttacctcgatcatcctgctgtccacgggcagagcggcgctgaccatgtgcacgttgggcgtggacgtcgacctctgcctctgagagagggagccttcagaggaggggctggaggtgctgaatgtgaaagcgtggggtgtggagtatctgtgctgggaactaggcaacaaggagaaacaaaagtccatggttgacactcaggcctctggaatggaaaaatctttcaactacttacttcattaacatactcggggcaaaccctacttacactatgaccttcgacaaaagtattcctttcttttgtcaatctaaatatgcaccacttaaaatttttcttctgttgaggtgcctctgcatgcaaatttttaaaaaggaaataatatatgtgctcagaattcatgtaaaaagaaatgatacttcaataaatcacgtctacagaatactgcaaaattttagaccatctcaacactatcctctacaattaagctagctgaactttcccaggttcatttcgagactaaatgagaaaacctgaaggaagatttctaaccatcttagacctgcccagtgtgcctgcacacaagtagcactttactcatgggcatcctctgccaataaacagctcacaaaatcaattacaatgactttgattttcagatctgcatacctctgacatttatcactggcttcttttacccaatgccactctcccaccagccaaactggaaacatgcattcagcgtaacactgtcatttgctcaaaagattactctgggttttgttcagacaaggttagcaccatgcatgaattcaagggatgaaagagtttttcaagagaaattattccatggccttgaaaaattgcctttccaggcaattcaacataaatggcctcagaggcctggctttttctatctaaatattcaaaagcaagtatagtttttcagtcagacatgcttttcaaattatcaagaaaaataaggtcatacactaatacagccaagtatcatttcaatacaaattccttattctaagatatgctgccttgaataatttctatgttagttttacaaaggcctttaaatattatatgactacatataaattaaagtcagatatttggggcaaagatgtagaattattttaggttccaaattcatgtgtagaactgagtgaggcatgtgaactcaacaaaactctgattttaaagttggaaaacagagtaaagacagattatgtgcaaacttacaggcacattaaaatggatttttttatattaaaaatctaattagactttttcaagatagcagtttattaaacatcatggttttagcaatgcaaggccgtaataagtatttcaaagtcgagggttttacttttattgaatcactgtatatcattttgggacccttcccctgaggctcactgcatactgacaaaggcaaatctcaaagtctttgaaatgtagttgatggatagagaagatgtggcacatatagacaagagaatgtcagtcagccataagagggaaaaacagggtcatctgtagagatgtggatggatcttgagtctgtcatacagagtaagtcagaaagagaaaaacaaatatcgaatattgatgcatatatgtgtaatctagaatcacagctccaaagaatctatttgcagggcagccctagagacacagacgtagagaaaagacttgtagacacagcgagggaaggggagggtgtgatgaactgggagattcggactgacacatatccactactgtgtgtaaaatagatcactagagggtcgctgctgtaccacgcagggagctcagctcaatgaaatgacagcctagagggctggggtggaagagggaggggacacctgtatacatacagctgatttacttcactgcagaggagaaagtaacacaacattgtaaagcaattacatttcaataaaaaatacaaaaacaaaacacacaaatgagatataacgaacatgccagaataccagaattaactgtattcactttccagaatttaactaaagaactacaaaaggaaagttctacattttgctttaacaccaacgctgagttccacagaagctgcacagtttacatggaaagagaagggaacccaagggaactcctgtcctctgtgttcacactttcaattccatctgccccagtacaacttcccataaaagcagtaggtgcaaagtacccaggaggtatccgggaaacagactctcgcatccgacgcatcgtcaaggaaggcagcgctgggaccccgccatcaccaacagtggaatttgggaacaatctaaatgaaatcagagaaaggctggtttacagacttgtggtagtgattttacagtcagcctgcttggccttccaaactcagcttctcctagtcactctttcctggaccattttaggctacccagagtaagttgctggccagctatttcttgttgctcacatccgctgggccacaggattccagaggggaagaggattcagacacagcagctcggcagcccctgatcaacaatgaggcctgagagttgaagccaggtaggagactcaggagcccctcagagcggtggtcactttctctctctgggtttcagtcttttcctttctactgtgggcagtttggaggggacatggatgggcatgtcggttatgatgagagccaatcacattcataggaaaaggaaatggcaccccactccagtgctcttgcctggaaactcctgtggatggaggagcctcgtaggctgcagtccatggggtcgctaagggccggacacgactgagcgacttcactttcacttttcactttcatgcgttggagaaggaaatggcaacccactccagtgttcttgcctggagaatcccagggacgggggagcctggtgggctgctctctatgcggtggcacagagtcggacacgactgaagcgacttagcagcagcagcagcagagtaagttgtgtaagtagctcaagtcacgtccaactctttgtgacccagagactgtggcccgccaggctcctctgtccatggaattctccaggcgatactggagtgggtagccattcccttctccagggatcaaacccgggtctcctgcattgcagatggattctttaccactgagccacctggggagtccaccaatggactaccaacctaagtgactggcctaaatgactacagaacgtgaacaatcttgacctgccaatgaacacagagtctctagtgtgcaattctaggaaatactggcctaatgtccaactacatcaaaatatatgttttttttaatctatatatagtagggcactttgtaacctaaatcatacagcttttctggaaacattctgtctcagaaatgcacaaatggtaagactgaagtatgaaaggacagatcaccataagcaccaaaagtcatacatagaaaaaaatgatattcacatcaattgggcatcttccctccatgagatgagcactcagtgactagaaagctcatgcgttatctctcataaggctcacaagaatgctgcagccaggggaatgcccccttttacagatgagtgagccaaagctcagaagtcataacagttagttaatgcaacagtgagattctgaccagtgtctgctggactccaaagtctgggctacttccaaagttctctgtgcaaaagctacatgtgactgccacgaaagcaaaacagatgcccccatggtggcttaatggtaacatgcccctcatttttctggtgccctcaaaaagtggtaaagtgcaactccgacgtttcctatccctgttcacaggttttaagagatgctctggaatactttaaaccttactaaaaaaaacagtttgtctatatggaatatatctgagtaaccggcttgtcgtcagagagatgtgtttaagggttactataaaatcatttgaagactaatgttttcccttgtttgaggtgaagaaaacagcaccaaccataccaactactccttctctgcagaagaggtcacttcagctttattcaatacaatacagaggagtgtctcctagcaacctagtaaccctgggggctgtccatgtcaccatgctctttgtcttacagaatcacagtatatcaatctctagttgacaatcctcccagctcattttagaaagttgtatacaagccaaactaaaacttaactaatttccgaactgtcagatttctaaagtagatcatttccagatcatgatacttcacttagaaagtctaaaacccagacctgtcagtcaaatacacagtatgcatcccccaagggggtttatacctccccatccccttatattctttgaaaaaagaacaatgccttacaagagctgtctgatattactccagtccacacacatcgtgggtactttggtgctacaatgctcgtgaaacttgtagccacaagtctgacatctaaatccatttagcaagaacttctgacagatgtcacagaaggcaagcttcaggaaggttttccgagcctggaacaagaacacagatgagtaaattatgctgaataaaagacaaaataatttcctccttggccccctcgaggttttattacaatggagaatcatacttccaacatttgtaataaaattcatacacagaaactgaagtacatctgtgatctagcgaaacctaaactgctttactgtaaacaataatagcatagctttaaacaatccaacaatatacacgcttattatctctgagaaattcctactgtgccagccaaagcacccaacataccacagagagaagagacctgcgacttacaaagttgtgtgttgtgaggggaacgtgatccaggaaatccacttgaagttcctctccgatcaacgaggcagcatcagtattccaatctaaccgtgcttttttactaaagaggatttttaaaaccataacacaaaagggaaatatttaaacaaggtaaaagagttgaatatcaataaataataaatatcatttagctcatactacataaacataaaacttaaagccccatacaacactaacatttaattcatacaacaaatccataaagcaggcattcttacctccatcttaaaaataagagaactggggctctaggaaggtgacttggctcaaggctacacagagtttaagggcctatttggaatctaagtcagtcagactccaaatgggtactcttacaataaagttttctttaaacaatgcaataaaacaatctcataataaagaaaatctgcaataaactggggacatctttaaacattagaatcctataaaaatcctgtaaaatgggttaaaaatatagtgagagtagcaaaatttaatcttcactagcctatttcactcttgaaaataaataagtagaaagcaatcacaaatgaaatgcactttttctattaataatgggctcaactctgtagaactgtttatagtctataaatacaaaactgaggaaagacattaagtgtcttaatatttactccgaaactattctttctgtgcctacacgagacataaaagcaggtacatgtaagtgaaaatgaatgcccaacccctttcctgcgtcctatgcagtccatcggcccatctccagaaggaagaagacccgggaaaggaagaggacactgcgtacacagcaccactcaaacttctccctttacccacaagaagccctcagagccatctctctgactatctaacaggaaacaatccactccttaatacggttccctgaacagggtacaggaaacccaacatgactccatttcgccctagtggccaaggtgagggtcgtgctgttttctgatcagccctcaggtgctctccacccaagagagaactgaggatggctccaaacaaacgcgcctggagacccagagggctcaagcaccatccagccaccatctcagcaccccagtctctaaggagctctatgcacgagcttggggaccaacccacaattgtaccagacagagctggcatctgcttcaaagatttgcacttcagcaaaaaacctccgaagctgaaaggagcatcatcaacagatgactttatgctcacccttctgagcagactcattccctaggctcctctctcaaactagggagtaccttgaaaaataaaacatgcaagcgaaaaaagaacggaaagttaaggtatcatcccagatttctggggggacgataacaggtaacgaatggtcacagacagctctgacgcttcagggtacttattattattactccttaactgtgaggtgatgtctctatctttccaccatcattagaaatagcatgttatatggacagtccttgaggcaaattctcctgcatcttttacctctgtgtctgtcaaactgctgggatttagtagaactgaataaaaatgagtgaattgtaaaagtttctctcttacagacaacattctttaactataaataaggcaaacactttcagagtacccattctgttaactgccttacagcaaacacaaaagccttgctctcaaaaaacataccatctgacattactgcttccttctgtggaaacggtatccaacacctaacatgtattttattttccaatgggatatttaagcaaaaatttcaagttcttggtatcttacttttctaagctgtctctttacaaacaagatattcaaatattcactattcaataggaagcaagtacttgttttttgtttaatggaaaagagttatgatctgaagctaggacatccttactagtgtgaaggaagacctggctgacttccaggctcttaccccttgtgttcgtggagaagtctgaacactgcacagcactctggttgcaggcccctcaccttgagagctttcataaggcagtcatgcaagctcattccattccgcacgttgacctacaaacgaaggaccaccattagaacaaacacaggctgtgcaagcatactccttggaaagtaagcatagaataaaggcatcggtccgtaaaggtgtatggagaaaatgtaaaacagagttgctcggacagctgacccttgaacaacacggctctgaactgcatacgtccatttacacgtggcctttcttcagtaataaatactacagtactacatgagtcgtgatttttgatccaaaggctacggaacaggaaatacatagcaacatacccaggggctgactataaattgtatttgaatttgcaactgcatacagggagggcacccataaccctcaagttgttcaagagccaaatataacggcaaatacatacacaggggaaacaaccaggatgcccagcaacaggcgagagctggaataaagcactgaacattagcatgtgtcacgctgtgcagttactatactacttctaatgacctgtcagaagggggacaggtccccccatctaattgggggaaaatatttttcagaataacacaaagagtagtattagattcaaaagattagatctgacagagtgcctgaaaaactatggacagaagttcataacactgtacacgaggcagtgaccaaaaccatcccaaagaaaaagaaacacaagaaggctaagtggctgtccgaggaagcttcacaaatggctgagaaatgaagagatgtggaaaagaaagggaaagatatactcaactgcatgcagagtttcagagaacaaagagagataaaaaggccttatgtgaacaatgcgaagaaacagaggaaaccaagagactggaaaagattagaaatctcttcaagaaaactggagatatcaagggaacatttcacgaaaggactggcaggataaagggcagaacaggtaaggacctgacagaagcagatgagatcaggaagtgacaagaatacacagaactattttaaaaaaaggtcttaatgacccagataatcctgatggtctggtcactcgcctaaagccagatatcctggaatgtaaagtgaagtgagccttggaaagcatgactacaaacaaggctagtggacgtgatggagttccagctgagctatttaaaatcctaaaaggaggacttctctggtggtccagtggttaggactctccacctcggaactctccacttccaccataagggccataggttggatccctgatcagggaactaagaaataaacacatttttaaaataaatacataaaatccaaaacatgatgctgttaaagtgctgcactcaatatgccagcaaatttggaaaactcagcagtggctacaggactggaaaaggtcagtcttcatctagaaaaggtcagttttcattccaataccaaagaagggcaatgttcaagaatgttcaaactaccatacaactgcactcatttcacatgctagcaaagttatgctcaaaattcttcaagttaggcttcagcaatacgtgaaccaagaaactttcagatgtacaagctgagttcagtaaaggcagaggaaccagagatcaaactgacaacattcgatggattacagagaaagcacaagaatcccagaaaaacagctacttctgcttcactgagtgaagttactcagtcgtgtccgactctttgcgaccccattaaccgtagcctaccaggctcctccatccatgggattttccaggcaagagtactggagtgggttgccatttccttctccagaggatcttcccaacccaaatctcccgcattgtaggcagacactttactgtctgagccaccaggcaagtccaattaactgtatgcttcactagctatgtgaaagcctttgggtggatcacaatgaactatggaaaattcttaaagagatgggaataccagaccactttacctgtttcctgtgaaaactacatgcaggtcaagaagcaacagttagaaccggacatggaatgatagactggttccaaattgggaaaggagtacatcaagcctctatattgtcaccctgcttatttaacttacatgcagagtacatcatgtgaaatactgggctgaatgaatcacaagctggaatcaagagtgccgggagaaatatcaataaccttagatatgcagatgatagcacactaatggcagaaaagtgaagaggaactagagtctcttgatgaggatgaaagaggagagtgaaaaaggtggtttgaaactcaacattcaaaaaacaaagatcatggcatctggtctcatcacttcattgctaatacaaggggaaaaggtggaaacagtggtagattttattttcttgggctccaaaatcactgcagacagtgactgcagccatgacattaaaagatgcttgctccttggagggaaagctatgacaaatctagacagcacattaaaaagctgagacatcactttgccaataaaggtctgaatagtcaaagctatgtttttccagtagtaatgcaggtatgagagctggaccataaagaaggctgagcgccgaagaactgacacttttgaattgtggtgctggagaagactcttgaaggtcccttggctgcaaggagatcgaaccaatcaattctaaaggaaatccactcccagtactcagtggaaagactgacgccccagtactttggccatctgatgcatagagccaactcactggaaaagaccctgatgctaggaaagactgaaggcaaaagaagaagggggtgacagaggatgaaatgtttagacaacatctccaactcaatggacataagactgagcaagctccgggatataatgaagcacaggggagcctggcgtaccgcagtccatggagttgcaaagagtcacacatgacttagcaactgaagaatgccaagaagattatttaaagggtggggaacctatatatgtttatatatgtcatatgcatgtgaaaaaatagctcttacccctaagagaagtggtttcttgttgtttagtcgctaagatgtgtctgactctttttgactctatggaccgtagcccaccaggctacatgggatttccaaggcaagaatactggagtgggtagccatttccttctccagaggatcttcccatcccagaaaaaaaacccacgtctcctgcattggcaagcagattctttaacactgaaccaccagggaagccccaagagacagtagttgggagagggaaaatgatcaactttccctttctacctgtatgcagctcaggaagcaacagttagaaccggacatggaacaacagactggatccaagtaggaaaaggggtacgtcaaggctgtatattgtcaccctgcttatttaacttatatgcagagtacatcatgagaaatgctaggctggaggaagcacaagctggaatcaagattgctgggaggaacatcaataacctcagatatgcagatgacaccacccttatcgcaggaagtaaagaagaactaaagagcctcttgatgaaagtgaaaagaggagagtgaaaaagttggcttaaagctcaacattcagaaaactaagatcatggcatccggtcccttcacttcaaggcaaatagatggggatacagtggaaacagtggctgactttattttcagttcagttcagttcagtcactcagtcgtgtccgactctttgcaaccccatgaactgcagcacgccaggcctccctgtccatcaccaactcctggagttcactcagactcacgtccatcgagtcagtgatgccatccagccatctcatcctctgtcgtccccttctcctcctgcccccaatccctcccagcatcagagtcttttccaatgagtcaagtcttcgaatgaggtggccaaagtactggagtttcagcttcagcatcattccctccaaagaaatcccagggccgatctccttcagaatggactggttggatctccttgcagtccaagggactctcaagagtcttctccaacaccacatttcaaaagcatcaattcttcggcactcagctttcttcacagtccaactctcacatccgtacatgaccactggaaaaaccatagggctccaaaatcactgcagatggtgactgcagccatgaaattaaaagatgcttactccttggaaggaaagttatgaccaacctagacagcatattaaaaagcagagacattactttgtcaacaaagatctgtctagtcaaggctatggtttttccaacggtcatgtatggatgtgagagttggactataaagaaagcttagcacaggagaattgatgcttttgaactgtggtgttggagaagactcttttagagtcccttggattgcaaggagatccaactagtccatcctaaaggagatcagtcctgggtgttcactggaaggactgatgttgaagctgaaactctaatactttggccacctgatgcaaagagctgacccatctgaaaagaccatgatgctgggagggattgggggcaggaggaaaaggggacgacagaggatgagatggttggatggcattaccaacttaatggacatgagtttgggtaaactccaggagctggtgatggacagggaggcctggcacgctgcggttcatggggtcacagagtcggacaccactgagcgactgaactgaattgactgaagttgtttgagtcaatgaaatattcatgcaaacataaatatccaccagaaacaaaaattaaccaatccaatctatgacatgagttctttgtattaaaaatttgtatttcaacttattttcaacaaaatggttcatcttcctaaccaaaaagccatctcacgtacactgcacagtagaggcgggcaagcaggaagtagaggaaataaagtctctgccgcgctgtcagggcaaacagcactgctggtttaaacacgtgtgcacacccatccagtagtctcagcagtatagaccccttcatactcccatgtacccagtcctcaggagctcagtaggcacttcagagcctaacagaaagtgtgagcacccagcaagctaatatcagcagctagataaacatttcaaccaagattttaagcatttcagtaagagccctatacagtgttttaaaagccaatgaacgtaatcaaaagtaaggcaactagactcaggatgggcagcagggtgaccagaatgagatttgcggtgcttgcaaactgcacacagtggagtccttctgctgaaaatgagacagctgacagtggccaatccagcccctttccagacagaggtaagtgattttttattttaaaggtttagaatattttcaactgtccatcttcaatgtttcacaacaagtttatttttaaggtttcttgaagcagtgatacccttagaaatatcccaccaacttccagcttttcagaaacaaaacaactcagtaaagggagagagactgatctgaactgtgaaggcaccaaggatgaagacaatgaaaagtaacaaacactcagcagtaagagagccaggacctgtgtcacacactgtgcagcagtacattgaaaactgaaaagtgatctcagtgatatttaatcttcattagaagccagagctccaagaacgagacagttctttaaatatcctctaatccagcggggttcccaaacgtggctggtattacagtcatccgaggagcctgggaaaatgtattttcccagcctgccccctctaacacactcatctgattcagttcatcctgaatgaagctcaggaatctgtagcttaagctgcttctgacatgattccaatggtaattaaagagcctgagctctgatccaatcactcatctaataaaaagcagcatcagtaagtcaaagacacatgtttacaaaacaaatgacaagaaaaactcaaaaaccaagcaactactaaaaattccttatcagacatacacgctctctgtcactcttctctctggactccccatgggtacatgctgtgatcagttacggtctgactcatctctggagcccccaaagtgattatgacagtcattctgggctccggcggtgaagcaacctggggaggactacaaacagctgactggccaagccagccagcacatgacgccttcctccttcaaggtacccctggagctgggtactcataccagccacgtttgggaaccccgctggattagaggatatttaaagaaccgtctcgctcttggagctctggcttctaatgaagattaagtatcaccgagatcactttcagttttcagagtactgctgcacagtgtgtgacacaggtcctggctctctcagcgtgtgagtgtttgtatcagaagcacacagtccgcctctggacaaagaaacgagagaaactagctttctctgatagaaccttctcaaaagctgctgtaggtgtcatgcgtttcaaatcggtggtcccagcccccaactacgctcagctgaaggctaccgaggacacactgatgtaggaaactctcagaaaccatcctgctgctgctgagttgctgcagtcgtgtccgactctgtgcaaccccacagacagcagcccaccaggctcctctgtccctgggattctccaggcaagaacactggagtgggttgccatttcctcctccagaaactatcataactaccattttacttgtgaaactagtcactgtagctagcatcagcctcatttcatgaaggtcaggaagagaggctcaaaatattatgtaacttgtcacgatacagcttataagaagcaatacagggatttaaatttgggcctcattgtcttaaaggccttaacatttaaattgttgcgcaaaactaaggttcccagtctgcaggcaaacgggtagatggggtggagaagacagggcggcaacacccagaagcagcgccagagggtctcagctcccgggcacactcacacttcccactttctcaaggtcagcaaattaatgagaaaactcactttgcaaacaaaagattactgctgaaataaggagattattattatttattttgccagtcttattaaagtttcatttccaggaaagagaacaaaaataaatttactcaaactttaaatgcctttgagttttgccttcagtttaaaaatgtaccttaatgtataacactgtaactgggaggctctctaggtttcacaaaagtaaaaggaaattttagtgaagaggagagagtggaactgttagaaagaaaactctggactgcacttcccaactttggaacctagaataaacacaaggccccaatttcacacaaagaacagagggtgggaaaggacggtgcctggatgttctgaacaaaggttttctcgcaccgtatcggtgtttgaaagccacacaccaagcacaattagcacagcttcactttttggtttcaaccaggtggcgttccctccgcctcccccagaaaaggaagaagcttttgagcagtaatttcttagaaaagttgagattttgtgtcagaagctacacaggaataactagctagtccagggccttggaaaaaaagcttggtttccaggctacctccagctttgccccagaacctaggaaatgtactaaaataattttttccaggtaattttattttcttctatatacttgactgtaatatcaaaaaaatttaaatgaacagtttgctttaatacactgaacaaagtttgtaattagcccgaaatgtctgaggggatttcttagagaaccctttgaaatacgtccccattaagaatgtactacattcacctgacaccagtcagaatggccattatcaaaaaaatctaatacaaataataaacgccgcagagggcgtggggaaaagggggcctcctgcactgctgggggacagaaactgatacagccaccgaggagaagagaatggaagctccttaaaaagctaaacacagaactaccattatgatccagcaatcccactcctggacacatctagagaaaattacgattctaaagatacagacaccccaatatccactgcagcactactaacagtaaccagggtgtggaaggaacctaaatgtccaccaacagaggaatggatacagaggtggtacatatacatacaacggaatattactcagccatacagaagaacgaaaccctgccatctgtagcaacatggatggacccagagattgtcagactgagtgaagacagagaaagacaaacacaaacatcatgatatcactttcacgtggaatctaaaaacagggtaccatgagcttatccacaaaacagaaagttacctataaaaaccaaatctatgcttaccagagggtagggaggaggaggaataaactggagatcgggactgacctatatacactaccccagacagactgataactagtaaggacctaccgctagcacagggaactctactcaatacgcgacaacgacctatgggaaagagtattaaaaaactggatctatgtgtatgtataaatgattcactgttatatacctgaaacacaatattgtaaatcaactatatttcagtaaatattttctttaaaatgtactatatgtttaggtgaattgtcagaaaagacccttctaagcaaggctaagtcgaaggaaagccaagagctaagaaaggaaaaagcaagggggtgtgaagagaatataaagcaataaaatctacaactagaaagtcaattaacaaagactctaagtagaaccctcttacactgttggtgggaatgaacatttgtacacacccgatgaaaaacagtatagacgttccttacaaaacaaaaaccagttactatacgatccagcaaccccactcttgggcatatatccaaaaaagacaaaaactctaactcaaacccatacatgcaccccagtgttcacagcactgtttacaatatccaagacatggaaacgaccccagtgcccaccaatgtattactcagccataaagaatgaactactgccatactaagtgaagtcagtccgaaagagaaaacagatattatgtaattatcatttaaatgtgtaatctaaaaacagatgaatctacatacaaaatcaaaacagaccacagatatagaaaccaagcttattaccaaaggagaggggaaagaaaggtgggataagtcaggagtgtggaattaacagaaacaaactacgatacattaaatagattagaaacaaggatcttctgtataacatgcagaactattcaatatcgtgtaatgacccctggcggaaagttatctgaagcacacgtacatgctggagtcactgtgccgcgtgcctgaaactaacacaacagtgtaaatcaacaacatctcaattaaaaaaaaggtgcaactacaaaacactaaaataaaatttaaaaagaaagactctaagtgacagtgaagatttttgctatctataagatgggcaacatgacctgtaacgtttttataggtgatggacagctgcattttcggagaggaatgttcacgtaccactgttctttgcttgtttggcaaaaacacacggatagtgttgcttgtcttagaagggtccgtaagcttgccatcatctgacgcccgacgctgatagccaaactgctgaactattgtaggggagatgcagctggcgccgtcaaacaccgtgtctttgaatccgaaaccgttgctgatcgtcttccaggcgccctgtatgtgctccattgatgcagcttacgcagcacttcaacctagcaaaaaaaaaataataataataattcttgagtaaaattagctcaacaatacaatatacagagtaactgtgaaaacagtactattgggtttttttgtaggtaacatattctgcttaaatacattattcaaaaaacttctattatagtacatttccatagaatatttcacagacaactcaaaaatgaacaagacagggactagagatcaaaagactcatcaagggttatacaactaggtaaaagtcaacgcagaacatagctaggtttagtctaatgctttttcaattccactttttcttttgttattgtatattaagcacaaacagctgcctttgaatattagtaacacattagtactatgagaaatacaaaaaaaaaagtgtaagccatcattttctgcctttgaagaagaaaaagaaattagtttttgtaagatgtgtgttagacactttatatgtaaattatctcatt

SEQ ID NO: 92 - DNA, 58891 bp, Hippotragus equinus
  source 1..58891: mol_type = genomic DNA
tctgcttaaaaaagttgtaaaaatgaacttctaaaactcccaccagtttttaacagtatagtgttaaatatactgtgatttttgttaatctcaagtttgggtttttaagacagcaagtctggtcattcagtttaaatgaatggttatactatttttaatgaagtaagccattttcttgttattttcagttctgcatagtgggatttgtttgttaaaagtgtccccagctgttatcagcttactgtaaggtaaagcaaggatggttttttccaaaacttctgtttaatatatgtaattgtccttgaaaagaaagggctcagacaaattaggaaatgattttgattggctttaaattacttttgttggtgataaaaaattactgtaagtaagttttaaattctgaagttcagaatattttttatttgagttaaatgaagaaatggagtttttcttctctgcccttccccatcattcacattttccacataacactgttaacattaatcaccacagccccttattttgttgtttccaataattccaagttcatatagaactgataatgttgtaagccccaagtacagtaacagacagactgctcccaactttctgtctagtttccagccattgaggtgaactgctaagaaaaggaaaacaattgaaatgttgagaaagatggttatgtaagttagtcctctactgttcacttctacaggagcagatgtatttataaatgcagttttaataaaccatggaacacctaggcatagcatatcaaagacattggatcccacgatgttagacatagccatatctcctttgcctgcaaaaaaaaagcatgttgttaaatgtgcataccaatactgtattttattaataagcttcataagaaacactggatacattttctgtttgttttggaaaattgttgtattagagcaaaagtcttactgaatttgtatttttaaattttagggggttagtatttaaagtcttaacatttatttatctaataataattatttattaaaccatttttcagtaaggtatgtagattacttgttgcttttcattctaacatggttaattacgatttaattcacatttcaggtgaatattatttaggggattagatttagttgaaattaatctattaaatagtaaatgcttcctcttgagttcttttttcttcaaagtatgttactgaggaaatattttaaaggtatccttgctcagtgtgtttcagtcaggcttttaagaatgggcattgcagcttgagggacccagttcttaccttttcttgcaaccaacacacttgtgatcgtgtctggtatgcttgttcctgctgctaataaagtgaggcccattactgtatctggaatttctaatgtttcccctgtaacaaatataaatattatatattacaaatcttatagattcagtaactgttctctgcagatatttctttcctgaaaaagaaaatagacatatttagatttcagaaccaatatgtacttagatttcagaaccagtatgtacttagattttaggtagcaaaatatttgaataatattggtgaattggtaaccaaggtagcacagatttttcatgacagatggtgatatttaatacacaaaattctaccaagggataatttccctatctggtatgcttatagaagttttggatgtccactggtatcaaggctgttgcttaaaatatgccaataagattggtcattttctcttttcctttttaaaaacatttcctaaagaggtcagatttaagcaaattatttatagctgtttttaggctgtaaatgtgttaacatggtatgcatttttaaagttctactttagtgatataccttagtttaggtgtttcctttgggaaatcataaatctggggaaaacagaataggcttctacttgagtctttctaactttgtggtcctggtttaatacttctgttaaatctgatggcagttcatcatttttcataaatgtatccattttgggaaacagaactagaatgtaactgctcttaatattgtaattgaaaacttgctttacaattcctttttttttcttaaaatgttaattaaaaaaaagcttcaagtagcatatttattgcatgcttatatatactgctgttggaactgtaattggttgttaatttgttaactggtttgccagagttcatatgtacataaataacactaacatttatcgtcttggggactgttctgtgatctagtacttgattttgttcttttcttgatttcctaatgtcaaatgtgatctggctgagaacatttatggagagctttaataggcaggctattggatttttctatattactcataaaaaaaagaaatgttcttagaatagcatactattctgagtcatatattaatttgacaaaagtcagaggtcaggaaacctttttttgaaagggtgagatagtaatttttttaggttttgtaggctatacaatctctgttgcagttattcagctttgccagtgtaatgtgaaagcattcatggataatatataaatggatgggcttgactgttcagtaaaacttaactcgcaaaaacaggagactcagtgtttgggtacacaggtggtggtttgctcacctctgattaacctttttgggagaaattcctgatttttttttttgtacattgcttattcagtttttccttctgaactaggagttctttgggactagagttgattatggccaggcagtaatagttaaatcttaatcataaaagtagtagaaactaaaatgagactttattttatacccttttaattcattttgtagtacgtttatattgccatattaaaaaacaaaatgtaatccagttaaacagtgaatacccattgttttctcaaaacactggcaccttgctatatgctaaattatggaatggcattcagtataaagactatcttgtggacccatgcaatgtgatttaattattagcaacatagaaattctgtgaatttgatatcgtttataacatgttcctttgactcatacccctgggctgtgtaatagtgaccatatagctgacatgtggtatacacctcacaaaacctgagtgagcttgttggtatattaatatttaatctttttgtaaatagcactaatctttatttttagtctttgctgaaaaacaaattttctctttaactagactatcttagtgaatatatgctgttcttatatacaactgattatttttaaattgtgctcttaagatattatacataccagttattgtgaccatccaaaccaggatatatgtaaatgcagatatccacagtgctgacataaaaaatgttatcacaaagtattttctccaaaactttcttctacaatctggtgtggttagaaaaagtagtataattatgggaagggatagtacccaaaaaattctttttaagtctgcttcaggcatgttgaaaacacttggcggatctgttaaggaaaaattaaacgattttgagttttctcaaatggccaattaagttagaatgtccatttaagaagctatattgaaataaattagctgtatcagtttttaagaggctatttaatacatttgactatctcattactgatattgctggcaaaaagaagctaattgagacttcagggctgactataaaatgtgatactcagcatttcttgatttggggtcttaaatccatcaaagtgtttagggtcattcactgtgttagaaacataatgtttctgaagtatcagttcagcatctcttgattttctacaatgtggatggtttttagtaactttgcttatgggattaacctggtgtcttcccttagcaaccccagttgtctccacttcccagtattgatgatacctctagcctgccctgtgtatcacagaatgtatacttagggagtaaaagatagctgtagcataatctttttattaagttgaatatttctgattctcaggtgattttacggggcttatttcaccattttgtttcattaatttactaaacaaaattcaccacaattcttagaactttaagaaaattggaagtagtattgaatctacagtgtaacttataaaacttgagtttgttttttaaattcaatttgttctattaacttggtggaagaagtcaataataatatattagataaaaaggagacttcactttagattgtttaaaatttatatggcacttataaaatattgggttggccaacaagtttggttggttttttccataccatcttatggaaaaaactgaacaaacttgttggccagtccagtgttttgcccatatattaggtcacattacaactaatactagtaaaataactcataattttttctttttgccacattgcatcaaatgggccagaaagtaacagatataattttattgtaataaaaaatgtttggactgttttttcttagtttcttattataaaatttaacttagaaatgtgtacttcttatacctgaaagactagaaactataatctttgtaagaaggtgaaaattcatgttttaattttttcagataataaattactaagttccctgtctaatgtactaaataaaatgcagaatctgtttcttaaaaccactttattaaaaaaaaatccctaaatttgtatttctggctgtagctgaatttgacttcctatatactaaacatgttaattgctcagtcgtgtctgactctttgcgatctcatggactgtagccctgacaggctcctctgtccacgggattctccaggcaagaatactgcagtgtgtaggtcatttttttccccaggcgatcttggaggaagagggcatgaaaacccactgcagtatttttgcctggagaatcccatgggcagaggagtctggtgggctacagtccatcaggtctcaaagagtcagacatgactgacgtgacttagcacacatgctataaacatttatttacatgttttgctactgcttcacatgtttaaaattcagctgtctccttcctactttttcttcacaccagctcttcttcctaaattcctggtttttgtaagtggtattctcatgttcttactttgtcatgatcaaaagcctcagaattatctctcctcccatgtagcccttcagttgcctggtcttggtgacgcttcctctgcattgtctcacacctgttttcttgtattcccactgccttcaccttgtctgctgttactgcgtctaagtcacttcagttgtgtctgactctgtgtgaccccagagatggcagcccaccaggcttccccgtccctgggattctccaggcaagaacactggagtgggttgccatttccttctccaatgcatgaaagtgaaaagtgaaagtgaagtcgctcagttgtgtccgactcttcgagaccccatggactgcagcctaccaggctcctctgtccatgggatttttcaggcaagagtactggagtggggtgccatcgccttctccgtcaccttgtctaagcatctgttaaacacatcagttggtttagtagcatgtcttttatctcatatttcagttctgataatttctctgcaaacctgcaaatgctattaatctagcatttaagattctgtcatattccttcctatccacctttcttctgcttccattctgcacattcagtcctccagttatgttagtacttgacaagcctttttcccatgttatttctttatcagtccatggaatgctttttactcttagctctgcatcatttacttatgacatatgaagtctgataaaacttcagtagccattaccataaatcaagttgttaaaatcttactagaatattctacaaggcttagtttgtctctgtgataatctttcctatctgaccatcctcatcaaattttttttaccatctgtcccatttaggaactatgtttatgctttatttctttctctttacattatttaaatgttcatattttagctattttgggttttttctgaaatattggaagcttctttgataggtctgcctcttgatcatctctaaattcccatagtatttttaaaatagtaagtatatagtatttgctgaattgaaatgaaattaagttttgctagtaatagacttaataatggtcatgatgtggttattaccttcacaaacctgactaagaccatgtaaacttaaagaaagctgggagtagccagaatcttcatgaaatattccactgtcagttcttgattgcctacggatgaatggttgatcctcatcttcccatcccatcagtggctgttgttcacttctctcttctattgctttggcaagacaggtacagcaaggactgcatttctttataatatattggttaattttaatgtcaaaacacagcaccacaacatataatccgtatatcaaaagcagtaaagttccttcatacctataaattagagaaattagtgtggttttcaatttaaagtgaaagttattttagagttagtagttttggggcagtatctgcttaattttctaatgaaacaatagaacagaaatattctagatacattttgattttgtagatgtgtccagatttggttacaacattataaaagacttaactgatgaaggttcgacactgtcctttttgtattttaaaaacaaggattgtaaactcattcttaatttgtagaatccttccaaatagcaggcatagaaagttctttgaaaatgtgtgttagtcacttagtcgtgtccgaatctttgcgacccaatggagtatagcctgccaggctcctctgaccatggaattctccaggcaagaatactggagttgggttaccgttcccttttccaggggatcttcccaacccagggatcaaacctgagtctcctgcactacaggcagattctttaccctctgagccacctgggaagtactatttgaaaataacagtaattacaaattttcaaagtgaaagtgaaactaatgaatagtgatggggcttctccacctcagttcattgaaagaagataataattataagaatatagtataccttcatttcagttgttctggtataggaattctgtgctaaatcagaatatgttagactttggctgaagcttttcaatttgctatactgagattttttgatgattttaatgtaaattggcttgcactgttttcctatactctggtttgctatttagagaagtttgattatctgatgctatcacatttgaaccttgcatttaccaattattttatagctagtgaatcactgctatagcttgaaagcacagagttcttgatttccctaatgaaaggagcattaccttggatactcccacagtcattgtcccctggcagacgactgccaagtcccagaagcacttctgttgtaaccaacagtctttccttgggagacagactagatttcaggaagattcactttgaaaatttactccctgctaggtctgaagtttcctgatagcaggtattagagcagcactgccaaactagtattccagaggggtgccattgacctccaccatcaggcaatgtacagtctgtgtgtctgtgttttacatttattcatctgttaagactcatatcatagtgatcagtacctaacaaatacctggtatgtgttagctggaaaagtgactgtttccattttcttagaatgacaaggcatggggagattataaataaaacaaatagcttttagttttgaaacctaaaacatttttaatttttagaggaagaggcctatagttctcttactaaatgaacatcagggaaaaagttggaggaatttaaagggactttgtttatttctttgttatctctctaattgtgtgatcatggccacttctaactgaggaaaggtaaacaacccaacagatgaaaaagccacctgttggggctttaacaaacatcaaaagttcggaaactttctggaaggtagtcagtagggaaaaagaaggatggtaacatccactggttagacaaaaaggaagactgatttgactgaaaaattgcaaagggagagcaacccagccagcaattgtgatgaggttagctcagagatttacaggaaaaatgtatggaagtggtagataattaagaagtgaaagaagtaacatttctgaaaaaaaagttactaaactaggattttataaaagtactctctgtaattgttttacataagagtactgattgtttcaagcttaccagtaaacttggttgtcaaatattatggcaagaagtgctgctacactgatagcatatgctgcacagtctctgaataggggccaacatgatagtgttgaaacctgtaaaaataatgtttccattacactgttacttcttcaagtacttgcttagtgtaatactaaaattatttgtatatttgtagttaaacattgttatcttttacatattgcttttagagaaaggaattttaagaaaaattgtgtttctaagcctagtctgattttcataaatttgaccaagaggtatttgtgggttaacttaaaattgaatacatattgtttttctactgattaataaacttaattgaacacattcctagtgccttgtttgttccagactataaacagttcttttttttctttgtctttttttataaatttatttattttttaattgaaggataattgctttaagaattttgttcttttctgtcaaactctgtcaaattctgttgttttctgttatttctgtggatgaagctagagcctattatacagagtgaagccagaaagagagaaatattgtatactaacgcatatatacagaatctagaaaaatggtactgaagatttatttgcagggcagcaatggagaaacagacatggaaaatagacttatggacatggggagagggttggagagggtgagatgtatggagaaagtaacatggaaacatattaccgtatataaaatagatagccaacgggaatttgctgtatgtctcaaacggaaactcaaacgggctctgtatcaacctagagaggtgggatggggagggagatgggagggaggttcaaaagggaggggatatatgtatacctatggctgactaatgttgtggtttgacagtaagcagttcttataatttgtcaagacaatatattttgttgaataaagttttcttacgtaccacattagatagtaagccacaggctgcacagataccaaggaggttatagattgcagatccaagaatggtgctaatgccaatatcgccctttgtgataaatacacctatgagccagatagtagctaagttagtgttgacttggagaagatcaaataacaccaattaagcaaaaaaaaaaataaggagtggtatttacctaggaaagcagtaactaattcaggagctgaactaccggctgccataaaagttgcacctgcaacatcctgggacagtccaaaggctgaagacaaatgaaattatattatgcctggtaaagtgacaaatgggagagcatgttctcataactaaatatatatcaaagcaacattttcatagaaagccgttgttactaacttcaactggaaaacagccaatagaggaagccttctaggcattatttaccctatatcagaaagttaaaattagaatgaaaattcaggtttccaagccactgatagcaatcctttgtccatgtttattgttttgtatattattgatttttgagtcttcccagacgctcaaactctggtgtgcttggttgagtccctgtcacctgtagtcagtatttcctaattcttacctgtgggaccattacctgttgctcattctcctgtccacctcaacttctacttctctactgagatatctgcctttgacattactgatttctttttttgttggtggcgtagcaggttgaattttataaagatagctacaatatttctgcccacatggtttttgagaacctgtccattccctgtcaaacaaactaaaacaaaaaacaggatggagtttttatgtattttgagcctagatgagcctttgtgactgctgaaagtatggcagaaccatatgcctcaagctaggacataaaaggtgatttttcacctttctgattgttctctctagggacatttgcttcagagccctaagctaccacataaaaaccctggctgccatataggaaaggccttgtgaagagcccacatagagatgcctgaggaacccctgctgtttcggcccctcagttttgaatcctcccgtcccagcaccagacatgcgaaggagggagctttcaggtaattctagtcctttttctgactatcactgcatgaaagacctcaagcaagaaccatccagctgaggccagtaaacccttaaaactatgagaagtctgaaatgattgttcttttaagcccctagttttggggtgatttcataagaagccattgataactggaacacctatttatctattttttgtatttattgaccacctaatgtaccagatgctttttttatgtgataggaatgtggcagtcacaaaacagacaaacatttctcttctggaatttaattccagtgagcgcaaacagacaagaaaatatatatattgtgttagaaggagcaaaagtcaggtttgaagttgctcagtaatgtccaactcttttttttttttttgtccgactctttgtgaccccatggactatagccttaccaggtccctccatccatgggattttccaggcaagaatactggagtgggttgccatttccttttcccgacccagggattgaacccaggtctcccacattgtaggcagatgctttactgtctgagccaccagggaagctagaaagtcaggagggggcatataaaatgtcatggaggaaagattgtaattttagattgggtaaccggaaaggacttcaccgagatgctaacaaagtgagggagtagccacacatagacctgggagtaatataggcagatggagtgcgtgcaaaggttttgaggtagatgctagcctatatgttcaagaaacagagaaaggccaaagtgtctgcaataaagtgtgtgaaggagagctgtagatgatggagtcaaaggtgatagatggccagatcatataaagccttgtggatcctagtaagcacttgggcttttattgtgaaaaatacgggaagtgcttggaaagatgggcttccctggtcgctcagctggtaaagaatccgcctgcgaggcaggaaaccctggttccattcctgggtcaggaagatctgctggagaagggataggctacccactccagtattcttgggcttccttggtggctcagctgttaaaaaatctgcctgcagtgcaggagacctggtttgggaagatctgagtttgatccctggtttggataacttgtcccctggagaagggaatggctacccactcgagtattttggcctggagaattcatagagtcggacacgactgagtgactttcactttcacttttggaaagacatctacaatgttgctggtgatactagccacagtcatctttttttatccccatgaggctatctggtctcagtggtcaaaccagctccagtcagaactgttttgctacctgttatgcctccattgggaaaaatcctctcaggatagttggagttaccaaatccaggttctctatcctatttgcctttggtcatgttgcttgatgaacactacttgtggtgactaatgaagggacagaagtaataatttatgtaagttacatttcatagcatttctttaactgggagtggttttgcatgtatatgtagtatttatacttttactacaactctgatacatagaaggtccagttggtcataaaacttagaaaagatgaagcatattgttctattaacttcttaaaatttttatctatgaattaaataatatcttatattcatggcatacaatcactttcatatacataatttaatcatctcagctattccttgaaatgagcgttagttgctcagttgtgtcctactctttgtggtcccatgaactgtagcctgtcaggcttctctgtccatgaaattctccaggcaagaatgctggagtgggcagccattcccttctccaggggatcttctcgactcagctcaaacccaggtctcctgcattgcaggcagattccttaccatctgagccaccagggaagttcttagatatgagttgcggtgtttccatttcacatataaaaaacagataatcagaaggttaagtaacttaaagtgacatggaaagtaagggtcttaaatgtgaggggtttgggcgtaaaccccaagtctgttgattctaaacatgaaacatgaaagtgaaagtcactcagttgtgtcccactttttgtgacccatggactatacagtccatggaattctccaggccaggatactggagtgggtagcctttccctttgccaggggatcttcccaacccagggatggaacccaggtcccccgcattgcaggcagattctttaccagctgagctatacctaagtctagtgctatttctttttcaccacagaaactcaatatcagaaaggcaccgaggcaatttaagatgggaggtggttgagtcattttcttcccttccttgtggcactggtacataacttcccccattgtattcttttctagggggaaaaatagctagtgagagtaataatttagaagttttctactgtatttcagagaatgtataaatttagtgatattaccatgaattcttgaatgaaatcagggttaactaatacatggaggaaattgaaaaaagaacaaaatattttaaactgtctaaacttggggcagctgaagagtgattggctgatctttgtctagtgctggctgaagaatgcttcattggaagaattcaatctggagagagaaaaagtgatccatctggctgttgcgaggtaagaaaataagtgacccttctgaacactttctttctcaaaaggcattaacaataaagcttgttgctattcactgggctctattccagttatgaaaagaagagctctctacagatgaattataaaacttcaaagatattttaacaagttatatcttaaggttctaagcatattttgtagaatggtttatacctttgaactttagaatcgactggctttgtcttcactgacctttgggtagcatttctctatgttatagtttattattaaagataaattgttctgtccccgcccccagagctattactttttttcccctctctatgactctaaaggactaatcatatttccttgaggatgtagtagaaatgttcaaggtgagtattctttataggtttagatattacattggttatataaagtgcaactttatgataatgaactgattactaaaactcaacagactttcttaagcgtgttctcttctctgataccatgctgcaaagtttataaccatctttgtaaatctttttctggaaatgtagaaaaagagttttaaactaaaatggaaacctggcttctggccctgccagtaccttaatgtgagaatttagataagtcattcagacaaggcttgtattttgccatctgtaagagggttggaatatacaaatctttaaggtatcttctaatttttatcaaatttaaaaattataaaatatgaattctatgccttacacctctggaccacctcttattgttagataaattccttttataattaaaaacccctatgttaactgaaaatttagaagatagaggagaaaacagatgggagggagcatcatttatacttttaccattgtattttaaccactgctacctttttaaaaatgtattttcaattcttttcacatgtacatttaacagagttacaagactaggctataagcaatttggtgtcttctggcacaattttataaattcctcagtgatagcaaaatttttatgctttgtgaatggatttgagttttggaagcaattaaaagtcattcagacccaattctagtgactatggtgggtagtcatgctgagtaactctacttaggattcaaaatgaagtgtgacagcaaaccagtgttttttatgatttgcaaaattggttctgacattaatttcagatatatttctagaaatattttgagtaaattcagcatcactggaataaatgcctagcctctccatgcacagttgcatgtatatgctctgtgatgcttctaatagtaaataaaaacattttgagcactttatagttatcatctcatatcttgtctgagccataacggaataaattctgaagctctctataatgctttgaaaagcccgattccactgaaaaaggacacccccatgccctaatctaacagctattagtttccacttgctgtaagtcaatcatataaagccacatgcaagactttttgtgtccaaacctcacaattatctgagttttgtctccatcacttgctcaaggtcacataggtagtagttgcagagatgggatgggcacttagatcttcctgagttgaaagagctgctctttctgttatccatgtaggtaactgaagagatttaatacagagccttattattgttattattattgcctgtctctccaatagcattttggtaatatccagaccacttgacatttatttatctctgtatacctaaggtagatttagatgcaatccagggtaaccacaatgtatttatttatattttaaattcagattagtttagatcagaggaaaaagaaaagcaaagaggatgaaaatgctcttaagaggaggatgggtgcctgtgtggctgggaggaagcactcttcttagattctttgttcttaaagaaggctttgcctctgtaaatttcataaggattaagaatcaaacaatcccctgaaactgtcggctatccaaatgccatactcacagaattatttgactccctttcaattttatcaatttagaatcaattctacttggaattaaaacttgtatttctttcttattgtctgtttctgaaacataaaatagaacatggacaaatattagttcaaagcagtatgaataaaagaatttttaataaaaaagtaaatattttatttaagtatgtttcccaaaaccttattaagatcattttcacttaagacatgttatccttcaaaggatcaacatggtggagggattagagtatcaactgaatagcatattagtgtaacatttaagacaaaaagtttcataactagctcattgtggactttaggcggtatcaagtgaccgaccaatcactaggggttctcagttttccctgtagttagcctcagaaaagttaaagaaaggtactctaaacagtgattaaataactctagaagatcctcattacatattaaaatgatatgtaaaggatttgttttggctttctgctgaacttttgtgtttctaaaaatgaactgcttataaatataatatatttataagcatataatataatatataatatatataatatatatataaagatgcttataaagatgagaggtagtcatcctactatgggctgtaagttaatataggttctattatatacaaatgtgttcaaagaatctttagcctcttttcctttagaacttaaatggataaaagagaagataggattaaaggaaggtggtatagcaacagcattttctcatattggatctacttggttaaaatgacaaaatgtctcagggtttgtgtgtgcttgctttcctagtgttgaggtgcgaaggagaggttgtttgactttaatgatcatgagtagagcaagaaagagaaaatccttagtggaagcctcaagtggtagtggttctagaggtaattgacagaccaatgtatatagaaccaatgtgtatagctacggacggagaaagcactcaggtgtctaagctgggcctgaccagagtatcagccagaggctctgtcttctaccacctccaacgtatcccctgcacggagactgcagtcccagccacttctagaattcaccatgctgaagccccttgtgctaataaccaaatgaaccactgtcagtaattggaagagtggatcatgggacgatggggctggggtgggccaggggccagccaattcaaccattgtatcctagattggaactcagacgtgtactccacagaatgtcattgaatcaaatatgatggtttggttccacagtacgatgctataatctcatgtgcattgtaaacaaaatgcttagttctcatattaattattgtgggtaaccatttataacattaatttacaacccctagtaggttgctgaaattcttaactgatgttttaaagtgactcagtagattctcattattttgtagtatacttcctctgtcattacaatgactatttgacgtattttttaatcaaaatttttggtgcccttgggtggacaccttttaaaattatttaaataacagttcttctgaaacaaccatattatgacagctagtctcaaataaggatgtgtaaaattatattatatagcaattgaaaacattcttgggttttgacattaaagagaccagggctctcctgtgtactggctctctctctgtgtgtgtgtgtgtgtgtgtgtgtgttcagtcatgtccaactctctgtgaccccatgaactgtaacccaccaggctcctctgtctatagaattttccaggcagtaatactggaatgggttgctatttcctcctgcaggggatcttcctgattcagggattaaacctgcatctcttgtgtctcttgcattggcaggcagattctttaccactgtgccacctgggaagccctgtgtagtcttgaaaacttatatattctttcagccccagttttttaattagtaaaaccaatctaatagtctctactttgtagggttttttgaagaactaaaaccttatatatttaatttagaactatgcttggtcttctataattgtttatgaaaaataactacaataaatacataaatagttaacattccagtacaatgtataatgctcagtaaattattttgaggataatattaatacttattagttgggtgggactattataactcatgttcatcaaagaactatggggaaatgtaaagcaattacagactttctgaagctagtttctgtggatgtaaacaaatttcagagaacctgttttttattgctgatgtcctaatttggacaggaccatgctaagaccttgaaaagagaaatgacagaattaatttataggcatttaaaaatgaatcaatctagcactatttctgtttcattttgttgccagtattttcaatactcaagacagggatcaattcctagcagctgaagataggcagtggcataggcatccatcagtcacacatccataatagctactgtgttatatttcagagcaaaaggcagttcacttgagaaaggcatgtttgctgatgatgttcaaggtaattccacaagtgacattgtggaagtcattattatagatgtttcatgaagttacttaaagaagattattttgaagtatcaatctaaattttaatgcagtagtttcttctgcagggctagaaaagttatttatttatttaccactcccaagacaggtttttaatttaaaaaaaattatgatgggttaattctttcagtcaagaaagcaaaaaaaggggatggggatttattattttccagaaaaagaaagattctaagtagagagatagtaccttgaattttaaatttcttagttttacataattaatatgatttaatttttctaatgaaaagtgtggtattggcacaaacattaatagatcattagagtatagagttgaaggtatagaaaatggatcaacttttggtaaaatagcaatgtatcttataacaaaacaaattcttagtggaaaaaaataaaaatattcaacataaataaataaatgttaagaaaagaaaaaactgtcagtagagagaagatgaaattttttccaacctagggataaaaggtatttctaggtataaaaccaaaaaagaatcataaaggaaaatatttataaatttacctatgtacacttcaatgcaataaacatacaaaatacaaaaccaaacaaaccataaaaagcatatgataggaaaattatgttagaagtttatattagaaaaaatcttggaaatcaataagtaaaagacaaatactcccctaactagaacatggggaaaaaaaaccccacaagaacaaaaccacaaatttcagtacctatataaaatgtttaacatcacaaataataatgcaaattttataaaataaacttctattttaaagcaattaacaaagacatttaaaattatattattcatggttttcgggaatggaagctaccacacattgtggaggtttttgttggcacaccttttgtaaaatgtttttggcaatgtataaaataaagcttaaaatatacatagctctgcatctttgttaggaaatggtcagcgaagtttgcaaagatttgatacaagtatgagcattatgcaggacaaaaaatttaaaaatcaaatgtctaatatactttggccacctcatgcgaagagttgactctttggagaagactctgatgctgggagggattgggggcaggaggagagggggacgacagaggatgagatggctggatggcatcactgacttgatggacgtgaatctgagtgaactctgggagttggtgatgaacagggaggcctggcgtgctgcaattcgtggggtcgcaaagagtcggacacgactgagcgactgaactgaactgaataaaattaataatttaaatttctactgagtgctcattctgtataaaaaccagtgttaggtgctaaaatcatttacagaagcaggaagtactgtgctaccattaaaaatcgtgtttttgaaggctatttaataatatggggaaatgttcacaataaaatagtatcttaggaaaaagaagcagtctcagactgtatgtgtagcaatatctaaaagatatctaaaatatctaaaagatgacaactgtggggatctctgggtgatagtaatgtaggaaagtctatgctttttctatttttcttgcatttcatcaatctaagtaaaatgttaatttctattaaagaaatgtccatgtcaaatataatatcaaagtaaaaatgtatatataaattaataattataataaacttacactgacctgttctataaatattttgaattagagaaataagtgttgagtgaaaacactgttgccacatcctgttttaagtcctaaggatattgctatactgcactaacaagagagaaaagagaaaaaatgacttgcatttccgcaggggtggggatggggccatgggaaaaagggaaaaaggagagtttacattcatgctctttccctctgtgaagaaatgctagcagtgtgtgtgtctggcagtggggaaggggcatgctatttctgtgcaatcctgggagtatgcagtgggaaatctaatcctgaatttcgaccttctctgaagtgagcatgctcaaccagttaaactaattaaacaggagatagagcctggaaatgcaggcacttttgcttagttatcataatacatcactggtatcctgattttagggaccagtgcacccatgtaaggtctatgctcagaatgctgagtgatacacatgattgaagagacagaactcaagggcttggcaggtcttatttcccagaaaccaataactgagcttaatttttaattacctaataatccctgaggtcactttacataagatgcaggacttatttatatatttgttggttcattaacatgaattagtttcctttccctccttataggagactggtaaaggaagaggtaggagggtggtccttaaaggcatttgtttatcatctaccatttctaaaaagttatagagatttcagagtgaaaaattttaaaaaaaattgaagtattcgatggcaagtattaggagcgccaaatgcatgtgtataaaattcaaaacagtttactaacaaatagctagacaatacagtagacaaactggcagtttttggacgtagtcggttggatagttgctttatacccattaaagatgccctgctgtacatgagctaccaagaaaaaccacagtcaggccattcctcacggatgccacaacacagacgttagtgtcctgcagccaggtaagatggacaggattgttactgagcttctccaaacacaagcatatatgtgtgtggcatcactattctgggaagttatagcggagatttccagcaacttacattcactgatgatttccaaggacggtaggaagtactcatcgcagacaaatgacacagccatgaacatgtaaaggataattaggaagtagattatgatgcctccatctgcacgttcctgtttcgtgaaaaacccctcaggaaactccgatgatggggatataacacactgggtgctatttcctggtaaggaaaaggaggtgaaaatctgaaggatattggagtcacgcattccaagcccacaaagagaaattccttaagaaaatagtaagtgtggggtttctgggtggaattttaagaactctggtaaaaatgtataaatctcttttgactatgatataattatagatccttaaaaatattagtctttgggacccaaaagaggtgttttaataaaataaagatagtggatgaatttaaaagaagaaataatgaaatcagttttccttgtctgcgtcaattctaaaggggaattctgaaccccttttcctcttaaattagaaactatatatctaaagataaaaatttctaatatccatgcaatatcattttcccatttcagagcccaaattgtccacaaatctcaaggcccacagagaatcattcattgttgcagacagaatttctaggatgaaagattcctttttctgtgatgaagtctccagcaataaaatctgaagactcttctgtttcatggtatctgtgggttatttcagagccattttcaagaacctacctgaaggactgaaagtatttgatatcctaccaaatgctaaaataatctaaatgctcagtcgtgtctgactctttgtgactgcatggactatagcccgccaggctcttctgtccaaggaatttttcaggcaagaatattggagcgggttgacatttcctactccaggggatctttccgatccagggatcaaatcaaattcgcgtctctggattctttaccactgcaccacctgggaagccccaccaaatgctaaaaatccgagcaaatacagcggcaagtataagcaaaagtgagtcaagtaagaattcccctctctttgtttatttgtatgtggcggtagcagcaggggtggctgagcccagtgtccacctacctgtagcccttgggagacgctgggccagggaggcccctgggggaggcaagtgtgcagtagcccagagaaggccgaggagcagggcgcgtcttgcccaccatgggccccctttgatctgcattccagtagcaatctttctgcagcgtgcagccttgggaagggagaaaaggaggattaagctggatcatgtgaggagtctccttcctgccccacgccctgcccagggcacatctcagcaaggccagtgcttgagggagggtgactggagtcagttaagctactctgatcagcagccgtaaacctcagagaggctggaagaggtggagaggagggggacagtcccctggcccatggtccctgagggcagattgaggcagctcattctttgtggactgattttattgtcttcatagtggctttgctttttttttttttttaattgaggataattgctttatagtattgtgctggtttctgccatacatcaaggcaaatcagtcataattctatatatatatcccttccctgttgagcctccctcccgacttccatcccaccctctaggtcatcacagagttccaggctgggctccctgtgttgtacagcagcttcccactagctatctgttttgcatatgatagtgtatgtacggcatgatagtgtatgtacggcaatgccactttttcaatgtgccccaccctctccttcctgctgtgttcacaagtctgctctacgtctgcgtctccactcctgctgtgggctttctccagattctaagaacctgagtttacaagtgcttccacctctctctccagcccttctagaagttttggagctggtgtctatgtgttctttggctaagtttatacccttttatactgctgttttggggcctctcattctctctccagttagggctccatgcagggaggtcatgaaggaggctccgacaataatctcctggagaaaggatggtgacttgaaccagagcaacaacagtgagggagcagagaagcgggccgcttccagaactagccagagccgtagtggatgaagaccatttggtcatcgattagctgtgctctctgccagaggtttgaaaatgcaaactggacacgccagtgagtgttcaaatataaactactatcctccctgcttaagcatttactgggcttgctggaatgttaagaacttctggcagtgtggttacatgtagcaaacagcacaggctctggagccagacctcttggtttgaatcctagcattgctacttactagctataagaccttgggcaagctatttaacctctctcctcttctgctccattctctgtaaaacaggaaggttatagtaccctctatttgggttgtgtgcagattacataaatgaatgcacgtaatctgcttagaacagcttctgccccttggtcagttttacctagctatctattatctatcatgttcagttcagttcagtcactcagtcgtgtcagactctttgcaacccatggactgcagcacgcagcttcccttccttcaccaactcctggagcttgctcaaactcatgtccattgagtcggtggtgccatccaaccatctcgtcctctgtcatccccttctcctcctgccttcattgtttcccagcatcaaggtctttcccaatgaatcagttctttgcatcaggtgtattattattgctattttattacttttgattaagatagaagcttggccataagggtattttttagttttgcaactcctgtggttcctttgctttgcagaaaacagcataaaaagtgttctatttgcttagttttaaatttagaaactgggtttttctggtggaaaggagtaagttgcttctgatgtttgtgatcttgatttggtgaaaattctcaaacaccccctttgttttgctgggaattgttacccattataaacctctcagaaaccatcatttccaggaactgactacccagatgtgtggtgtggttgtgaagctgggataatgagtcaccaaagtgtagcccaggaacagagcagattcccagcaagcagagttctggctgctgatacctgcaggaggtggcaccctggaccactggcctgtggtctcaatgccagcagtgctaaccccctgggaagagaccacttaactttgtgtgtgttgaagtgtctcatgaacctttcctctctgaaatgcagtggtttaactaattaataaaactaaacattataaacagacagaacaggaaaatgcaagcccagggtgaatacttatacaatgtatattgttaatccaggaaacagagcaaatatctgaagataaaagccaatgactatgaaacaattccagtggaatcttgtgcagagtaggtacttaataaacacttgttggttgattagattgtaataagtcttgaaaacacattcccagaacacacatatacttgttctgaacaaagtatctgataaaggatagttttaccaagaaaagagaatttaggaggctaattagatttacttcatacatttattcttcattttgcaaaagaatgtttaaaagctttctattgtaaaataaaacatataagaagccacataaaataaatgtagagtttattattatattgttattgttattttatttttataagatggactccctcataaactcctcaggtcaagaaatagtttaccagacaccccagcaatcctttcatgtgcttcagtcccaacttatccttttccctgggagtaaccaggctcctgacttatatagtagtcacctccttgtgggtgtatttttgatagtttatcacccatccctaattgggtgcattcttaggatactgcagctcagccttgaaagaaggctcttaagtctcctttagtttacaggtttcctctcttttcttcttctcattatgggttatctgttagaaagcccccgggcatttggtctgtagagtttctcacagaccagattttatcggttgggtcctatggtatagctcaacagatgcgtccgttttctatatttttgttgattgacagctggatgcagaacttgattagactcagttctgcccctttggcaagactaactgtttgctcagaatctgctctgctactgggctacgctttggcatcactaaggtggtggtgaggtctttccttataaagcacacaatgtctgcttctctcttgtggtaatgttattaatcacagcccttcatgctcattacctaaatccgttcattcttttgcaatccattcacttgcaaaagaaagacattctacttctataatttcttcttcatttattacttggaatgttttacaatgagataatttctatcatccactgggtaggttcccaggggtatatagaaaagacaatatatgtgcttgactcttctgtatttatcacttctcaggatgactggctctctgttttcctcccaaataaccaactatttaaacaattattatgaattaatgtacttaaatattttgatgggttccaattatagttatcatttctgaagttcaaattgtctcatctttaggcagaaggagcctcttcagtatgacttctgagagccttaatagtttctgatagctttcttactgcctaatgtttaaaaaaaaaataaagatgtgctaggcttgtcttttacctcaaaccagccattgtcccaaatgtctctctgttttttcaaatgttaagtacctcaagaccacgatctaagaatctgggttgccagggatgttcatcctttctctctctctctctctcacacacacatacgcacacacacctcttaatacattgcctcatgagttcataccgatagttctcattcaaggttctcatgtactaaggtggggggggggcagtagaaaatccagtgcttcataattattcatttgctgatcctatttatgaacctcaaaatagtgatattgatattaccaccacatatatagttactgagaagagttttaaaatggagtatatgccctttccattctctttctatgctatgatctatagtctatattcattgcctgagcataaagtcattaaatatattctttttccctttaaccctcgtctaatcttggtactacaaacaaatacattttcaacccttgccaccattcttaggttgatatttctctagatactctgatgctcaaatcttatattctagtagattctttggaagggctcatgggaactatattccttgagttctttcatgttgatgggattattaaagtttgaactgtgtcctgtactcacagtgaaaattaaaataaataaaaaaataaagaagcccagaacaagcagtctattgaaacaaccaactaagctaccctggtaaaatcagtgcagaggtagtcattgagtcaatgactagtagtcatttttttcttctgaggaataaaactgtcagaattactttcagctcttccttgctcactgaccagcttcagtttcacagtcttctcacagacacctggacctctgctgagttagcacctgctatatttggaatcaaaggtgatagtaaagttatgtttactaagcatgaggcatattcatgtgtattattcagtgtaattctccctctaaccctaaagggcagaggagtagtttttacttgttgctcagtagaagtatctgtggcttttaaaattgctgatgacttgacacttactcagaccaattgaatcaaaatctaaggggtggcttaggcatggatattttgttaaaatttcccaggtgattctaggggtgttgagaactactgggatggatatttctacccttgctttatagatggtagattgagtcaattgcctaagatctaaggttatatagttcccaactaagtgtcagagccaggatgcaggcaaaagtctatttaatgtcaaagtccaagaacgtcctcacctgctaagttgagccaactctttagagtgtaagtttcatgagggcaaaaccatgcctatctagtttcctccagcatttccagtgttcaacacagtgctgggcatgtggtagacatttattaaatattgttgaatggatgagtgaatgaaataaaatagggaattccccaaagacttttccttcacaacacccacaggataagaatccacagtatcttctgtaagttgacccttcgtgccatccagttccccaagcatctgtcaatcagctctccagctccacctgctgctacttcaaacaccatgttgggctttccaacttccttttggaggaaatacaggatatctacaatgaggaaccccgtgatatcagtcatttgataagagattttgacttttcttcatgagaaagagagctagtaatgttgtctttaattatctgcacccaaccctgaagtggaggcttttgtaggcatcccaactactgtgaagaaagaggaagggaaaggaaacagacggctaacactggtcctgtgctctgacttcagcttgtcattatcacctttttattctttaactttctgttataatatataatatacctatacaactaatatacaaaaagagggcacatgctttgccattgctttttcgctatttaaacacagagtcaggccagatgggggcctcttaacaagatgagtgattgatggtcaccatgttaagaacaatctgcaagggtggagatgcagcaagcattgactgcaggtgcatcctcatagagagccctctgaatctcagctgctgctgccccatgactggctttccctcaggctgctttcctaggaagtagcctaggaatcctcatgacaaggagctttcagctcagtctaccaagcgccttcatttttttgtctctaatcaacaaagaagttgctagctgggaccatagacatggccgtgagtgagcaacaatctgctcagtgtggttcacatattcccttttttacctgccaactttctcacaccctcatcctttgtgagtttatcagcaaaagtcgggatcatgcaccggctgcgagtatgactgagcatttccaatttctaacccagttcagattggtctcattcactgctgtatgggtcctactcagtgaaaagtgtttaaaacattttcagttcctagaagggcttcacagtcttctcaaaatttgtatttttttccccctggagggtatattccaattctctgaatatgctgatcctgttttacagatcaaatattgtttaaaataaaaaaacactttagagtgaatataattttaaaattagctaaacctgggttacagctgcctccttcattctttctgaaactcaataaatgggggtaataccacatgctttttaggctgtgagattacaaacctagagcatgaatattcatccccttttcctctggaatataactccatgagagcacattttatgtcactagaacttggcagagtgtttagttctcaatgaaattgaatgcattgggcaggccatgagttgggggaaaatgaatagataaaggattttcattagctatatttataaaaaaatgtttgctttttagcctgtattttggtacttgttacactttcttcatttgtgctagccttactctgtcttccttcaccaggtttaaatataaaatgtttcagaacttggtggtttaatgagtgatctgcaaaaaggcttgatccagcctattttttttttcactttctcctccagctctatttcactgaggcgttctgagggggtggcaagtgtgaaaagtggagggcagggggccctgactcatacgtgctggagtggggagatttattttcttcactttaacataataaaccccctcagggtctgagttagcatcatcatttctccttagtctgctctgtgaaggctgtcatccccacatgaagagattgatgcctccttcactctaaataatagggatgaaggcatcagggattcttcaaattttgctgggcttagagtgtctttcctaggctaggaacccaagagccctggtgttcatgaggactgaatgtataataccctggttttgaagaagggaagccagtaagcactttatagttctttccatactgggataggttacacacatcatgtcgtgtgtttgaagtccttccttagcaagtagagttggaggtggtcatagctctgctgctattgttgttgggagtatggagctagaggggaagcaggggagttgaccaagagggctaaccacagtaatacgagtagcttgtactccatgcccatgaaggccagggctgttgttggtactatgaccgtggccactctttgtgaatcgatctgtaggcatggttggcacaagtctctgtgaaaaggttccttgctttccaggctgtgagtcttcttagcctgctgcatctttggctggatattcccaaagaactagagttacactacttttttctagaacctaaggacacgcatatttcactgcttgctttctcttcctcttttccctcttcttccccaaactgaaagttctctgaaggagacatggatatgtacctcacagataccccttgaaggacttgctgtcccagcatgggggttgctgtcagcagatggcctccagtttagccctgtcatggactgcctgagctgaagagcctccttacataaaaccacaccatcctcagggcagcccacatctaagtaaggcagagacgtataaggccagtcatttcagtgccatgaagacaactctgatgggcagtgtggtttcagagctccccactgattggaccagggcttcattggacctgccttgaagttcagcttctttaacttccaaatcctgcttcctccctttcctctcaccccagctccatctaaatgacagtctcaaagaaccctacctgtgacaggccctagcctactttgtagcttagtttatgctcataactccaaactttacccttgatatttgaacagtgagttttagatctgagaaaatgctcttttccttcaacaaaccttgactttcaaaattgttgcctatagatggaaatacagattgaatttgaagctcacagttaaggaataactcctttgttctttagtgtgtctatcgttttcttgaagcagtgaatgccactgattccttgggcaggtttctggaaattttctaaagcatgtgctacatgcagcccattttccttccaactgaatctcagtgaaagatactgcctggttgtcatccatgattcctacttctcccctcctctaccgtctctatcaatcaccgagtccaaataactctttttactgaacatctcttgggtccacagttcagttcagtcgctcagttgtgtctgactctttgcgaccccatgaatcgcagcatgccaggcctccctgttcatcaccatctcctggagttcgctcagactcatgtccatcgagtccgtgatgccatccagccatctcatcctcggtcgtccctttctcctcctgcccccaatccctcccagcatcacagtcttttccaatgagccaactcttcacatgaggtggccaaagtactggagtttcaggtttagcatcattccttccaaagaaatcccagggttgatctccttcagaatggattggttggatctccttgtagtccaagggactctcaagactcttctccaacaccacagttcaaaagcatcaattcttcagcgctcagccttcttcacagtccagctctcacatccatacatgaccacaggaaaaaccatagccttgactaaactcttctccatatccatgctaccattgtctgttgcccagatttctataggagcctcctgacaaggatgtcatctcaatcccccactcccgctgtccttccaatacctgtgtcaggtaggcagtagaagatagtacatgcttcctaggtggtgctggtggtaaagaacccacctgccaatgcaggagacataagagatgtgggttcaatccctgggtagggaaggtcccctggagaaagaaatggcaactcactccagtattcctgcctggagaatcccactggacagaggagccgggctgtacagtccatagtgtcaaaaagaatatgatacaactgaagcgacttagcacacatgcccacagctcagaggtgcagccaggtagaggagaaggagccagccagtgactttcagaaagagggtcactgaggcaggaggaaaaccaaaggaatgtgatattgccagagcagaagatgggaagctgacactgaggactggttagggttagggtgaaaatacgtaacagtccataatatttggcagcacagagatcatgggtgattttcaagagagaagtttcagtggagtccagtggtagaagttaagttagaataaacgatgaagagggaaaaagtagagggtttttgattgttttatgtatgtgaaagggaaattgagcaactggaggagaatattgggtgagggatttggggttttgtttgaatgtcatgggatattctgtagcaggtttttgcattgatttggatgatccaaaaacaagcatgacttgcacatgctgaagagagaagggaatccctgagaaagttctgggggtcagggtttcagagctccagagggtaggtggacttttgctggagaaattctgcttcttcccatgaaacagaaggaatggagaagatggatatagaagatggatatagagtcacagattaggtggggaagaggatataaacattcttttctgatggtttctatttttaaatcataaataacattttaaaaatcatgttttaattcatttttgaggaaggtttgaaaagagaaactgtagaagatatgaaataatcatcttgatattggaaaagctaatttactaagtaaatgtaagagtgttttgttcaggtttttgatcatgaatttaaagcaaaactggttacctctattctgtgtgtatgcattcattctccagtaatattctatttttaaaatgcaggtgtggggaaactggactccactaggtgtgttttattccaagcaagtgttgatagacaagagaggtgtaaaggaggagaggaaattttcaaagaagtgattataaattatggattatgtgatctaaatgaattagaaagaaaattgaaagagggaactgattggagggtaatgagaacatggctgatggtttagggatattggtgaggtgaaaaaatcatgagcatgaactggagttgaggatggggggtgtgagttcgaggttggtggggagattaagtggggaggaggctatgtaaattcttagctgatgtatttctatttttaatcataaagaacatttaaaaaatcatgtttaattcatcttatatttggagatttgcagatttggaaatggcgctgattgcagtaataagcagttagtgtgtgataataagactagacaagcaagtggagatgagaagttcaaggaactgaaagtccagttgggtgtcctctcatcttgcacacatcttggcgttttgtaattgttagcctatctttccaacaatgtgttatttaggacaggatcacatttgtcactgcttcctccctaatgcccagaatggtacctgacccataaaatactcaataaacatttacagaatgaacaaataagtctattcttttaaaaattctgaaagttattcctgaattgagggctgcgtcctgggataccactgtcttcactccttgtggaccacttcttatgggcggccttgtgggtaataacatttactgctgctgtggatgctgtgagaagcactctttgtaattctctgtggtatttagtgtagggggttgctgaggaagtaattcactcccttacacaatattccttccattaggacccacaagggaaacttttctaggatttcattgctaggaagacctgtgactctcctgagtgaactgacaatttgtgagtctcataagtgaatgtgttttcctctttgctttgtctattacagccagatttgtggtggaggctgaggctcagcttcagcaattatgcagaaaaacatgatatccatttcttatgaattattttatcctttgctttatctgattatcttttcctgatttcctcatcttggtgatttcttttcatgtttctttttctattctagaatctttcttgaatatttaatattaaaatatgtctccccaaggttcagctgggtgaaattttctcctgaccacttcaattggtgcaaattcctggtgatcctggggaaagcaagcctgttaaaaaccttaatagtgaagattaagattaggtccatttataaatagtacatgtttctgaggatttattgagttaattagtgttgagaatttctataatatataatattcaaaatgtcatctatcttagacaataccaggtacaaaattgtttataaaaagaaaacatatttctgaagatttatcaattaaatttaatttatcaattaaaacctctggaattccagctccccacatcaggctttgctgctccctgaggctcagtggccccctgctctgaccatggccatttggagaggctccagttcctatctgagcctttattaacttaattaaggcactttatgaatttttgaaatatatttgcttaatcaaataatttaagaaatgtaagatgagctaaatcatgtctaaagactctgggagcctcataaaaaatgcaaatatggtagtaaagtggagatcaagatgacaaatacggacagagactccgagggatgataagaatgaatgggaatgagaagatgagtgaaactctacaggactaaccacaagggaacactcaatgtagagatctacatgctataaagaaaatgaaaggcaaaaaaagaggaagcgtgttatagctatgagctttgcagtacaccatagtggacagtcattaaatacattacgtacactaaatactgtcactgtgggaaactgtattccagaacactcgttgatgcctactgtaattttataagagctgctttcctcagatggaagtgcgaagttagcaggacagagaatgagcacaactcggcatgggtgctctcacagtggggcggaaaccaggccactgcgtgcattgactgagggtaactgaacgtcctctcaggtttgatcactagtctcagtaagtattgtgcataagaagagtgagattgttgaatgagattgttcaaagtgtttgctgtgaaatacatgaataagcaaataaaatgcattaaaaatttattaacaattgtaaaaatatttgagaacaatataagttatgttggtatagctagttttacatatttttgtaaactacctaaaatccttttatgggagaagctgagttattcattaaacataaaataggactataccaagtcatagttctactattgaattgaaaaaatgactctaggaatggaatgtgtattattagaattattagaactactagttaccacacacgatgcgcattgctgttgtttaagtcactaagtcatgtctgactcttgcgaccccagggactatagcccaccaggcgcctctgtccatgggatttcccaggcaagaatactggagtgagttgcaatttccttcttcaaagcatcttctcgaccacctctggaattccagctccccacatcaggctttgctgctccctgagcctcagtggccccctgctctgaccatggccatttggagaggctccagttacatagtgaaaagagaaacacttatttgcttaaagtcagtttgaaaaacaacaaggtatctgttttgctgtgtgaaaatcagctgaaggggagtgtcttgagaatcatgtgtgctgagttagcacttctaaagtgttacctggagaatgtgcacccacagaatgttcacacggcttgagggaaattcacattgggcccttgcctgagtcctgtaagataaagttgacagtagaaacacgtttctgtttccctgtttagcctcctctcatttgttttctctgtcctgctatagtagcttctggaacaatgtacaaagactatgtccctcttacactcagcagaccactttgctcaactagaattgctgcaatcttccctctctccctggagccctccctgtagatggcagatagtccctggctggtcccatggtgttgtgtgtatgggctgggtttaatccctctctttctcactccaggaatgagcattagtagtaggttcttgttcttaagaaggaaggaagagcatgctattgagagcagactgggtctgggataattcccagaagaaaccctggcgccttgaggtacaaagtagtagtcttctacttgacacagatttgagcagatcgctgaattttgggaggtgtcagagactgatttagaagaactgtaacctgtgagctcatttgcagcttattatcaagtgcttataaaaagtacctttaggggacatacctagtggtccagtagttaaggcttcaccttccagtgcagggggtgcaggtttgatcactggtctgggagttaagatcccacatgccttgcagccaaaaaaacaaaacataaaacagaagcaatactgtaacaaattcaataaaagactttaaaaagtagtccatattaaaaaaaaaaaagaaacttttttttaaagaaaagcactttgaatatgcacatcacagttctttttaaataaaagatattaatttaattttaatttgatagtatgatatttcacatcacagttcttaacccaagaaatacagagagtacatggtctcatgggagagacagacattaagaagatcattgctctcagggttataagtggtgtaaagtaggcaaaacagggtgatgttgaaatacaaatggtaactggagggattccaaaagagcttcaaagagatggtgttattgggggtgggccttgaaggaaaagaagaatttgccatgagagaaagaaaagaagggtaatattccaaggtagaggaattctgtgtccaaagacatggaatccggaagtagcctggcttcctcaggaaatagcacacaggcaggagggagctgctcctgtagggaattgggggagcaatggctggagaggaagccgtgccacacaaggtgcctttggttcccagccaggggcccggggccttttcctctccctctgtggaatggaaccatagattttggaaaaggaggatgtcttagaaaacatctggctgataaagaacctgagagccacatggtgaattgattaaactgcatatttaaaaatagagcatgatttaagagttactgccaaatgagaatctcctgcagatttttgtcttgcttgaacacatatatattatcaacataactattttgtttcttaggtgtgcttgtttgcaaatgatggacagtgtgttgtggcttcgtgttcttatagacccaagaagttgggtctgtcagtgtgtttactgtgaagaattaagattaatgctttggacactcactcataccatgcaggtgggagtatacattggaacagttcttctgaagggcagtttggcaatgtacgtcaaaacagcatttgaaatctgaacagcattgacctcaaattcctttttaaagaatttgttcaaagggactggccagaaatgcatctagactatattcgttcattgtaggattgtttataatgtcaaaaaactggagataacatacattttctaataaaataattatggtacagtggagtattctgtcaataataaaatgattaagtagaaatttttgaaatatgaaaattttatatgaaagtatattcctaaatgaaaaaacaggttacagaatggcatgtataatgaccctaattctgtaagagttagatatttttacaagattaggtttatttccttttacaaaaattagtctacttatgtgtacgtatgaaaaaaatctggaaaaatttataccaagatgttaatagcagttattactgggtggtaggatagtaggcaatttttaatttctactgttgtcttatccatataatttctaggattttggtttatcaataaacaagcatcacttgattacttgtgtaattaaagagttatacatcatttccccatgtgagtgcagactgattatttgcctgtttgttgttgttgtttagttgctaagtcgtgtctaactcttttgcaacccatggactatggcctgccaggcttctctgtccatgggattttctaggcaagaatacaggagtgggttgccatttccttctttaatttacctgtttactacacctatttaagatattttgattgtttcttctgcaactgtttgccaaatgattggggaaaatgaagaagtttggggataatatataatggctggaaaacttctgtcttttgtaggttgtgtctgtgatgggaaagataggctaggtttatcactactccattttggaaagcacaaatctttaggttaagcatggctggctgccttccagaatttccatttccttagtgactgaatggcgtaataaattggataaaagcatctgctatttttcagatcatctatgctgtgcaaatgtctcaccggacactgggatcccccttcaaaaactctgatttttcatattctgcacatagagatggaactaatctggggttgagccagtcctcttagggggtgtttcatacttggtttgtccacttaatttggacgctggtgttcaagtgggcgtcacccacatctagaatctgcttctaacacttttagaaaggattctgtaccttgggttttatgaagatggttaatctattgtgaagaatgaactaaaacaccattcattgttcttacagatagacttcaagctgtaaaggaaagatacacagcaggttttgcccttttcttctctccttcctccctaaggaacttgaagataactttttactagactagttttggtccaaactggtttcttttctgcctgtttcatgttgctcttatctgaaaagctcccatctgccctggggtatctacatcttgctcttgtctttattatagtctttatttatggcagaatgaaggaatgacctatcaattggtgtgagtttttccatttttttctccttccctgtttcaggtgggaagcaaggttgttcttatttctttaccttggaaacttctgcagggaagagagaagaaatgtcagaggacaagagctcttctaacacgtttgaagatcttgagcttttcacagtgatggcgttgggtgttctggggaagacagatgcagagggagcatctttaagcacaaggtggagcaggaaaatccagatattaagaagatctggagaatggccagtctggagagtagttgggacccatgccctgctcctagcagagctctaggagggcaagctttctgaggtaccataggagatttaccaaattgtgtgtgtgctcagttatgtccagctctttgcaacctcatagaccacagcccggcaggctcctctgtccatggaattttccaggcaagaatactagagcaggttgtcatttccaccaccgggggatcttcccaaccaagggatcaaatctatgtctctgtgtcccctgtgatggtaggaggattctttacctctgtgacacctgggaagccactatggggaaagaggctggaaagaagtctgagagacactgcatctctggctctgaatgacatgcactttgaggcacacttaagctgatgagaagaacatgctgtttctggctctggtgtcactggctctgagtccatcagatgtacttttttaaaaggccttggtttcccttcgatatccctccaacatgctgcctatggttcatagagatttctgagggttttttggctctaagaagagatggaccagaccactgcattccctttgtgaggattcatagtttgggggccagaagctgaatatttaagggctgtggttagtaataaggtttgcactcctttgtgtgaaaaagtcacttccaggttggagctaagaatagataacccattttcataactgcatgagatttcctatttcacgttattgaacatcagccctcccttctgtagcagctccagctgtaatcgtttctctatgcttaggagcaggtaatccatttttagttgcactattaaaaactatgctattgattatttcttggtttgtgtcatggtttcagaggctgtgatgatataaagtcactgtatgtttggatctctaatcatcgttgctcatgtgtcaaatggggctgtcgatgcagactggagcaataaggatgacacaacatgaaaatgaacatggatgacaagctgcagatgagaaatagaggcagcagcactgacctcaggtctctgagagctcagcgggaaagttagagcatagtcaccaggacctataatacacgaataacataaaataaggcaggaattaacaagggccagaatcgagttacaaggcattatgcacacttagagaagggagcatttatacctggatgaagtattttagtcttgaatgatgtataggatttgtgtatgcagaaggggaagagtaactcatatgtctattttttggtgaagtattgcaactaaagcctgaggatctggttcttaaggtaagttacaggctacacaatccatcatgcgccacgctttcctaccatatctaaagcctgagtttggagtggattggaagaaggtaaaaatcatgtttcatttccttttaggagaatttaactcaactttctgtttttaaaaaatttttaattggaggataattgttttacagtgttgtattggcttctgccatacactaatgtgaatcagctttaaatatacatatatcccctccttgctgaggctctctcccaccgcacccgccatcgcacccccctaggtcatcacagagcacccggctgatcttcctaagctacatagcaacttcccactagctatctattttacacaaggtaatgtatatatttcaatgctactctctcaatttgccccaccctatctttctcctactgggtccacaagtccgtgctctatgtctgtatctctattcctgccctgcaaataggttcattaggaccatctttctagattccatatatctttctgtcattcctcttaattgaagatttcactgagccagtgatgtaagttcaagcattgtccagagatgagggatggctggggatgagggagggttttgtggcctcccttatcttccactggtccttgatattctgcctgtgcttaagagcagttatcaaagcagagtagaggaaaggatagaaaagagttcacatttccaggttgttcagttataaatttctggataccaaacatgggaaacacccaaggtagaattgatcctgtgaaacgtgggggacagtgatcaacagaaatgcattctacgtgcactgatcggatcatcagtgaggccaaggtgaaaaggaaagcacctggataggaaagtctccagacatgatagtaccaagtctggttgttgttactataatctcaatatacttgtaagagctaatatttactgagtacttacttgctgccaagttcctgacatgcattatctttcttactgcacataactatcccataagagagacacaactgttctcttttacagatgaagaaactcaggcagaaaagttaaagacaattggccaaggtgattagctaggagttagtggagcatttcagtctggctcttgagcctcaacatgtaattcttagccagactaactgtctggtttcaagagagcagaagggagtatgtataggggatttctgctggtgctcccagtgtcctggttgggggagggggggtgggtaatggaggcattgctgagtttacttgcatcatcagggataatttaatgggcttctctggtggctcagatggtaaagaatctgcctgcaatgcaggagacctgggtttgatccctgggtagggaagatttccctggagaagggaatggctacccactccagtattcttgactggagaattccatgggcagaggagcctggcaggctacagtccatagggtcacaaagagtcgggcacgactgagcaacaaacacactttcattaaaacaagacaatgctgtgctcacagaattcatgtctcacatttcctcagatgttttctcttttatcctctgccatcaatagagttgtgactgtatggtggcatttgtgagaagcatcaataatgaattaaaatagctttttgatggaaaaatctattgataacctataaaagagtaacacttaacaattcatttgcagttgattgaagagagcaaatgaaacaaaatttgtagcatgttagattttgctggtttagtttctgaaaaataaataagccaataaactcttctactgaagattgctggctgtgtatgttgagttacaggactgtaatatttattcaccaatcaggaaacatgagtttgcattcctaaatactcctttgcttctcagacacacatttgtataattctttggcttcctgtaggagaagtgatgttgaacctatctcttatgttcaattgctgtttacaagttcacagccaattcttgactctacctccaatactagaaaagaagaaacatttctaagaaaaccttcaggttttcatttccaacaaagctgtggcacaaacacactggaattaattggatatttaaggttatgccttcctagagttggcatgcactattttctaggaccctggtacattgggtctgttaagagcacatagaaccttaaaaaaatgttttggcaaaaaggtaatgcatgcacacaagacaaactacaaaaggtgtttatcatgtaatttgaaaactaaggatatccccaactccattccatggccataaaaattactggtttcctttcttgtatcacatgacatcttgactcagataatttaatatgacaatagtttgatttgattgactgaaaaacaattaaacttctatctttaaagaaattactaaagaatagtcatgtacaatgcatcatggcactcctcacttccttccttataaccagttctttctttaccacaactctgctgctcaccccactaagggtgatacaaggaagaagagaacataagagagatcggattgtggggctcagataaaggcaaggacggaggggtatcaagtctagataagatgagagatggagtgagagctcagactgtgtgttgtataattaattttttaaatccaacttttaaaactctaatttgctggtttataatgtgttttatgttaagtaaagctttagtgacagcctttagttgagcttgaaacctgattaggacatttggttgtttaggtcacatgacaggctttgtgatgaagccctgatggtgagtaggcatggaaggtgatatatgcatccaaacctctatggccagtgggcttgggctgcaccctcagtttaagcagagtgaatgtgggggatgcgggggtggggagagaggaggctgatgtcagataagttcttggaattctccaaaggtcttccatgcccacaggctaggcatatttttgcaaaacttgctcttatcgtccccaccaaaaccaaaaacaaaataagcagtttaccatggcttctagttctgattcattgcaatgtagtgcgctggagatttggaattctccaggcaagatcaatgaagtgggttgctattcctttctccaggggatcttcccaacccagggattgaacccatatctcccccgcattgcaggcagattctttactgtctgagccaccagggaaacccagtggatatataattgcattttccagcaggacaagaggaaggtggaggtaaaggtaggggactaacatgagccaaggcgtggaagagtgacaccctctgtgtttgagagatgggcagtggagggggtggtagagtgtgggtgaggagcacagaaagacatatttctctacaagaagcttgggctgtactgggcacaacactgtatggccttgggccatttgaatccatagatcaggagttcagaatgacctccttggttacaatgtggagggtgaagtggagagggagatcaaaatttttagtttgtaccatgcatactgactagcagtcctaaatgctactgcaccaagaatacaggaatattcgtaaagcaaatcattctccgtcaactttcaccagagacaagagaaatgtgaatgccaattgtcttcttatacgtcaggcttcttgagaagtgaattcagatatctggctcactctttgaacactagctggctgcattaccatctgtttggaggttagaactcagatactttgggcttctccatcttgcctcggttgtttatgttttttggattgctgagttaagaatttagttaatctctgtgactgggcaggtcaaaactgtcagtttataggtaggtgcaccatgttccaagcaggctgaaaacatgcttgtacaataatattggcacagcagaaatgacaagggccaaggtgcaatttctaatgttggagctaactcactccttcagaggtcttcgctgatggctcagcagtaaagaatctgcctgcaatgcaggagttgtgggtttgatccctgggtcaggaagatcccctggaggagggcatagcaacccactccagtattcttgcccagagaatcccatggacagaggaacctacagtccatagggtcacaaagagttgggcactattgaagggactgaagatgtacacacacacccattcagagccatgttcatgtgatcagcaccccccccccccagcaggacatgtgaggacagtgcaccatgaacctggctgactggttcctttatggtgagtacaggtgagtgagagtgatgaagacaaatgctatgagaaaatgctgtagaagagtttcaagcagtgcaacacaaataaaacatgatgaaagtgaaagatgctcagtcgtgtctgactctttgtgaccccatggaattctccaggccagaatactggaatgggtagcctttcccttctccagcagatcttcccaactgagggatcgaacccaggttgcccaaattacagggggattctttaccagctgagccatgatgagtgagaaactataagcgcagagcaagctggctctcagcactcagtatggcccattgagctgaccagggacatctactgatgtcctactgtgttctttgtacacaagaccaggatggggagagtaagatgtgctttctgcttgcaagcatctctccatcttagtgggaaacagactaggtggtggatacatgagatgatttcttcctcagagcctccggaattgtgagaaaataaatttatgttgttttaagccacctatgtgcatactcagtcacttcagtcatgtttgattctttgcgactctatggactgtagcccaccaggctgttctgtcttagggattattcaggcaagaatattggagtgggttgccatttcccactccagaggatctttccaatccagggactgaacctgtgtctcctgtgtctcctgcactggcaggtggattcttcaccactgagccacctgggaagtcctttaagacatctactttatggcaatttgttacaagtaggaaactaatatccagatgaacttgtggtggtacagcctcgttttcaagtagaaatccgggtctgatgtctcaatgaaaacaggttggaaatttcatgatgccaggcacatggtagctttgctttgcatgcctgggctctggggaggaccagggaaggggaaaaaaggctaccatatgaggttaccaagaggaccacatacagaattcaatagcatacagcactttgaaaaataagggtagcatgcagggcaaaaagtgttaatttcattacatgaagatccactatcaaacaatcaataaaaagataaataccttttaggaaatgacgaaagttgagaagcaatcactatacaaaggaaacatggcaaatgatgagtggctcatcacctgaatcgacctgggctcactgagcatcctgcctcctcgtaaactgttacttgagatttgctctttcaaatgtgtcctaatgatgcatgtttagcacccagcttgtgaggaccagagagagagggggcttatttcagcccagatgaagcaaaggtgggtgctgcacagcttgctgcatcagcaggagtaatgctgaagcatggaagcaatcctaacctggagcaaaggggtgttgtgaaacaagaaagcgtcgtcaattgaagaatcaaacacacgcatttgttgaagacgtatttgactccagtggggagcacaaaaacaccaagccgtgctcctactcccctcccctctaccccccacccccaccccgtcacagaggagaagtctgagggattaaaaacaacaacccaaggaggaatgaattgtttggcgtagaatttatgagtggttttcagttctggctgcacattagaatccctggagagcttttaaaaaatacagatgcctactggaatgttcatagcagcactgcttataagagctccaaactggagactatccaaacgcacatcaacagtagtatggataaataattatggatcattcacataatggagtgccacttagcaatgagaaggacagattgactacatgcaacaacatggataaatctcttcactgtaatgttgagtgaaagaaaccagataaacaagtgtcacgcttaaaggtaccatcacaatggaagatgctaacaatagaaaaaagtagatgcggggtacactggaattctgtattatccacacttctttttttgttgcaaatctggactgctccaaaattcagaagtctatttaaatatgagttatactgtatgattccattaatgtcaaagacagatagcattcatcctaagctattagaattcaggaagatgcttaccctggaaggcataagtctgggaagggaactggggtggtatcttttttaaaaaattgtttatttttggctatgctgggtcttcattgctgtgtacaggctttctctatctgcagcaagcaggggttactctctagctgcagtgtgtgggctgcttattatggtggtttcccttattgcagagcttaggccctatggcttgtgggcttcagtagctgaggctcacagcctcagtagtggtggctcacagctgcagtagctgtagagcacaggctcagttgccctgtagcacgtgggatcttcctggatcagggattaaaacctgtgtcccttgcattggcaggcagattcttaaccacgggaccaccagagaagtcctgttctgtgacttaatctatgtgttggttacatgggcatgttccattatgaaaatgtattgagcaatttctgtatgtaatattttattttgataaaacatggaaagctatgctaatgtctaatcctacctagaccaactaaatcagatttcttagaggagggcctgggcattaggatttttaaaaacctccctagattattgtaatgtgcctccaggattgagaaccagtgctatttgtcctgtgggcagtgagaggagccagaaaccagtttagactggaggcatgggtacaaacttcccagagaagcagaacatgcatgaatcctgaaaggctgggagagattgtttgaggccagcggggttccactatacatgaatgtttcaagcccaggaaacattcaatttccaattctcatttttcagtttttctggtggtggctacacttttgcttagaaactcgatttcccgtcttaaatgctcttgtcacgtggtgacccgttcagttcaagagctgtgaatagggtgtcaccgggcttcatgcaaatggaattataaagcagttggttttgtgcaccttacgcactatattttatctaatttgtagtctctcgtattactgctgaagcctcagtaagccctgaaaaaagcatgcttataataaatgactagaaaaacaagccttggcgtttaggttggatcgcagacgcattccctatagtgccagtaatcaactgctaagacataatacatttaagtgttccaaacggggaaggaggcttcttggggaaaggactgatggattcctggcttgtgcagaaactgatatctgagtgtgtcactgctgctgtgattattattctagaccatccactgggctctctgtaagtttcttacttgtaagggcgacaggagccatatggaatattcactaagagtatttgtgaatttacagtgttgttttgttctgatagcctttacttccttgggctcattctaggtaatgaacaatgataacagctggcctttattgaatactcacatcatgccaggcactttgccaagccccttccatgaattatttcatttaatcctcccctcaatcttaagaatccccccttgacagatgagaagtctaacaaccaggattaataatttacccaaggtccctccccaccgtcagaaacaaagccagttatgtcaaagcaactgacattcagaccctgcttttaaccatggtgtggcactgcctacaagggtccaggaaagttgaggtgaggggaccttgtcacgatctgtgctcacagccagtgcctcccctcgtccccacctcgccttaagtctcacggtctgtcacctcgtcctctcctctccctctgtccttctctgccctctctcctggtactttgcctctcagctcatctccagaagagtggatgataaatctcacatttgcgatttgctgagtcatttctctcaagagtgacagcacatgagaaactcttccaggaggacagcgcctgccacccgtgagtcatgaacgtgacataagctggcccaggagacagcaaactctggcctgctgaccagatcccgttttggtaaataaaatttcaggagaacacagctgtgccccttcgtgtatttattagctatggctgctgtggcactacagtggcaaggttagaagcttctgacagagggtgtggaccacagagcctaaagtatctgctctctgaaccttctggagaaactgcccaccccagtgacactacagaaaggccctactgcagagcgtggggcatagggctccatggtggctatttccccttccgcgggtttctggcagcttcctatggtggattccggcggtgggagcattctgaaatcacatcacgtgggtcacggctgcccctgaccattcatggcaggcagcggaggccacagtcctcgctgaatattcatctgcactttggcaagtgaaacagtgacaagtgtcctcatagaaacaaaacgatgtattattcattctgcagagtacttccaggaaatccccagctggggtggaagcagcctgggactgggagcaacatctcggtaccaggaccagtgagaggactacagcgatggctgtttcagtgtggcagatactggacaattatgtgtcctgacagctgttgccttaccggataaaagaagacacttatttatttatttattttttctttcagaatgtgtttgaaatctcaaaaactggaattagtcatgaaacacttcaagttaactgcttgtctgcttcattatgatatttttggttaaggaccactttccatcaggcgacccttgttttccactggttagtggcaggggtggcccaggattgctgtggaagtggagtggctcagtcatgtccatctctttgcgaccccatggactgtagcccaccaggctccactctccatgggattctccaggcaagaatagagtgggtagccattccctacccattcaggggatcttcttgacccagggatcgaacccaagtctcttacattgcaggcagattctttaccatctgagccaccgggaagggtttctgtagacaatatcaaacggctaggctgcactgacactgcctctaggtccagttcaggaagccattacatgcaacctcccagagtcatgaattctactttctttaacttggggggctggaggccttgcatttgtggaccattttatctaggagctgtatttccccttctagggatacccacataccgggatctaatactttctcctgaatgacttagagggtcttaccttcttaaataggtaatagatattcctcatcgtggctcttggcactctcagtaaaatctagtctctgtgaggttggtagagtgatgaagactggaattaatatgaaattaaccccgcagtgttagcctggcttcccccaaagcccaggtttactggaagaacataacgcctggagcaggactgagggcagagggagggagacagggacgagggagggcgaggtgaggctgggctgtggagccagccttctggaagttgctccacctcctaaggccattttcctggaagagatacaagatgcctctcagttcagttgaccctgacagtggggagaaggggagaacttatctcccagcttttgtctccccaccaggacctggctaccaggtttactccaggattcttagtgcctcctggctgcatgcgcgggccctgagggggcccctgagaagaccccaggctcccgttgccctctggtcaggccttgccatgcccctcagtgcacctggctttctaggggagcacacttatagctctccccagagagttaacatcatggagagtggagagctcagagtccatggctaaataagccagtctttatccttgtgtgaaccaatgatgaagcctgtgctgtccattattccagaggcttccagtggttgaacctcagttaccactgcaatcacctgctcattgtcagaccatttatgggctttcttctcaccccatctcactcccctactcgcctctcagtgttccaatctttatttcaaagtccacttctgggagaacccaaccaaagaccacagagaagctgtggaggaggtgagaggcccagggaacaagcatacagcatgtgccaccctactgcgcctgcgtgagtgttccagctgctgtgatagtggagacgagagtcaggggaggcctagcggtgaggtggtgcagcaggcgtctgatgggtgtctgctccacctgccaagaagggttacagttcactgatttgaaccaggccctgggtaagtatttaccatgtgcagaaagagtgctgagcactccctggggatcaatgcatttaaggctcaccattgggaagcagccactattattattgcccacattttatgaataagaaaactgaagctcgggaggatgaagtaacctgccatcatccttcaccattactattaatatttaaaggtttactatgacctcgtttaattttaggggacagagctattcaggcatctggttccattgatctctcaccagacacagtaccttagttgggtgtgtgagtgtgagtgtgagtgtttgactgtgtatgcattggatggtggggacctgggagctgggggttaaaatgtatagacccatttcccctcaatgtggcccaaagaaataaccccccactgtttgcagtccaagcagaagcttgtctgggtcttgtgtctggtttgggtccttttccaggactagaaactgtttctaaactaggctctaacttactgaccagcaaatagcacaaaacaaaatgtttttttgatgatttaagtgtaaatgagtcagaggcagagagattaaattttccctcaaatacacaggggttaaaaaaattacagtctccagagaggctggctctttgaggactgagttttcgccaagtcagcacattcaagaaagagtttgtgactctctgccaaaccccaagcgccactggcttctttgctttagtttcttgctgaaccctggagaaatctatcttcctaaatcctcgctgtctgtcagaactgaaagcccatttctgtgcaaatgattcattgttataatttgtgccacctcctcacagaccttcagacttttcattttttacatcaattcctatgtaatatttcaacaagtctcttttttctcctctgtctccctcctgtccttccaccatcagctctctgccaacagattcgaaacaggagttcaccgcagagctttctttgattttagccctgaatctcactctgcctcttgactgtgtatttctgacaggtgcagagcaggcaggagaaatgacagcatcatgcagaatgtaagcagatgcagtgtcgtgcgccactgtttttcctgctagtgtccctttgggttacagtgaaatcacctagcaggacaagttttattcttttccttgaaggagtcactgtggacatcattcatccccccattccatgtctaagaggattctaatgatttgactatcttgattcctcccattccaagttttggggtaacactgtgtcccccactactgggaggtccatcagggtgtccctgaatgttagcagcagaggatagcaggaccagctgattgccgtgagtgcagcacaatgcgggtcagcttgcctccgtttgctcagttgcaggcagttctagttccaaggtgagtgaaatgaacaactgaggaccaggaaaataaatctcttctttctgcattttaaagaccagtgaatacgatttccaaacctgagctgctggcccctgccaattcctttgcgtttggcgtgagttttaatgggcacccagagtgtcgttgtctctcgcaagttttttgcagagtatccaggtgatgcctccagagaactccacttgtaaaacctacagtgtccccacttgcaacactctagagagctggtccactcagacactttttgttcggtggattctggaaggctgttagctctgagagggggacaagttccaggaaagatgcacatcaacctgtcaaacgttctgctggattgatggcatacgccggcatagaatggtgcccatggaacgacctgtgagccactcatgaaaggattctgaagtgcagcctgctgataccgagccacccgtgcggaagccatggtaaagttgaacagcagatgggaaactccaccgaaccttttattggccatatgtcacttctgagtgttggccaacaaaccaaatttgcagctaatatataatgatttaaacagctaaaagagcagctgcactttgatttctgatgcctttcctcccagctttcctagctcactggagtttcttaaactactttccttaatcctgtgcgcttcactctgaatcttcaccaggtggcaccatcttcagatggtggtgttgctggttctgttgttggctgcatccagcttagtgggtccatctctctgctccttctgccttgtaggcagttttctaacttctttggaagaagaaagtgctacacagcacaagactcaggtatgttcatatttctgcctgctgggctctttttttttctaagcccctttgatttccaagtcccaggcttccctggtggcccagtgttaaagaacttgcctgcaacgcaggagatgcagtctcgatccctgggaggggaagatcccccggagaacgaaatggcaattccagtattcttgcctggaaaattccatggacagaggagcctggtgggctacagttcatgggatcgcaagagtctgacacgtcgtagcaactaaaccaccaactaccacctgattacagggacgcttgcattctcttttggggtgcctgggctggtcttctgctgagcctgaagggctagtccttggagtagactgtgggagggcagcttgttctgatttatgaagacatgacctgggatggagcttctctggaaaaattcagctctcttactgtcagaatcatctagaaggaaatgattgatgtcaggaataagcagaacaggcctcctcttggctctttagtctctctggctcttctatcccatgtagtttaagtgccaagtctctactcccagccatggacatgctaagctggcttagtgcatgaagcttcatggaagaagaggctccttgttataaattgagggttatatagttgtttctgggatgagtgtgctggaaactgccaggaaaggagagagagaacaatgccaatttaaacttgcatgcctgccaaccactaaacctgataactcaattttgggatagaagattctattgctgaagctgtacgaccataatatggctctacagttgtcactctaacgaactccagctcaggtttctgtgtattaattcctgcaaaactcagccacctccctaatgttattcaaaagactttgaacagcattgtgaataaaaattatcacagactacatcaaactcaatgatttctataacatctggagccaagcacattaaatggggagtgaaacgtacattcatcatgggtgtttgggtttgttttctgtttttacaaagagaggaagtaagaaatatctttcctatacggatttttagttatctgttcctgtgctaaactggacacctcatgaaagaattatagccttggtttctgtgtttatgggttgatcctctttttaggtctgattaagactttgtcctgcaggaacttcatcttagggaatttatccaaagaaagaactgctgtgtggaacaacagtgtacatggttaaccatcctagcgttatttatggaagcaggagattggaaacaacccaaatgttcatcaacagagaagagattaaattataatattattcatacagctgtatgaaagaaggacgatgttctgtatatacagagatggaaagaagtccaggacacttgttaggaaaggtcagatgcagaacacagtgtacaaaatgcatttcagtttaatccatgtaacatctgtctacacgttaagacactctgggtttccctggtggctcagtgataaagaatctgccatgtcaatccaggagacatgggttcaatccctgggtaaggaagatttcctgaagaaataaatggaaacccactccagtatttttgcctgggcaatcccatggaaagaagaggctggtgggctgcagtccataggttcccaaagaatctgataggacttagtgattaaacagcaacgacaaagaaactgtagaaggatacatagaaataggctaccaggagagcaagaacagagcccacagaagggaataaaccactcatttatttatttaagtcaaatatatttgacatataacaaatggtcctaaaagtgtcatatactttaaagtgtacaacatactgctttgatacatttatgtattataatggggttgctgttattatctatatttatcacagtatgtagttatgctattcctgtctatattcattctattgcacattagatcactatggcttatctactactctttgcaagcttgtagccttaacatctctcctgttttccagtgaccaccatttttttgccctatttttcatgggtttgactttattaggctctgtatataagtgatacagtacttgtctttaacttacttcacttagcataatgtgctcgaggtccaagtggcaggataccctcctctctcacagctgactaatattccattgcgtgtgtgtgtgtgtgtgtgtgtgtgtgtgtgtgcattttaatccattcattctttgataaacatttaggttgtttccatatctttgcttttgtgaaaaatgttgctataaacatgaaagtgcatatatatctcttcaaaatcctgtgttcatttttctggatatataaccagtagctgtgcagttcttaagctggcttttctgtccactgttctgaagcaaattttccttactgatccccctagtatgtcctaaatgccaaactctcaacctccttgatgtcactgactgccgtggaccatacattcttccagaatgaggtaactccagttatggctatcagcgattctgccgatccttacctctgtgtgcatagaatgcctgttaacctttatgaacttcagcagacacagagaagaaaggagggagctagtatttctgagtgttagctatcttttaaaagaagtatctcttttaatcatacaatggcattatgaggtgggcactcattctctccatttaacagatgaggaaaccgaggctcagagagcttaactgactagcctcaagccatacaactcctaggtgatggagcaagatctgaacctcagatagctggtcactgaagcgagggcccctggggaggggcaagtgcaccagtgctttccttcaccactctcttcccttctctctgactctcaccagactccttctttcactacttgagccactgctcattttctcattcctttgctggcccttctttcttcttctcctcaaacaagattgtctccaaggtctgtcctcatcttcctctctctagctaatcccactttccaggagagttctgactctcaatcctattggtttcactttctgggcatttatttccagttacttgatggacgtttccacctggacatcttgctggaccccaaaagccagtatttcccaaaccatatagatcatttttctgttcatcattggattcttttccttcttatcatttcctgataatactaccccaacatcatcattcttaagctcaaagccttagagaaggctttgattccttttttttttttctccctggcttccagtttctaatatagaaaaaaattctgttgttctgactttgactgccttcctatataactcagttgtgcattaaatattgcctggggagtgatctcttaactgaccaccccaccttcagttttgttcatctcctaactatctaactagctgacaaataatctttttatataatatgagactcataacattttaagaggaaaactttcaaatgctaatgagagacacacaccccaaaaagacttcataaatggaaaggccaggagcacaaattattataaagctgccaattcttctgaaattaatctacaaatttaatggggctttaataaaaataccaatatctgagaggtgttatggaaaataagtatgctagaatactctaagataattctgatatggagaaataaaaaatcctaaaagatattataattatttatatatatacaatttatattatcattaatatagttaaacccatgcaggaataaacaagcagaacaatagacaaaacagaatcagaaattgaacccaatgtttttataagaatttaagatttgatagatggggaaacagtggaaacagtgtcagactttatttttgggggctccaaaatcactgcagatggtgattgcagccatgaaattaaaagacacttactccttggaagaaaagttatgaccaacctagatagtatactcaaaagcagagacattactttgccgactaaggtccgtctagtcaaggctatggtttttccagtagtcatgtatggatgtgagagttggactatgaagaaagctgagcgccaaagaattgatgcttttgaactgtggtgttggagaagactcttgagagtcccttggactgcaaggagatccaaccagtccattctgaagatcagccctgggatttctttggaaggagtgatgctaaagctgaaagtccagtagtttgtccacctcattcgaagagttgactcactggaaaagattctgatgctgggagggattgggggcaggaggagaaggggacgacagaggatgagatggctggatggcatcactgactcgatggatgtgagtttgagtgaactccgggagttggtgatggagagggaggcctggtgtgctgtgattcatggggtcgcaaagagtcggacacgactgagcgactgaactgaactgaactgaactgaagatttgataaagtttgcctgtcttaatcagtgggaaatatttacagttcaataaatggtattaggacaattgggtcagttcagtcagttcagttgctcagtcgtgtccgactctttgtgaccccatgaatcgcagcacaccaggcctccctgtccaacaccaactcccggagttcactcaaactcacgtccatcgagtcagtgataccatccagccatctcatcctctgtcatccccttctcctcctgcccccaatccctcccagcatcagagtcttctccaaagagtcaactcttcacatgaggtggccaaagtactggagtttcagctttagcatcattccttccaaagaaatcgcagggctgatcttcagaatggactggttggattgggtagccacttgtcaaatatataagttgtatttctcctaagtctttataccaaaatgagtgccagatggactaccaacatgaaagccaaactatcaaggttgtagggaaaaaaatggaaaaaattaatattcttggaatagagaagaaatgtctaagcatgataaaattcaggagacataaaagaacatataagtttggctctaaagatcaaatatttccacatggtaggaaactacaaattgagttaaaattaaaatcataaacagggaaaaatatttgtaacaaacttgtcagacaaagcactgaatctattaatatataaaggacttatgcaaatcaataagaaaaagatcaacactcttaatagagaaattagcaaagaacatgaaggaatctatcacaaaagaaaaacaaatggtacagatagtttaaaagatacttaggttcccacatagtaagtagatataagctaaaactgtatttttcacttaatatccaaagtttcttaaatgtatttttgacaatttattttcaacaagggtataggaagacagacatttatacatttttgaggtatgtaaattgatgccacctctaaagacggcaatctcagaatatttatcaacatttaaaatgtgcataccctttcacacatcaattccatgtttaggaacttctcctacagttacgtttaaggttctgcctggagaaaaacataaggatatttactgcagtgttaagcataatagcatattttaccatctcaaaacagaaatgaaaaaatagtaaagcttgtttaccctgtaatcctctgattgttccccatcagttattgaaattctcctgatctggccccagcatactttttctatcttgtatcttgctacaccccttacacttggccaaatgagcactctgtttgccctgccccttccctgtctctgtacctctctttgctgatcctgtttcctgttccatgatttgcactgttcccagcctctcctttcttccacgtgaatcctgactacctttataacctgactcacatgctatctttttctgaagatatccttggacactggagcctctatgatttcctatacttagtcgaaaatttctacctgttctgacttttttttttttttggcttcccataaagttgctttagattctaaaccaaagcagagagaagagacgacacccaagttaacccagccactagtgagttgagacctctctcccggaagtgcctgactccacccaccggaagctgctggcagggcggggcgtggggtggagtgcgggtggtccaaggccccaaggcgctgaccccttcctctgtcacctccctgctccccttctccccggtctcctcctccttctggatccagagcatcagcttagcagtactgtggccccccgggcatgaccgcaggcagggcggggccttccccccaagcagaggaagtacagggagaggggcccagggccggcagaggcaccaagaacccacacggtgggagcagctgaggtaaaattcttaaagcttattcatggggacgtggtgtcagcaatcctcctggctcagctgtgggcctcagcttgggcctcgccatcctgaggtcgtggtggtagaagaagtctgagccctggttgagcagcggggggtcttcacgctgcagggggccggaggtgggaccttcacgccctttcacccagcacccacccttgtccccaggacctgcctcctgatgacgtctgcgtgctcccaggcctgccttcgccctcttctcatttcctgtgcatcccagaggcgtccaggttggcaggtaagacgatgttgaattcgttgagtatggagatgatgctcaggaggatgatcccatgttctgggcc

SEQ ID NO: 93 - DNA, 33814 bp, Hippotragus equinus
  source 1..33814: mol_type = genomic DNA
tgacagaaaacaacacaattccgtaaagcaattatccttcaataaaaaaataaattttaaaaaaagcaggaggagaataaacagagctatgtcaagtatagaagaaaaatattgcactgctgtgggagagttagtaatttagaaggggcagcctctcactgttttaagtctagttaattgacccgatgtgtgtgtaagtagaaaacctgtgtccaaggaaggacagaatacttatatccagaaaaagtttagaaaaaatattaacccccttcatacttaacgtctacattgtagggctttattgtctcaaagctatgtgtgattgtgtgtaaatgtgtgtgtgagagagagagaggcagagtcagagagagaacagtacaaaggaagatgcctttagaaacacattcaaaggagccagggggctcccagctggctaatctccatcatgctttcctggcccctcccccttccttctcatcataacttgtgatcttagaggcatgaaagaatttgagccccgcccccagcctgaccgtctctgcgggccgtgcagccaggctccatgtcaaatccacctgggagcgcgaaccccagggccacggagaaggtggtgggcttgccggcaagttcctcgcccagtggccatgggagacaagagtgagcagtctgccctacgcacctataaatcccttgatgaggagggcctcttcggctctgcggagctgcccaaaagacccaccgggaaactggttatgcacagcatggccatgttcggccgggagttctgctatgcggtggaggcggcctacgtgactccagtgctgctcagtgtgggcctgcccaagagcctgtacagcatggtgtggctcctgagtcccatcttggggttcctgctgcagcccgtggtgggatcggccagcgaccactgccgggcccggttgggccgccggagaccctacatcctcacgctgtgcctcctgatgctcctgggcatggccatgtacctcaatggggacgcgatcatatcaggtcagtggactgctcctgataggctaggtaggctgggtgggagaaggtcctatttgcaactcaggacaaggagaaggcaaagttctttctgtgacagtcaaaaaatggttaaaactgattccttatcctaagttacatggaatttccacctttgtgtgccccagattctgtagttaggtgcctttacttttagaaacttcagttacattattttttaattgttgtgagaacttaaaaatgggattatatttttacctattttattatattatgtattgttacatgtttatcaattatggggttttatgtgtgtgcccaccataccttatttaggactttttcaaattaaccagctgcctaatggctccataaatttttccaataaatgtacctgtgtgtccaaagaagagttaatgacgttcacagctttatatggagtcttgtaacaggtatagggcatcgacctggcagctcaaggggacattttttcattgcaaatcatggacatagacctgatggagggcactttttctagccattaaacagccgccaattaatcagtaattggtggtagtatatactgtgttgaaaaaaagaattgttaaacttaaaaatagcacacattttctgaccattaactcccaggctagcagaatggatgataatgagccgtaataatcagttatcatctctatatatttaaaagtgggtataaatctataaaggtagtatatttctggaagaatttatttaaaaaaaatacctgaaaagaaattttgcctctaaggaagggtgctaaaggcctgggagtgagagggggaagttaagcttgtttttcgcttatttttcgtactgaatttttaaaatcaggtgcatatattacacattttcttaagtttaaaaaataaactgaaagcacgagaagtagttatgagggcgtgaatgaacagtggtattgtcataggatgaatatcatttaggtgttaaaactgtgacattgctcttcatccactgaaaggcaaagatactaagagagttagttaaggatgctcacttacaacctggtcccattagtcagtgctcctccaagccaagccctccagcctgtggcatcagcctcactgcaggctgatagagatgaaaattcccaggccctaccttccacctattgaggaatcataggagactcatggtaggtgaggcttaacaatgttttaacaggtcatcccggtaatggttaaggagctaaagtctgagaagcactgcatgagggcacagatgcacacctctctctatttttgtgcataaagggatgtctgaaggatgaccatctcttgggcctgggatcttgaagtatttccccagctttcctatatggttggagtggttgacagtcagtacatataattttttaaaccggtttatttaaaagagagatgattcacataccataaaagtcaccatctaaaagtgaacagctcagtgcttttcagtatattctcaaagttgtataaccaccaccactatctaattacacgtttcctctctgccccccagcagaaacctggtagccattagcagacactacccatttccttctcccccacagtcctaggtaactgctcaatctactttctgtctccagagagctgtcttttctggacattcactgcatgatttttaaaacttgaaaaaataatgaagccattttttatttggaagagcaaacacaacgaaaggatagggaggtaatatgatgacaggaagtttgggtagaaataaaaatgtggctcgttctaaaccaggatttaggagaccaatggttgtttctcttttagctttgattgctgacccaaggaggaagcagatttgggccataagtgtcaccatgataggtgtggttctctttgattttgctgctgacttcattgatgggcccatcaaagcctacttgtttgatgtctgcactcatcgagataaggagaggggcctccactaccatgccctcttcacaggtagggaatatccagaaagtctatgcttcagctctccgggcagggaagcccttccactgaagccatccagtgtctcagcactcagattttttgaatgaatggatctgttgatgcatcgctcccatcacgcgggctgtgccttccagggcgttcctcttgtgaccaggctgtggagtttctgcaaaggaagtttgtaggagagctctctgaagagccatgtgtggagacatttacaaatgaaaagaggccttgtagacttcatattttgttttttagtcagtaatgtgtagcatcaacattatttagaagcttgcagcttcttgggccctcttcctgttattttaattcagcaggtttggggtggggcctagaaatttgcgtttttaatgactttcccagatgattctgtggcaagtgtcccaagaatcacatgaaccacatttaaaaacagaaataggaacaaaccaagcaaattaaaagacgtcttagagacgtcttcttcttcttttttttttttaatttggctgcactgggtcttagttgcaacaagcagggtctttagttgcaacatgtggaatctagtttcctaactggatcgaaccccaggcctcctgcattgggagctcaaagtcttagccattgggccaccaggaaagtcccagagatttcttagttatagaaagagttagcaaatcctcaacctcctgttttggaaaatgccatgccaggaggacacttcttggggccattgctggccttctttggtagctgttgggcccttcatgtagagcaatgctactaacgttcaacatggatttctagagctccgtttgttgttgttcagtcactcagtcatgtccaactcttttcgaccccataggctatagcatgtcaggcttccctgtccttcactatttcctggagcttgctgaaactgatgtccatcgcgtcagtgatgccatccagccatctcatcctctgttgtccccttctcctcctgccctcagtctttcccagcatgagggtcttttccaatgagactgctcttcacatcagatggccaaagtattggcatcagtccttccaatgaacattcaggattgatttccttcaggactgactggtttgatctccttgccgtccttccagttgggactgttctaggattggggtgtcatccacaagacaacagcatgatcctgtcctgggagcattgttaggtctagatgtgaggactttatttgattttctccaaggcccagccgaggtatttttattttatgttttgtttcctcccatggtcaagtatgtcccacaagaaacagaatcttgaattttgttcagattatatccccatagccaaaagcaggccttcccacagaggccatttggtcaacaatttgttgtttgtgcagatatttgaatggtgaacgctgggaagaatggggctgcccggcagagaggggcctggaggagcgggagaccagcccatctgtctgggactcctgaacactgtctgccagctggaaagtcccagaatagagatttaaactgcattctcctaacttaaatcccataattcctactgctgtatcagaatctgctgaaattaattatgatattgtgggaggctttttggcttttgaacctgacacgttgagagttttgttgctctaagtactttgggcaatgtggtcacttcttcccagcttatatcagtgttagtcttggcctaacaacctttgttttgctgcttctgatattaaaagactgagctctgtattttgggaacttttccagcgttaatacatggtagtatttctgttgagtttgataaaatgtcttgaggttatcttttgatactagtgtattgtggtttcagcaagcatataattcatgtgtaattttcatgtgacctcatttcaggctttcactgtatcttgtctgagctttcatacttaccctttaactgattttccagtctctaattttttcctattccaattgtgctaacacacggcttccagggtcacattcctaaaagacagctctgaccgggacactttcatgttcaatgatccgcagtggctcctgttgacaaaaaaaaataattaattaatcaatagtcagtttaagaaagagagaattttattcaagtcaacctaaagattataaattgggaaacagtctctcagagagctcccagaactattcctcccatcagaggtcaaaacacagttaaatatgagacaaagtgttatacatctaatgacgtgctgacagtttatgtagtccaggtctgtacatacaaggcgagtagtgggtcatcgtgaccgcttaaaggattgagagaggactgttatctgctaaggagttcccttgctggtgccaggagaaagttgctgccatcaaggaagtatccctgtacttctatggctgtggtctcattaatatgttaatataatgcagatgcatgttgcacactccaggggagggaggcagcccaaaggggaaagtgttatatttaaatctaggcccagcaattccaaatgttttcaaataagtgtcagagggttcactgcgaaaatgttctccagcatgtttctgatttttttttttttttaaaagaaaagactctactggcttctgggaattttagtcctccaacttcttctgtcttatatttaaaggtaactctacctgccctccacccgtggtgtatgggatagccatgctgggtttaatggatccatctcatcccttctggattccctggtagctcagttggtaaagaatccgtctgcagtgcaagagaccctggttcacttcctggatcaggaagatcccctggggaaggcataggctacccactccagtattcttgggcttctctggtagcttagacagtaaagaatctgcctgcaatggggaatacttgggttcgattcctgtgttgggaagatcccctggcagagagcatggcagcccactccagtattcttacctagagaattcccatggacagaggaggctggcaggctacagcccatggggtcacaaagagtcagacacgactgagtgactaggcacagcacagcctcatcccttcacctcttgcctttacctctgggtgcgcctgggactgtggaaccctcactcaccagaaagaaaggaaattccttccttgagtcagaatgcttgtaactgagcatctgttgctattaataaattaacccgaggccttgctctcctgaacagtggtctctgttccacccaaggaggctgggatgagggctgatgatcagtaaaggttgtcccagttcaaatcctggctcctcctcctgcccagtccctagtatttctgaacttttgtttcttcacagggttgtgaatctatccactgtgttagttattaatatcctggcaatatattggggcttccctcatagctcagtcagtaaagaatctacctgcaatgctggagacctgggtttgatccctgggttgggaggatcccctggagaggaaaatggcaactaactctagtgttcttgcctggagaatcccatggacagaagagcctggcaggctacagtccatggggttgcaagaattggatgcaacttagcaactgaatcaccaaccactgccaccattctggcaaatggtcccaagcaatggttcctgagcaaggaaccctttaataggattcagcaccaaatgcatatatttactgtatattctccattcccaccaggtttgcaaaacttgtctttgtttgtaatgacttggtaaggaacttaccccatgtgcatctttggaagaagaatgggtaacgtgttaggcttagcttcttttgacttttctgtttctttaatacttcaaagtttgcataaaaattgcttgggaaacaaatactcagactagaaataattaagagctaaaaaaagaaccctaaaaatgtagtttagatacgagtccctttgaccaaatgtacataagtggaaaaaggctgtgtttcatggtagagtcgattttaactcctccttcaggactcattgctgcatgagtggatttctttcattagctgaggttcctttgaagcttctgcccccagtgaactttcatgtctcctcactcaggcaggaaaggatgtggccagtgcagaaaccagggtacaggaatttcagctttgagggtgacatgaataacttcgggcaaaacagataaggtctacaaactgccatttcttatcccaattcagcacctacctctcaaggaatctcaaagacaggttagagatgggagcccctgaggacattttttcatttactgaatacttgtgtatgtgcttaatcactcatctgtgtctgactctttgcaacctcatggaccatagcccaccaggctcctctgtccatggaattcttctggcaagaatactggagtgggttaccattcccttcttcaggggatcttcataacccagggatggaacctgggtttcctgcagtgcaggttaattcttcaccatctgagccacgagggaactgtctaccagaaatctcttccccagataccaactggctggcttggtttgcttcctctctttgttacaatctctggtcacataggccttcctcagtgattcatgattacttgataatatattatttattcatttgtttattgtttattgtctgcctctagagctaacatataagctatctgaagacaggaatatttcctgtttgttccaaaatcactagtgcttagaatagttttggaaatatgctgaagaaatattgatgagacaaatattctattttaacatcctccttttatctgtgaggaagctgtgttgctgagaggtaagtgactaactcaaggtcacacagctggatgtgtgtgctaagtcacttcagtcatgtccaactcttttcggccctatggaccatagcccaccaggatcctctgttcatagggttttccaggcaagagtactggagagggtggccatgcacttctccagggcatcttcccaacccacagatcgaacctgggtctcttatgtctccagcttaggcaggcatgttctttaccactaccaccacctgggaatacagctagtggaagatattgaatcaatctttatgtctgaaatgcaagtgaatccccaacccaagggcttccctcatagctcagttggtaaagaatctgcctgcaatgcaggagacccgggtttgatccctgggtagggaagatcccctggagaaggaaatggcaacccactccagtattcttgcctggagaatcccatggacagaggagcctggcaggcatcagttcatgggcttgcaaagagtcaggtacaacttagcgactaaaccaccaccccaacccaaatgtaatttaattgtgtctgtgttgagcctcattggcccaggatggtgaaaacttagtgtcagtcccttcagaatactctcctacacttttccctgagtcttgcatctaaaaactgggagcttagagtgaaaaagtttcaggcagcaaggatctgggtttcagtatcatgtgttctcactggcatttactgggctgtcctgggtcccgcgtttcccagttgtgaggctgaactggtcacagtcgcattctcgctcatccttgtccacaaggaccccttcagaacccccaggattctcagctccccaccaccctcgtggcatcctgctcttccaaggccagaggatgtgaggtgggctctgtgagctgcaaactctccatgctctagtttccttgtctctaaaagagaggtggaaatttagttgagccttgttattcagggattccatatttgtgaagtcatctgcttactaaaacttactggtaccaccaaaatcaatacttgtagctcattctccaacatttgaaagcatctgcagagtggaggaggaaaaaaacccaatgtgactcacccagtgtgcttgctcccagctgtggttaagcaaggtgacactctgccttcttgttttgatacttacactgtaaacagatgtcctttttgtgatatatttagtgccatttttgtttcttttttcttggttatttcggtatttaaagtggctccaaatgtgctgaaagcactgctttgggtacataagtgcaagaatgttatgatgtgacttctggagaaaatatgtgtcctaagtgttgttccggtgtgagttacagtgccgttagccacaggcgattcaatgagatatctttaaacagaaacgcatgtaaaacaaggttctgtgttgttccactgatgaaagtgaagacttgaggctcacaggaacttaatcctcagagcaggagtttactattcaccaattcagggtttttggaacctttctggaatgtaactactgctaatagtcagatgcagcggtagtaacttcctcaaagggctgttgagtgagttgtaaacatcaagcacctagaacagagcctgacactagggttcatctatctccacccactgcagagcccttgctcccttgaagtctgaatgtccccctggggtcttcctaggaaataaagtgttgatcccttctgctcttgggttctccaagccatctgggaggttctgctccccaccccccatcctcccatcccagcgaggtccaaggatcgaggagaagagccactacagctttagggacacaccaagtcacccttcgtgaatgctttgcctgccctgggaagccttgttcttaaatctttttttttttttttttactgaatctgttgcagtaaaaaggagaataaaggaatgagtttttcctcttttcctttcctgagaaagtgaagtcgctcagtcgtgtccagctcctttgcaaccccatgggctccatccatgggattttccaggcaagagtactggagtgggttgccatttccttcttcagggtttctacccgacctagggatcaaacccagggctctctcattgtaggcagatgctttactgtctgagccaccaggaagtccaatgaagaagataaaagagaatagtgagcaggcctgaacattcctaactgttcctaactctgcatgtctataatttcagattgcttttctgccccctaactctgcaggagctacatttcacaccgattttacctttgaccttatgctaaatacatcctgcatctagtttttacccttacaacacccttccgtttgtacttacatatcagagccaccaaactgccagacccaattactgggttactgacaccagactccgactgtctttgaaatagtgcaaagatcctaacacctttgttcctcatccctgactcctgactaagcccctagactcccatggagagggagcaatgttcttgaggcatgggcctattgtctttccctctctgccggctgagaattaaagccacctccctatttacgccatacttggtctccgtattttttattcagctccggtgggctaagagagccaaggttttggccaacaacaaatctaccatcagtgcctttggagcctaagggcatctgaaactcagaagcaaggagacacgttcttatttctctgctttctactttcatgttcttccccaaaagcaatgagcctggctcagtttgaacatgaaggaagggcccagggaaataccagggcagttgtggttggacggaagccgtggtcagcactttaaatatattttctcacatctcttaggagatgagttgcctcgcaaatctcaagaaatgtcaggtcttggatactcagtctctagaagggaagtcatgtttgcctggttcattgctgtgtctgcagtgcccagcgcagttcttgatgagagtaggtattcccatccatttctattgatttaaaaaatatctctcatacacacacacacacacacacacacacacacacacacaccacacacgcacacacacactcctagtagctggtacttatattaactctctgggattttgtgtgtatgtgtgtgtgtttggtgtaggtaggaactaatctgataccttcattgctattttctcaacatatagaaaagaatcggaaggacttttccatgaaccttccaggaatgcaggatctttcatctgtccccttgctgaggcactgaagccggcagcacaccgataactctccccccttgagctctttctccattgctgttgaagttgtttagtcacgtggctgaagcagggaaacaattacagatgtgtggtaggtgccgagtttgactgacagactctctttagattccttggtcctgaaactctcccagtttccagttttacctattacatgttgtgttagtcacccagtcctatccgactctctgtgacactgtggattgattgtagcctgccaggcttctctgtccatggaattgtctaggcaagaatactggaatgggttgccattcccttctccatggatcttcctgaccagggattgaacctgggcctcccacattgcaggcagattctttaccgtctgagccaccagggaagccctttacttaatatacttgtagactacagaaagaaataatacatatttccgtatgcttggacttcttccaggaggagccattgtttaagctatatcattagttatgaaatacaatgctgagccattcattccagggagttggctctgctgtgagtttgacatcacagcctggctctgtcaggctaggacaagagccagctcaacccttctttttgcagaggctggttatttaatgtggtggcagatgcccttgagatgttccagcttatcatccggccaatagcctggggactgactccaagagccccaggaaggctgatgttggcagtagagataaatgtaatcttgatgtaaacaagatttgcgtgggagttgatgttagcctttgttggaactttgataactaggctttgtttaggagactattttgaaggtaaaattcttagtttacgtggaagatgttaaaaggaaagcattcagtaaattcctacagccctctgctgggcctcatcagatctgaaggtgtgaatagataaatgtttccatccagagttttaagatgctgcctagtagaaatggcatcccacttcagtattcttgcctggagaatcccatggatagaggagcctggtgggctacaagtccatagggttgcaaagagttggacactactaaagcaacttagcattcagcatggccccactattcatcaaggcgtactgttacaagttttagctgtgtcccacagtagtgctgagacaaatgaattagtttttcttgttttgtttgttccccttgcctgagagaagagaggattggaaaattttttaagatacgtgaggcatgttttacttaactgattagtggaggaactgattgggaagacaaagaacagtttccccaagttctttcaggataaattgtgtgtgtgtgtatgtgtgtgtgtatttagcaaaagaaagaaaaatgctatattagatacaaatctgattaacattctacaaggtaatataactgtagctcctctgtaatagtcctaccaggttttgaaaatatggttacaaaccttattaaagtctgcaaattatccttagttttacaggattgtacatcattgtgctttatcagttgtggcttgttggtcagtgacaacaaagtctcattcccaagaatatcagataagggtggtgcaggttgcttagaaattgctctatcccctgagcgctcaaaaagtgatatttggactaacagaggtggattgtcactggggagcttgaaaggaatgcagagtcttgggttctactgccatctttaaaatcagaaattatgttatagacttccctggtggctcagacggtaaagtgtctgcctataatttgggagaccttggttcaatccctgtgttgggaagatctcctggagaaggaaatgacaacccactccagtattcttgcctggaaaatcccatggacggaggaacctggtagggaacagtccagggggtcacaaagagtcagacacaacagagcgactacacttcacttcacatgctatagattgaatgtttgtgtccccctcagaatccatatgttgaaaacctcatgcctaatgtgatgctgttgaacacagagtgcctgatgaactatggatggaggttcatgacattgtacaggagacaggaaacaagaccatccccaagaaaaagaaatgcagaaaagcaaaatgactgcctgaggaggccttacaaatagctgtgaaaagaagagaagccaaaagcaaaggagaaaaggaaagatatactcatttggatgcagagttccaaagagtagcaaggagagaaaagaaagccttcctcagcaatcagtgcaaagaaatagaggaaaacaatagaatgggaaagactagagatctcttcaagaaaattagagataacaagggaacgtttcactcaaagatgggctcaaaaaaggacagaaatggtatgactctaacagaagcagaagatattaagagagggggcaagaatacacagaagaactgtacaaaaaagatcaacatgacccagataatcacgatggtgtgatcactcacctagagctagacatcctggaatgtgaagtcaaatgggccttaggaagcatcactacgaacaaagctagtggaagtgatggaattccagttgagctctttcaaatcctgaaagatgatgctgtggaagtgctactctcaataggccagcaaatttggaaaactcagcagtggccacaggactggaaaaggtcagttttcattccaatcccaaagaaaggcaatgccaaagaatgctcaaactaccacacaattgccctcatctcacatgctagtaaagtaatgctcaaaattctccaagccaagcttcagcagttcatgaaccacgaacttccagatgttcaagatggttttagaaaaggcagaggaaccagagatcaaattgccaacatcctctggatcattgaaaaggcaagagagttccagaaaaacatctatttctgcttcattgactatgccaaagcctttgactgtgtggatcacaataaactgtggaaaattctgaaagagatgggaataacaaaccacctaacctgcctcttgagaaacctgtatacaggtcaggaagcaacagaactggccatgtaaccacagttcagttcagttgctcagtcatgtccgactctttgcggccccatgaatcgcagcacgccaggcctccctgcccatcaccaactcccggagttcactcagattcacagccattgagtcagtgatgccatccagccatctcatcctcagtcgtccccttttcctcctgcccccaatccctcccaacatcagagtcttttctaatgagtcaactcttcacatgaggtggccaaagtactggagcttcagctttagcatcattccttccagagaaatcccagggttgatctccttcagaatggactggttggatctccttgcagtccaagggactctcaagaatcttctccaacactacagttcaaaagcatcaattcttcggcactcagccttcttcacagtccaactctcacatccatacatgactactggaaaaaccatagccttgagtagacataccgttgttggcaaagaaatgtctctgctgtttaatatactatctaggttggtcataactttccttccaaggggtaagcatcttttaatttcatggctacagtcaccatctgcagtgattttggagccccccaaaataaagtctgacactgtctctactgtttctccatctatttcccatgaagtgatggtaccagatgccatgatcttcattttctgaatgttgagctttaagctaactttttcactctcctctttcactttcatcaagaggctttttagttcctcttcactttctagcataagggtggtatcatctgcatatctgaggttattgatatttcttctggcaatcttgattccagcttgtgattcttccatcccagcgtttctcatgatgtactctgcatataagttaagtaagcagggtgacaatatacagccttgaagtactccttttcctatttggaaccagtctgttgttccatgtccacttctaactgttgcttcctgacctgcatataagtttctcaagaggcaggtcaggtggtctggtattctcatctcattcagaattttccacagtttattgtgatccacacagtcaaaggctttggcatagtcaataaagctggttccaaataggaaaaggagaacatcaaggctgtatattgtcatcttgcttatttaactgctatgcagagtacatcatgagaaatgctgggctggatgaagcacaggctggaatcaagattgccgggagaaatatcaataacctcagatatgcagatgacaccacccttatggcagaaagtgaagaggaaataaagagccacttaatgaaagtgaatgaggagagaaaaaaagttggcttaaagctcaacattcagaaaactaagatcatggcatctggtcccatcacttcatgggaaatagatggggaaacagtggaaacagtctcagactttattttttggggctccaaaatcactgcagatggtgactgtagccatgaaattaaaagacgcttactccttggaaggaaagttatgaccaacctagatggcatattcaaaagcagagacattactttgtcaaccaagatctgtctagtcaaggctatggtttttccagtagtcatgtatggatgtgagagttggactgtgaagaaggctgagcgccaaagaactgatgcttttgaactgtggtgttggagaagactcttgagagtcccttggactgcaaggagatccaaccagtccattctaaaggagatcagccctgggatttctttggaaggaatgatgctaaagctgaaactccagtactttggccacctcatgcgaagagttgactcattggaaaagactctgatgctgggagggattaggggaaggaggaaaaggggacgacagaggatgagatggctggatggcatcacgaactcgatggatgtgagtctgagtgaactccgggagttggtgatggacagggaggcctggtgtgctgcaattcatggggtcacaaagagtcggacacgactgagcgactgaactgaactgaactgaggaagtcattagcacactcaatttgaaacctggttttccggtggctcagatggtaaagaatcgacctgcaatgcgggagacctgggttcgacccctgggtcaggaagatcccctggaggaaggcatggcaacccactccagtattcttatctggagaatcccatggacagaggagcctggtgagctgcagcccaccaggttgcaaagagtgagacacgactgagagacagcacttcctgcttcctgccttctgccgctatctgtgctgttgctttacacgtattgtcaggttaaccctcatgagaccctataaggaggcatcactacgcccacattcagagaagtgcccaaggtcacgtggttagaaaacacacaggtgggaactggaatcagcataattatcaatcctcccttccatgtggtctgctgtcagccactgtagcctgcagttctcttatctaattcaactagaccagccgcaaacatccttccacctctaaaatctgtggattccttgatttagtgaactcttaggagcttcgttgctaactaagaattctataataattagcaatactaaactcatcaaagctcctctattctgtttgaatatctagctcacagttctagcattatttgttacagtttttatttttttaagtagctgtttgtttatctgcttcttctccttggaactatcttctggggaggagggaatgggggtgttgtgtcttatttatgtttatatccccagaagccagtagaggttttctacataaatttagtactcaaatatttattgaagtacatgacatgggtagacacaaaactagactaggaaaccctccaattgtagcactcaagtgttcaagccaatatctaatataatccaccattatgattatatccttatatttatattcataaaataaaaccaacattctatttgcacagtggaaggtttatttcacacagcagttctttcaaatgaacagaggtcttctgctctgtatttcctctgctcagtggaagaataaatttgaagaaaagaggcatacacgataggagaacttaatggcagtataacaaccactgatctagtcacaaatggtagttttgagaaaagaatgtataaattttgcatagggtcagttaagatcaagggttctcagttggtgcccatttgtccccctgggggacattagacaatgtcaggagacatttgtggctattaactagtggagaggttgtactggcatcacgtggaggaggccagacatgttgcaaaacatcctacaatgcacagaacagcctccaacaaagacttatccagccccaaaatgtcagtcatgctgagactgagaaaccctggtctagacagaccctccaatagagctaggcttttactacattttgtttggttgactgcttggctcagcacagggcctctgacatcctcggcatctccatgattgaataaatcactgtctaatggtgatccattgcatcacatgtcccagtactgccccctgaaccagcaacaatgtgaccacctccaaggcttccctttcttcctggagcctaccagggtgcctaccatccaaacaggtcactctatgtaccatttatctgtttaaacacatgcacctcacccataactagactacatattccttgctagcagagaacatatgttgttgttgtttttctcattgtaacccattggccactgttccccataattctgccttaaaatgctttgtcactcagggcatgacaatgatgtgcttggaattcaggggttaaacatttgttcatctgtaaatactgggtaaattgcaattagacagaatgtgaggtgactagaatcatccattcttccaacattctggataaattaggattcatattacctggcattcagatttgtgttcctgggataagggtttaggtaagtataaatgtttagggtttgagaaaaacttccttaagctctgttttattccctaattctctgatttgtaagaatattatcttttttaggttttttaaacatttttcatttatttatttggctccaccaggttttagttgcggcttgaaggatcttcaatcttttttgcagcatgtgggatcttttagctgcaacatgcaaactcttagttgtggtgtttgggttctagttccctgaccagggatcggacccaggctccctacactgggagagtggagtcttagccactggaccaccagggaagtcccaggatgttgtctttacctgggagataaaatggagacttcactaacacaagaaaaagaaaaacaaacacaaagctgatctgactaggtagatagatatttctctttggtaagacaggatggaaggttgatgtttaaaggtatttgcaggaggatcagccctacgcttcgttgtaggtagatgtgtttggcatccatctgcttactcccctggacatcctcctaccctatgctatgctcccaccgcagcccagcactctcagatgtcactggtgccgacggccaggcagaccatctgaaaagcacttactacttcagtattgagacctgcaatagcttgtctgtaccaggagcacttgctttttaaaacaagaaccccaaagaatgaatcactaatggcagaatttcaaatgttatgctgtacgggcaggatcatttttgagaaatcccttctcaatgtccctcagatcacaccgtccctcagatcacactgtaagcaggtaaggcaagcaccagaaagacttcaggtcgggatcctgggacaggattacaagatttttaaaaattcatatttagggatttacctggtggtacagtggctaagactccatcctcccaatgcagggcagctggatgaaggaacaagatcccacatgccagagctaaagagttcaaatgctgcaattaaagaaccctcatgccacagtgaggactgaagatcccaggtgctgaaactaagacacagcacagccaaataaacaaataaatattttaaaattcatatttaaatttttgcttttattttttctgtggctatcaactggtaccaagcacctttagcttttgttttctattttatcttattgaagtatagttgatttatactatttcaggtgtacagcaaagtggttcagttatacaggtgctttttcaggttctttttcattataggttattacaagatatggaatatagttccctgtgctatatagtaggtccttgttgtttatttcttttatatgtagtagtgtgtatctgttaatcctaaactcctaacttgtcccctcaagtcacacctttaccttgccataggggaaagaagaaagattccaaggctgtttgatctttgcaaacttgtgtcaccctaagaaacttattaatggatcagtgacaatgcaataattatattttattgcaatcagaaactagggctcttaggagttttagttcttaagccatgttgggagtacagtttagaaaatcatgggaattcagatggtggcaatatttactaggtgcttactatgtgtctagcatattactttttttttaatcatcatccccatattatgaatgaagaagttcaagttcacagcaagtgtatactagagccaggccttgaacccacacatccagcccaggtgtcttagcctctccctgtgttacttctccaattataaccaggccacctctgctgtcctcagggaactttcccactgaagtagagggcctgcacatgatgagagagaagacagttctaattaatgctaatacaactccttctttctttgcaggtttgggaggtgccctcggttaccttttaggtgccattgactgggcccacttggaactgggaagactgctgggcacggaattccaggtcatgttcttcttctcctcgctggtgctcactttgtgttttattatccatctgtgcagtatccctgaagccccacttacagatgttgcaaaggacattccctcacagcaagcctcccaggaccttgccttgtcatcagacaaaatgtacgaatatgggtctattgagaaagtaaaaaatggttatgtaaaccaagagttggtgctgcagggaggaaaaaccaaaaatcctgctgaacaggtaaagatgcaagttcttttttatttacttaggaaaaatagtcttattctttccttgtgttcatgcttttaacattaatccttgtctttgttttgcttgattatttgatgtaaagagttttgttatcctcaaattgaaattctgtgaatctaccaattgaatctgcaaatgcccaggagctattatcccttggaattaaaactttacacctaatagaaaaatgtgtgcatttccctcttgtccttctgcttctgactctttgcagaccctcaaatcagggaagactaagctggctgtaaaatgttaggccataagagcaggctggaattatccatcctcaggctagattaggattataaatttgttattccaaataacagcatccccagttgggaactggaggaactaagaggctattgggatggagccttcattttattttgatcatacagtgaatagagaaaatagtagaatctaggtctccagagacctgctgagaccttggggctccagactgcctgtgggaaaacatttatactccctgctggtatctggtaggatggagcccctttgctgtgtggttctgcaaggcagcagcatgggatttatggaatagctacacaatggaagccatttgatcattagatgtgtgtgtttttgaagctttatttaagacataatatatcaggtagaacacacatatatatacaaaataaatgttttttcccattccctgagaagagaggattgaaaatttgccataaaggatatttacagatgaacaactgtttaaccatgaaattccaaaaagacagcatccttatcatgccctgagtgacaaagcattttaaggtggaattaaaggaaacagtggccaatgggttgcaatgaaaaaacacatatattctctgcccacaaagaatatgtaattatgggtgatgtgcatatatttaaacagatcaatggcacatacggtgtcccgtttggttggtagatgccctggtaggcttcaggaagaaggggaagccctggaggtggtctcactgttgcagcttcagaggacagttctaggacatgtcctgtgactagatcacctcaccattagtcaacgatgctctttattcaatcatggagatgccaaggatgtcagaggtcatttgcagaaccaagtgtttaactacgaagaattttccacaatggagattgtgggaaaagctacgcagacacagagaagaaaacagaaaggatatacacccaaaatgctcattgaaattattgtctttgtgtggtgggctaacaggtggtcttcattttcctttttaaacccttcagtgaattcaacatttctgtaatagacaagtattactttgaaaataaagcaaaaataatgtcagggttaaaggaataaaaccagacagtttaattaagataagtagatacaatagattatgcctgcctctttgccctctttgcatagactggccctcaaagagtcacccaacagaggctgtctcagtctgccccaaggctgttgtgatgactgaatgaatcaaatgtgtggaagtcttttgaaaggcataaaaccctctacaccattaggagaagaaatgcatcaaatacaattatcttgtatcagcatatgccacttgcacaacactgtaggctctgaatgcttctattatgtgacaaaaaataaaagaaaaactacatagggaaaaaaaaagaataatgtatcttaggctcaaagtcaagcacccaactgctattccaatagtgcatctggggagcttccagctgagcagtgggcatctccacagagtcaggtcctacctattcttgtttgtcaaagtcactactttccaaaatgaaggtggctgtgcaatttgagaactgggatttttttttttaatggcaagaggcctgaattatttcattgttcaaactggataccataaaaatacatctctatttcttccccaccattagttgctcccttcaacatttagtctccttctgagggtacttttgtgcagctctgtctccccctcatggctctgttcatttttcatttataaatccatcattacccaatctccggttgacaaatgcatgcagtaaaacaacccccaacagctcaaaatcattgcaagggctttactaagggaactgatgagtcagtgaataagatgctagctgaattttcattctgagttaaaatatccagaaagactgaatatttatattcacagcttttacagaaaggcataattttgcagcttttatttattttggggagaaaggaaaaaattaggttaacaatgaaagcaggctgaaattatatataaggccaaagcataaattaatatttgaaatgaggctgcatacttgctggtcagattcactttttaaatttttgaatttttggaaagaagggaaagaaagatgaatcgcttggtctgagatatgaaaatcaggctgttattcctcagtctataccgttaattgtttcttcctgtagtcaagggaaaaagtaatagttctacattggatttctgctgtggtcaccatttatttagacaaatatcatgttctacatgcagaaaatattttttccttactccatagtaatgtctatgtatttttttaaaatactgagtaagtataaaaagtccgtggagtcatggtcattaggttaaatactataaaatccacaaaataaaaaatcaacttgtacaacaaccctacaatgagtgaatataatttcctgcatcaaagaagtaaaaagcattatcatagaagattaagaattataaaacaattttctcttatagttaaaatggaaaaatcttgggagactatcttgtaaataaactagctaagatccagttttattatgtcaagattcagaacaaatagaaatcagacagaaggaaagacccatcaccctgccatggttaatgtttaccgtctcagtgtcttcagggcagctgatttcttaatattcctgagatatttttcttctctcatatgataaggtattaaaggctgtttcttttacttcaaaacagttgtgtcaatagttcattttttttcattctctcaaagctactgacaccaataaattatagcctctggttttaacataatttaagtctaggttaaagaattggcggggggcatatgtattcatttcacatgtgtctagttttgtgtgtatgcgtgtgttctacaaagttctcacttctgactagactcagggctcatgtacacatgttgactgatggcaagatccagagaaataaaccgggaggaggtacctgacccagagcagggagctgattggctcgatgtagtaatattctactgcagcgtaacaaacgaccactgggtttagcagcttaaagccacacccatttataatctcagagttctgtaggtcagaagtctgggtgggctcagtcaagtgctctgctcagggtctcacaaggctgaaatcaaggtgttggtgtagctgccttctcatacagaggtttgaatggggaagaatcagcctcgagctcatgcaggtagagtctggcttcttgtgggtgtcgaggtccttgttttcttgctaattgatggccaggggtcagtcatttcctgggggtcacactcaagttcttccctgtggcccacttcaccttcaaaccccagcaattcttgtgtttgagactttctggcttccccttctgttcccagccagagaaaaatctgtgctttttaaacagttgatgtgagatttcattagggtcacccagataatctccctgttcattaacttgaagccaactgatcagtaaccttagttgcttctgcaaagtcgttttgccatagaatagaacagaatcatgaagacggagagtatagaggccatcttggaatttggatgaccagattttaagaatcaagagatctaaggattataaccatctagggggtcacttaaatccatgagcttcatccttatacagtggttctgtcattcaaagataggaagtttgatgggtggctcttacatcttggctcaaagcaagtctctttctagtcccttcgcccttatatcctcaaagccctgaaactgtgaagtatctgcgcatacataacgaaacccctcctatgagaacactccatggaaaccatggtgccatgcccagatggtgtgaccttgtgtgatcggctactaacagatatgtaacgtggctgtgtgctggctcccacagtgggctatgtgtctacactgaatgtcacacctgtttggtgttttattccagactcagaggacaatgaccttgagatcactgttgagagcattgaggagcatgccccctcattaccgctgcctttgcatcagccacctcattggatggactgccttcctgtccaacatgctcttcttcacagacttcatgggccaggtaacagacacgtctgcacgcactctttgtctcacacaccaatcactccatcagcacctgtggggcttctgagtacctctaggctgggcacagtaagagcagaagagagagtaccttccgggggctggcttatagacaagttccagagggaagtgtctacaccctgcacagttagaggacactatgggaccagtgctcgatcaaatacaacaaataaggaaaatttgaggtgagctgtagtggacacagcaggcttaataaaggaggggcagtgtgatttgggtcctgaagggtgagtaggaattggagagggaggggacggggaggaaacattccagttggagataggactggcatgtgtggggatgagtctgaagcctattggctgtaccagaataggggtgacagggttgcctaagtcaggtggagccagatggtagacaggaggagagatgttcaacatttgaaggatgttgtttagattggaggcagtaggcattaagtcctcctgagggtccttgagtggaggcgtgaaaggatgaaagggtgccacagtcctgggggaatgaggtctgtgcccccagcaaggggaagagacacagagcacatgagcaggggtccttaccaactcacacggggaactcagcggccccaaatctttcttgcagattgtgtaccacggggacccctacggtgcccacaactccacagagttcctcatctaccaaagaggggttgaggttggatgttggggcttgtgcatcaactctatgttctcctcactttattcttgtaagtaagcctcctcctcttgagggtgtcttctaagggttctggtctagcagaatcttggattatatttttggtaaatatatggagatcaggaaaaccctttttgccttagaagagaccacatcaagtagccttttcccagtgaatcctgggtaccattctccatagcaattactttgtacttagaatcagggggctcctgatcaagatactttgggaaataagaggaaaccttggaaacaacatggtaaaatattggatgcatgcgggatcgtcacagtcaagatgattgattaacagcaggtctgggttctgctacagtgagatcaccaggggtttcatagatacacttatcaatctagacagaaaataggagggatggttaatatgataagtgacaaaagtaacataaaaataactttagctctgatcagtagggtggtatgttatagcagccctgttctagattgaggacagcttttcttctcaggcatcagctttccatgggatctattaacttcaccccccacctccaaccttggctaaatttatctatggggacactgtattcagagggatttctgggactggatttaactatgtccaaatggatgtcctctaattttagggcattacacaggctcattttgtgccagctaatttgtatggaaatctccaagtgctatacacattgagttaaatgaaaactcaggcctttaaaatgtatgcaggtccctcatttggagtggaaatttggaagcttcttccgtattgtgggaaaaatagctgatccgcagggcagaggtccaggctttggacagccccaggggacagcagggttatggcccaggtggaagcaggggaggcaatggaggacagtccatggtaccattcccaggggcatcatgctgtcactgaagtgtgcttcttgttggggaggaaagtgaatgtacacagtgtcccctagcctggcatttagccctttgcccagctaaaacacagctgaaaacctgttttgaggtcaagaaaatctctttaaagtatagcacagctggggaaaggggacctaatataagcctatccaagaaccccgtaatcataaaaccatagaattcattattttaaaatttatggtaaccaaacagtggtggcttgaagcttacgtttccttagcaaaaccctttttcccccttgttgtttagttgctgagccgtgtctgactctacaactccctggactgcatccaggtttctctgcccataggatttcccaggccaagaaaactggatgggttgccatttccttctccaggggatcttcccaacccagggactgaacctgcatctcctgcattggcaggcaggttctttaccactaagcccaccaggaaagccctttgcccaccatgggcttcccagatggcgctaatgctaacgaactcgcctgtgagtgcaggagaagtaagagacacaggtttgatccttgggtccagagtgtacaaattaagaagaagaagaaaaaaaaaaacttgcaggaggacaatttcaaatacctagaatcagggagcattagactgaaaggatttaataacttatccatctcactttgtgctttcaagatgtagggcaattatttactaccatcctcattcttttaagaggaaaatatttttctaaaagtcattagccttttaattttatgtcaattttaacttgttttcctcaaaaaatccctcccagggacccttccattatctaggttgagttcctacatgaatttcatggcttttgaaaattcaagagcatgttattttttaggacctttctacttaaaatctctctatacaagaatccctcccattttaatagtttttgaaagttatattaatgtataaacctgtgatattcctaagatggtgagttagaactaaaatgttctttataaaataccaaccagccctgcctaaagatcttcaggggctcccataagatagagtggaggtcctgaccttggtgctccaggactcagagtctggcctggctcatccttggacctcagtcactcccaagcaggaactctcccaatgacccacttcccagccggtctcacgtctgtgtgtttatatttgatttcttccacctgagctgctgtttctccctccgtacccagccagacccaactccagtatgcccctgtttgtgccatctctcaagtctttccctctgcactccaacccactctgggcagaatcagtcatttgcagcaattccagagtgcactagataaccctggattttggactcatcacataacactaggttgatgacccagaatgtctatccagagggactttggcagggcaatctggctgctgaggtaagagatgggggatggtgataaaggattgttttcaagctcctttcacactgccggtacacttagatcgatgagtgtagtcacactgagtactgaaatatagccaattgttcatagcatagactactgttcaaagctggggcctaaatcaatcatttctctccaaccctaaggagaggcaccatgttatttagtatcagaaacagcatagggcaagtcaacttggctgacagttattgatttcgcttcataaataaagcattctttgccagattttcaggcttggtagtgaagttagttgtgtttccaaatatctttttatcaccttttgccttcttcctggttggcccatctacttggtgagagcatttacctaatgaatattgatggtatctttcaggtactgagacaacttatattccattttctgtataaatgtaatgattaagcaaactagatttatattgcttttattcttagccttgacaacacccctccaaacatggcatgaatttaatagaggaagcaatgttgttcctttaacattttcagaattccaaattgataccaatgtaatacataatagatacaaatttaattcacctgcaatgcaggagaccctggttcaattccttggtcgggaagattcactggagaagggatggcctaccactcaagtattcttgggtagctgttgtggttcagctggtaaagaatccacctgcaatgagggagacctgggttcgattcctggatttggaagatcccctggagaagggaaaggccacccactctagtattctggcctggagaattccatggactgtatagtccatggggttgcaaagagtcagacattactgagcaactttctcttcacatatttaatgcataattgatataacaataatacaaatggaatacagatgaggtttcttgtctatgcaatgtaaatccaataattatttgaaaagatatgggaaatttcactcttaagtaggcacatttctagcttctatcatttatctatctcctgggtacatctagcagcgtgaagcagaggaaagataaaactatggattaaaataaatgattaaaaaaggaagataaaacattcttagggattttccctaatgtggtgaaaaacataggaaaatattttaaagcaaaattttcagttttaaagaatgagctctaccatgagtcttttatgagcaagccaagtttacccgctttgaggagaccccagtggaaagtcaaccatattcagcaaagtctgtgtttttggaattatgatagccaatgttaacttgatgtcttctgtgtgcttggcatttggctgggggatttcacagctattttacttcatttgatcctagtaacaaccgccagcaaggattttactagttccgtttttctgatcaagaagctgaggttttggagaagttatagagcttgtccagagtatgagggtgccagcgatggggaggtgcctggcacaggagggtcccctgactggactgggaagggctggtatgtcagggccagtgtctgcaggtgatgtggttctcaggttgtggagacagcatttgggtggggtggaaaaactgaatgattcagcttattccataaactctggttatgttcatttcctccaacctgactttgggtcaagatagacctggattgtcattttggtcctgctgggatagatccctgtgaattagaactgcattttcttgcatgtcctgcagccccagggtcccaaaacaaaggtgggcttttcaatcatctcttctgcgtcttgttgctatatacagctgcccactacacagtccctggtccttccctgcagaaaagaaaatcaacccaggaaggcaatctccagctctcctttaggcaaaggattcaaagctgattcccaaaaccagctgttttcaagcatagataagggggttcttttgctcctgactcaatatcaaaggaaagattaaaaaaaacaaaagtgaatcttcaaaagcaaaggttgtctgaaattatgagatgttgtgaggcactgccagctataatttctccctctcttctccccacagactttcagaaagttttggttccctgcgtcggattaaagggtctttactttatggggtatttgctgtttggcctgggcacaggattcatcgggctcttcccaaatgtctactccaccctggccatgtgcaccttatttggcgtgatgtccagcaccctgtacacggtaccctttaccctcatcgctgtgtatcaccgtgaggagcaggtgcgtggtcgaacctcagtgccaagtgatgtctggagccacctgaaggcagggggacttggtgggaaagtgtcgagcagagctggaaaataggggttctcgaaactgcagtactaaaatgtccagccagatgctacgatggcctggccagggcatgaccacgttcccagcccaccctctcctccttactctgaagcccagtgcacttgggagcagtcagacaggcaccattactcccatttgtcacattggaaaagggagggttggtaatgctgagaagccagcccacaatcacacagagacaaagcaggggaaactctgggcttatggcacgtgccatgtacctgcagccgtttctgggtgccacagtgagggccccagccctcaaccactacagaggtccggtgccatttctgggagttactggttgagcaatattttccttggaaatggggttttggtaagtcatgcccggtgtgcagggaggaaagctggtggcagctggttaactctctagctgcctcaagggaggcccgccccatctccatttccatctggaaattcaagccagagggcaagactccaagtggctgggagtttgggttgggtttttttaaaaaagcattaggttgggtatttctgctctaaaattaccaccttttcttatcaaaatatgcacctttccccctgaaaataggcttacatttcctcaactgtaaaagctaaagagaactattagcttatccatcccagcaggaaactgcaaataccctgaacacatgtccatgtgactagaacactggccttctttttcatcatttgatctggcaagcgcagtgcggcagggttgcactaggtgttaaaacctttaaacaagagttgtagctgtccttactcctggcagacatcgtcactaatgtttcaatgcatggcaggcacttagctgctagaaatacagctggcattgagaacctcccctccaagacagagctgtatgatactaggccccaaacacagaggctatggactcagaagaacctggattcaaattgtgcctcccccatttggcagctatgggacactggggaatcataaagtggagaaaacagtcactcagttgtatccaattctttgtgactccatgaactgtagcccgccaggcttctctgtccgtggaattctccaggcaggaatgctggagtgggttgccattcccttttccagtggatcttcctgactcagggatcgaacctgggtctcttgcattatagggagattctttgccgtcttcgtcaccagggaagcccggagatcttgtccatttatttactaagtgtcactcaaaatgagttcatttttagatgggaaatacaatgacatggttcagcagccacaatgatatgcaagtgtgaatcaaatggcacctgcctccctctcccttcactctttccctatgtcttccaccccctaccccaggcccctacatgtaaccactttctttagacttttgtctatctttctagtatttttgaatgaaaatctagcgattacgaattgcattttctcattttccttttcttattcaaaggatactatgcattttcctgcacaatgatttttttaaatttaatagtgtaggaattatctttcagactcatagagccttagttttctaatcaaatgggaatgatacacccaccttatagaattgttggaaaattaaatgaaatgagatagtataggtaatctgcttagcataatgcctacctggcaccttgcaaagactcaaaaaatggtaggcagtagtattgtattattgttattaagaggttaatgataataatatgggcctccctgatggctcagatggtaaaagaaaaaaaaagtctacctgcaatgaaggttactgaggtttaatccctgagtcaggaagatcccctggagaagggaatggctacccactccaatattcttgcctggagaatcctcatggacagaggagcctggccggttgcagtccacggggtcaccaagaactggacgtgactgaggggctaacactttggggcctccctggtggcaccatgtgcctctggaaaggtggtaagcatgaatgaaataacgtaagtgaaagagccttgctcaagccctagcacgtatatgatacctgataaatggcaatgctatcagccaattcagaccaaatgtcaaatagtaatcaaacattaatctactaaccaaacaacaaccctattttaaaaggtttaattgcttttttatgttgcctctcctaacatatatctgtgattcaacgtcctcctgaaagtgtatgaactttcaactctaaggaagggatgaaaagggatatttattgtttctaatccactgtatttactgaatgcttaggaagagagaattttgtgttcttcatcatttaactcccatagttaatattcaagattttgtggcaggtagggggaacaggcagggggtggagcttgaatcagatagcagtgtcctaaggttgtgttggaacttgtttgtgtgccatgactactttggcactgcaacggcagagttgtgtgtttgtaaccacggctgcaagtatctgttatctggctttctaaagaaaaagtttgcttgctgactctgccctatggaacagctggcatagatcaaatgctgtccctgttcttgccttgcagaagcagcgggccctgggtgggggcccggatggcagcggcagagggcagggcctggactgcgctgccctcacatgcatggtgcagctggctcagatcctggtcggaagtggcctgggccttctcgtcaacacagccggcagcgtcgtcgtcgtggtgatcacagcctctgcggtggcactgattggctgttgctttgtggctctctttgttagatatgtggattaggtcaataaagagacatggtccctaacctcagacaccgtggtgcacacagcacgaaatcaatttttatctagctctgcgttttttgtatctgccctttggatgccacatgttttgacttcaactgcagttgctgctgctgctgctaagtcacttcaatcgtgtccgactctgtgcgttgctaccccttattcccagccagctctgtccacatcagtctcagtatttcaagcatgacttgtcttaggagagactgggccatgcctccattcactggtggcaaagggcaagtatggatggcagcacctccttgcaactttctccctgagtcactgcagtggaatggggaggcagggtctgttttccacagggcattttaggccttgataaaacctgagacgccaactaacacacacttgtgatgctggaatttatcctgtgatgtgatttcttaatttttattttttagctaggggtccatatatagtcaggaagattctatt

SEQ ID NO: 94 - DNA, 76241 bp, Hippotragus equinus
  source 1..76241: mol_type = genomic DNA
tccactgtccataatgatggcacacacttttctttacccaaaagagtagaaacaattttcacagtacagtcatctacagtatataaaaattgtttttacaaagcccttatatgcagaaaacatctcagtcttcaatttgaaggttcttagccataagatatcttacagacaaagatgagtatagtaattatacattctatagtcttttcccctaacttcaacaggtaggtatagggaactcaatgatcgtatgaacatatggtatatctgcatatcagctttctagaactacatggagtaataactaaatttcttagtaatcactttgaaaacactggaaaactaaatagaaataaccaattcctttagtccattcccaaagttgcaatcctctggattttcataaaatggagtgaagatccttttttttttttaattgtttcagcctttgggcagaaacaaagccaaggattgaatgccaagatttcacactcattaattcataatttatggcaatcttcttctggcacaacttccagtattatttgtaatgttctggttataatgtctataaagaaataaagaagaaaaaatttaaatgcacagatatcagaaatgcatataaacaacaaaatgcaagttatttggggttgaatattgaaaacccacaaccaccaatttcatagagcactttcaagaaatatttatttcattagaatcctatcatgctcaattaatttacacgtcacctctgtaacttcctatgatggcttctcagcaagagtacattaatattttgttttcagataaagacttttattcatgaaccatgaataaaatggctgaaaatctttgagacaataggaccaaggtataaataaatgttcaaaactacacttcatcttgtctaaaattggtttgttgtttttgcacctatgagagtacatccaattctgcagcaaaatcagaaaatcagaatataatttccagtctcaatttgtagtatattattgagcaaatatattatctcctaggtagggcctcatttgcttcatcaatagaatcaaggacctgggaatgacatcagcaagacagagggcagggatgcttatcttctcccccgaaaccaagcaaacaaaaaaagaaaaccaagaacaataaacagctacaaatggaagaaaacagctcaggcaaagctctagacaataaagaagcagtagcaaaaatcatgatgagctcaaaaatcaaggatggccacataggaaaataaaggaagcattttgctcccattatcccatctccctggagggaactgctaggcaccggaaggaatcctttcagaggaagatcaccacatgaggagaaggagagcagaaggaccacagcaagcctcaccatcgtgggtgttagcagctttgggtacaagggtatctcagtcttcagtgatgctgaccctagctgatggagcagtctgtagtatcaaagctctgggctctggatctactcccagaggctggagctgttgccgaggtgagacctgccctcaagggtcccagttgttgctgtgccccactctcacagattggtaccacagcacacctccccatatgagaccagagccgccactgttctttgcccaccccagtcccagcttagggctttgctccaccattaccaaggcaaccttcctgtcctgagccctgccttggcaggtaggggggttcaggctcagatcatcattgctgggactaggctgcctgtaccctgagcttcacccccatcccagattgaggctcttgaagcatcactgccggggggctacccatcaggtttcaggtcagggctctgacccatcaaaactgggaccaggctaccactgccctgaacctcccaacccaggttgaggctccgagctgtccctgccagggctttgctaccactgccctgtgcccagttccccggagtctcaagatatagctctaacaaacaactactggggttgtaccacggctatcctgtgagtgttctgcatggtggggaggggtgggggcagacttgagactttaacctaccattccaaggctgcactactctgcattctgccttctgagcccaagccaccagtgcaccttgtcatcccagggcccttgtcactgccatatcccctcccctcctcacaagtcacagcagagagcctgtgaaacccaagtatcagttccataggctatgtgcacgtcgacaccctagacacctgtgccatgcccacagcaactgtgcctatgctccagggccctggcactgtagtagttccacgtgtgcctggtcctatgaccccagttccaatatagctgtgagagtcagcacatcagaccaagcaccaagagggtctcctcaactagacctctcccacaggcaaagagcaacctcagactctgaagatactaatagccccatctgctgcctgtcctctgtagccttaggcataaaagaccccctattctggccaagatcagccagtggagtagcatggagtctgaatcactgtgcctcctcaggaaccaaagacactgcatctcacccagcaagtgctctcacagctacctccaggggaaaggctttccctaccgaagccagtctgaaaaggccagaagagatgacttcacctcaaaggcataaacatcagaacaaacccatcaaaaatatgaaggaaataagacaccaccaaaataatgcaatactactccagtaactgaccccaagtaaatggaggtctgtgaccaaactgaaaaaaaaaaagccaagtgatatatgagagaacacagacaagtcaatgaactcaggaatagtccatgaagagaatgaggaattcaacaaatagaaatcatttaaaaaatcaagaaattctagagaataaaatatatgaaatgaaaaatgtgatagcttcaacatgtaggctcaaaagaatctgtgggcttcaagacagatctcttggtattatccagtcagaggagaataaagaaattaaaataaaaaagaagcaagcctatatcaactgcagaacatgatctaaagaaagaatatccatattttgggaatcccagaagagaaggagatgcaaaaattttatttaaaaatataatggggaaaactttcaaatctggggagagatatggccatatcggtgtgagaagttcaaagattcccaaacagattcaacccaaagagatctttattggatgcattgtagtgaagctctcaaaaatcagggacacagagaaaatcttgaaagcagcaagacaagaaagaatcatcacatatgaaggaatcttgatatgactatcagcaaatttatcagcaggaatcttacagagattgggattgggatcccaggagagaatgggattatatatccaaaatactcagaggaaacaaacaaacaaactaccaccaagcaggaaagctatcatgaagaaatgaaggcgagataaagacttacccaggccaacaaaagctgagggaatttttagccatcagacatgccctataagaaatcctaaaaggagttctttaagatgaaacaaaaacgcacaaatcaataacatgaaaatatgaagaagagcgaacactaccaaacatttaatgaagccagcattgccatgacgggcttccctgatggttcagtggtaaaaaatctgtctgcagtgtgagagatgcaggtttgaaccctgggtcaggaagatcccttggaggagaaaatgacagctcattccagcattcttcccgaagaattccatgttcggaggagcctggagagctacagtccaaaggattgcaaagagacggatacaactgagtgagcccaattaccctgaaactaagtacagacaaagacactgaagaaaagtacattacagacaaatatttctggtgaatacagatgtaaaacttctcaacaaaatattagcagtccaaattcaacaacacattaaatggatcattcaccaagatcaagggggatttatctctggaatgcaaggatgcattcaatatagtaatgaaagttctagccagagcaattcggagaaggcaatggcaccccactccagtactcttgcctggaaaatcccatggatggaggaggctggtgggctgcagtccatggggtcgctaggagtcggacacaactgaacgacttccctttcacttttcactttcatgcattggagaaggcaatggcaacccactccagtgttcttgcctggagaatcccaaggatgggggagcctggtgggctgccgtctatggggtcgcacagagttgaacacgactgaagcgacttagcagcagcagcagccagagcaattaggcagaaaaataaataaaacgtgtccatgtcaaaaacgaagaagtaaaataatctctgttcacagacaacatgatcttatatataggaatccccaaagaccagtaaaaagctattggaactaataaatgaattgcagtaaaattgctggatacaataccaacacttagaaatcagttgcatttccatacattaacaatcaattatctgaaagagaaattagaaagcaaactcactgacaactgtatcaaaaattaaaacacctaggaatagataaaaccaaggaggtgaaagatctgtacactaaaaactacaagactaacgaaagaaattgaagaaggcaaaccaatggaaagatatcccgtgtttgtaggttgagaggaggtcatattggggaaatgtccacataacccaaagtgaactaaagattcaatgcaatcccaatcacaattccactgatatttttcacagggaaaaaaaaaaaactatcctaaaatttgcttagaaccacaaagtaatcctaaaagataaggagagagctggaggcattacaatacttaattatatatcaagccatattataaatagagcaatcaaaagagtatggtgttgtcataaaaacaggcctacagatcagtggaacagaatgaagagtccatacataaacttccatgtatacagccaactaatttttgacaagaaggccaacacaccatagagaatggacagtttcttcaataaatgtatttgggaaaactatatatatatacaccaaaaaaataaacgaataagtaatatgaaacttaacttatacctaataccactcacaaagattaacttaacatagatccaagatttaaatctaagatctgaaaatataaaactcctagaagaaaacatagggggaaagatccttgatattggtctaggcaatgatttcttggataagttaccaaaatcacaggcaacaaaaacttgttgattgtccaggaaagctgcaggcctccaattgcatccctacccatataaggtctttggctttcgagataaatcagtcccacaatatttctttaaataaagttgagccactgagtctgcattagatatttttagttatgtaaagccaaacagcaattgtaggatttttagctttgcctttcatgttcagtaattgtttctgaaatcagatgaaacaacttctgaccctgcaaatctgatttacccaatcatgcctggtacaagtataggagctacagccaaatgtgaataagcctattgaagtatgggcacaaaaccaagctttcccagaaatcataataagaataacagtatttatgtttttttgaaaagccttcaaaaccctttcacaggcctggcttcatttcatccttacagtgaagatgatttgacctcctaagaaatgtagacaagcttaaactcattgaaaagcttgcactgcaggtttcatgaggagtctgtcaaatgcatgtagcagctttcagtgaaataccataaacaaactgatcacgacacaccatatgcagactatgctcttaggactctgattttgcaaaatcactgtccatcacgatggactaccgtcactctgctggtgctgcccagtgtgaccctctataactcaagattctgtttaaatacagctgtcctccacatcatgcccggagccagaagcatcagcttctagtcatcccattcagtctcagctggcatgagctttgactgataaagagaggcagccaagtaaaagggctgtggggaagcctggctggtgtttgctggctctagctagctccatgaatttcactacatcggtggggtatctgttcctttttccttgggtgagaagctcgtgactctgtaaataaataaataaagatccagaagaattaaacactccatcacagatggcggaaaaaaagctctctgcacatctgactgttcccttaagagcacgttttttttcttctcatcccaggaacgctgtcaaatgaaacgtggttcaatactggcatcctgtggccacagaaattcatcaaatctctgaaactcagctcctccagttctgaagttccctgcctatctgaactcagcagtctatctccctgttttctgaaggctgttctggcgacctcttttttttttttttttaatggaagcatcctcggtaagatgtgttttgataaactatcatttcacaggcctaatctgttcatgtatatttgggtgaaaatacggtatcaaggctaaagaatgttccccaacagaacaatctgatgttaaatctgtacacagggcaccaagcagaggctctctggcctctgagttcacactgagtttctctcgccccaaacagaaatagttgggagaggaggtgagacagtggttcagactctgctgtgttgtctgtgtatgtgttttgttttggccaaaggctaggaaaatacttgctacagctgcaataaatattatgaactttctttattttactacaagaatgctgcctaagaggaaaatcaaacaaaattacggaggattgttgctttttgcagactcactttcaaggcagctataaagataaagggttacaatgatcgcagtttagaggcagatttgccatgttccctggtaagactctatggcgttgttgagaaccaaataaccattatgggacgactacttgctgctactttcacaaatggctaacactacatttagagtccttggagatgttcaaaatgctattcgagacagaaaaataacagaaaacttcaaaattacatgagcacggaaaaacatcaaagaaggagcaagcaggaaaatcagtagttaatatgcaccagcaaagaaatgagagaaaatacgcacatgttagcagaaggaaagctttgttagcgttttggcgaactacaaacaggagggacaaaatgtttattcaataaggaaagtaaaaggaactccttctctcatgtaatctctctcattgttcaactctaaggcaacctgctcttcctaaaattctcaaggttttccaggtgttcagggattttaactgtctttagctagttattctgaaatggacaaagacctcccagtggtaaatactcatctactccaaaaattaataacaagcaatcctaatggtaaatattgtgtaacaggacttggatttttttttttttttttcaggaaaagctctatatttactgcctacagtagagaaaagtttactaaagctattctacagaaaactagtgtgatctgacaagaaacaaggattaaatacattgctaggcaatcagtgttcctgtgttagcgttgaagaacctaacttttatagtaacacttctttggggaagaatgttgctagctaggaaacaaaatgcaggtataaatagtagtataaggttgaaagatatcaaatcccaagctaataaaaggtagcagctgaagtctatgttaaaggactagcttctaaatgagtttgtgcagcacaggagagatgcaaaatgtacacaaagttgtttgtttttttatatttagtaacactgacattatttattaataattttactagaacgttccctgaacttttcactaggctttaaaaaattaatgatggtaaagtaagtaaattaaaatgaatgagaagaacaaaagaggatttctaaactcaccagcaagaacacatttgctcctctggatatatttttttacttctttctctcttcccccaggcactcagtataaaaagaacatgaatttgaagtccagcagctatggcttcaaatcccaggttaataacacagaaacatatacactaccatatgtaaaatagatggccagaaagaatttgctgtgtgattcagagaactcaaagtaggactctaacaacctagaggggtgggaagagatgggggaggttcgagaagaagaggacatgcctgtacctaatgtagaacattactgattcctgctgatgtatggcagaagccaatacaatattgtaaagcaattatccttcagtcaaaaaataaataaattaaaaaaaagctacatcttcctgcaatctggttgtcccatctgggtatagaaatcaacaaattcacacatagatcttgtggaggaatgaaacagatgataatgtaagagagaatctcccagcccctgatggagggttaggcttttgatggctttttgcagaggctattcctaagtactcttcctacctgctgatttactatattttctcctccctcaacacacctggtcaccaagctctgttgatttttcatctttaatatctttcgttttcctctggaccctgccaacatcacctgtattcagacttttctcagttctgtcaggattactgtgataaccactaatcactattcttgagaatgtcttcagcctcatgctctctgttccatcctcattgtccctctcttccggatgacttctggaaagtgcaaatccgcccaagttggaattctaggtctcctacttaatatcttcatgacttggaacaagatatatggattcttccataccataactcaaaatctataaaatatggataatttttttctagctcagaaagttgatataaggattaaatatggttatatagaatggttatggattaaatatggttatatatctgtatgttaacagaaattactcagtaattgtcaactgctcttcttttcttgattattcttgctgttcctatgattctccatgattcaccagttgggcagtgttataataaaagaaatcatgatacttgagaacttttcagactctacatgacctcccaccaaatctcacaccactcattaagtagtgtgttatcacatagaatcaataaactgcattcagcccaagataaaaacaattaggtaagtgagggattcagtagaaaaattgggttgtttatagtattgcttataaaaattctatacaaaaattggtacttctaagaagtgattaaagaaaatcaaactaaataccatcaaaggattcagtgactctaccctaaatatccttcctgccttttcttcttcaagttctcattagaatgcagtaatatattcacattagcagtttcccaagtggtattttcagactttaaggggtgtaccatatatgtacacagagatgggctttctacaacacagtctctcaaaggtcctaagagtgcttaaaaatcttacctgacattcttctgaaccatctgggtttcttgtcccatataataaagagatagtaggcaggaatcccagtcagagtgatggtgaagccgacccctgtactaaatggatcggaataaagggaaagggccaccatgaagagacacgtgaaggaaaacaaagctgggatgaagagcggcacctagaacacagcaaagaagaaaagcacttcaaccgtggcttcagaggcagaaggcagattcgagctgagcactgcagccaccaggccaggtgacacactctgatcccgcgaccaggcgacaggcaccgtcccacttacctttctaggaaaatcccttgactagggcacagagcagatactgatttgaaaacactcctttaaattaaaaataaatctttgggtagaacaaaatctaaggataaataagtatgtttcattagagacgttctgtttgaatgattttactacttaagtaccattatgatttatgtttctgattgtaaaagagtgcttctttgataatgatgattagaatccactttaatgtagagccaagagcacaggctgcttgttacatgttaaagcctttcagtgcatattgattttctgttggagattcacaatacgaactgacagggataaaataggccaactcctattcaaccactaataaagatgtcaccagcattaggtaatgaatataattagaaagaaattctgacaccatgatggacaacattatctgtgttatttcttaaaagcaaatacatagtgagttcaaatcaaaccataaacattcaaggctgaaggagattagaagcatattcgtcagccttcccaaaaggaaatgcatcgttatggtaaatggacattctattaagtggtaaattcagacatcttcactttcttaagtattttacatctctattacttctggagtgcatgatgcagaaaagggccaatgtaacaagtcataacattcaagaatactcaaaatgccttttttgaaaagcagcatccttttcagaggcttccatagtaatgctagtggtaaataattggcctgccaatgcaggagatgcaagagaagtagttttgatccctggtttttgaagaccctctggagaaggaaatggtatcccactccagtatgcttgcctggaaaatcccatggacagaggagcctggcgggctacagtccatgggatcacaaagagtcagacatgatttagttattaaataacaataattcctttttagagtattagtgatgatttcatatgtatctgcctcactctttctcagcatgactgtccacaactattcagcataaaagagtagtctatactttgaatgtatcagatcattaggcacattaatgaaaaatcaatgtaacgaccatttaatattaatactccttttcaaaagtgcgacatacaaagctcagtacatcacaaacaagctaatcaaccatttttccaaactgaaataaatcccatatgaaggcattacctgcaagagttaaacgttttattttagaggattctgccctctgcccaagcttctcatcatcaagttatgacaaagagaggaccagatattaggaggaagatttatgtaaacccatgaagattgctgaggttaccttgaaaggacgatgcatatctgggcgtttgtatcgaagataaatcagcccagcaactgccagcccaataaaaagccacctggcaaaactgaggaaattcagaagactgtagaggtctccagagaagagcattatcattgtcaaagggtgctgggggaaggaagagaaaaatcacactcagtgagttaaaagggaacaaacatgataataagcaatgatatcactatacaatattattgtattttccaaatgactatttttactgattaactaggatcgtgattaaaatctatactcaactaccctcctagctataacttactctttactcctacatacacacatacatggatgtgttattttttgttgtttttcattaagagaatgtgttttccaagagtaaaacacaggacactcaataactcaaaatttaaagatccagagggcagagatggttaataactaccaataaaaattaaaagtgtatccaatacaaaaatttacagaaagctctgtgaatggtgtctggcgctatgcacacacaggaaagacagccccttctaggtgactgtgtgatctcctgaatgcaaaacatgacctttccttcccccacactccctttccccatgtggctgccacgtatgaccctcaagaccacagaaaagaatgaagcgcagagatccgcacagcaagtctctccagctgcacataccaaggacggcatgactgatagcggaagcttaaagggaaaaaaccctctttaccaaataaatacattctgttcccaaagtgacgtaaacttccagatgccacacagagtaaacatacttgacaaagaaatttcaaggagacattttgaaacaaatgaaattcataggaaaaaaaaaaaaaaaaagatgtttcaatgcattctatggtggtcctggcagcagattccatcagagaaaaatgttacaaaacagtaaataaaaaggaatataacattgccaatgaggatttgaagacttgcacaccttacatagtcttcgctatcccacattttgcgaatacttttctctgcataaagaatcctacagctcaagtttaaatcgtggtgcttttattttttccctttaggctgccctcaaaagtctcacttttaagcacagaatcacttcagtgtctaggatttcattgactttttctataaacttgtatgtgtttcatcatatggggcctctggtgagacatctggatatttggggactgtagcttttagctccactttcagtaagtagaattaggactttttactcaatatcattttctgcgaaggctctaagtcattgacaaaagcccaggtaatcatttcccttccatttcacaaatttttacaaagttgaaagagaagtgatttggttattgctccaaagcatcaaatatgcatcagaactgataaagaatctgcctgcaatgcaagagaccccggttcccttcctgggttgggaagatcccctggagaagcgataggctacccactccagtgttcttgggcttccctgatggctcatacggtaaagaatccgcctacaatgtgggagacctgggttcaatccctgggttgggaagatcccctggagaagggcatggaacccactcctgttttcttgcctggagaatccccatgaacagaggagcctggagggctatagtccatggggtcacaaagagttggacacaactgagcaactaagcacagcacagcatactagataaagggaagcaatggaaagcatcctgcctctctaattccaccatgatacaaagagagccaatttagagatgaatgagaacagaaagaaatcctccttactaacctgtcctttgaggctatatctagatacacatgttaatatgcattaccaaaacaataacagctggcagaggagtatgcttccggatgtgaatcatggagaggatttctggaaggtgaccctcccgggatgcaacatagaataacctgatgggagaaaaatgtataattgatcatttccaagggggaaaatccagaaatctaagagaaaacttgcaccttctttgcaccaaatggtgattacttaggttttgctttttaaagtagagtgcattatgagaaatcaaattttgatttttataaatatctgccaaaatatgattccttgaggagaaacaatagcaacatccgactcagtatagctgtgcccccatatacatagctggtggggaatttaggtctagattcctattattacctgtgtgctgtcaaacaacatacacacacacaccaaatattcatatttatctgattgggttttcatcatattaaatcaaaaggaatttctagatgaaacaaaacaaaagggatgcagatggtgggatgatgatttcttgtgtctattactttacttttttttcttgtcatcttttctttagagaaaccaaagattttattactagatataaaatgctgttgttatagacatacatccaaaaaaaaaaaaaaaaaccccaaaacaaaaaaccctcgatgcctggcttcagagtaggctatgagcagacaagcagtgccctctaatggacagagtaggacgtgctgcggaagatttcaatctcgcgtgtgactttaaaaacaacagatttggaggcactatttcttttcttcttaaacttatccttatcacatcccatctcaaaaacagaaatgcctttctagaaaggcttgaactcactcacctggagacagcaaacacaccaccattcatggagccaaagcaggagagggcaacaaagatcggaactgctaatgagaaatttcccaggagccgctcagaaaaggtctagtgaaaggcagaagcgagcaaattaatgctttgccagaaagtagaataaaatgaaacagtttaggccaaactcgctccatgactctgttcacctggtgatacgtgtgtgttttacaatccttcttttgggttagggtcagactaacctcttaggataataatgaagggcaggtagcctggcttgctacaaaactatggacagcggtctaaacaagcacctttcctctaccttcaaaaagcagtgatccatttatcaaatctatcaactatgatatctattgtctctgactctgggaagtaaaaaaaaaaaagctcagttcagaatttctccttttggagacagaaatccttctgtatgataccttctctttagtcgggaaagccacatgtttatagtgaagtacaaaggcagattgaggagtgttgcagatacttattccatataccaatcctagtgttatgacttagaagtgtgatgaaaaataagtgatgacttaatatgtgtatcatagaaaagaaccgttctgaaaatctttcgccccagaaaaatcacatcagctgcatctctgtttatcaagtcaatcccaccctctcaggtatctgccaattccttctgtagtttcctattaaaaggttagaataccaatacaagtctgaggaaatcaagtcatagaaaatataaaggagaaacgaagtttatgacatttccttttattctatggcatgtgcaagactgcaaattttcatgaaggatatattaaaaaaaaaaaaagatgtgggattctttacttgtccttgagcaactggcgctatgtaattaatggaccacattacgctcagggactaagtgctgccctttgtctagtaagatgagatgacgacctgacatcagaaagctctgtgcattcggttgtctggtagaagttacagcagtgggcaaagtctactttaatacagtgaactcgtacataggttcacgaaatgggataatttgttccctgtggatgttccctgcagatgattattatgaggtaatagtgactattttaaaaggaactgacatctagtggtggaaagttctttttttccacccttcactgttacaaggtcatgaatgagagctctcttactagctaagtttttataccagaaagtctgtgtcacagaagagcagtcccataacatgacctctggaagcaaaagatggtcttgaagtcaaataaattttggaaaatgctgtgaaattataagtatccacttctttaggagttaaaatacacattagcttctgtgatattctgagaagtacaataaaaatgacatctgtttaactttgaataactctatttccccaaattaataatatcctaggagctagtattcaaaaagatatatatactaggaaaaaaaaatgcatatggtctacttggaaattctaaagtgatgctttgggagaaagatttagcatttaaaaagtgtctaaacaggaaagagtacagaataaattacaatttgcatatccccaaaatgaattcatttaaattcagtaactgcccacctgtacttaaagacacattggaagaataatgccttctattcaatgtgtatgtgtggaaatgtgttttcaagctggcatatgtggacatattttacatgaaattaataaaacagaaatcgtataggattgtagttgtatcaacagctacagctgtagctatagctgtagtttagttaaatggaatatgctaaggtatgtcctaaatttttaaaatattcattatcattcagttcaaaaaaattactaaattaccaaaacactttccactggaggaaactactgtaaaactgcatcaattcattagcctaaattcaaactggcattagcccagcttagacttaccacggccactgcatttgaaagcatcagttcctcggcactgatggttgtgaagtaggccacgtttgttagcacgtagccaacagtgacaacggtcatggatatacatattgcaagggggatggttctgaaatgcacacaggagttgcttattagtcatctcttgttagccacttctctgagaccaaagaaaacagcaggctcattcaaagaaagaaaacggtatggataattacaggctctgttcagccgggtgaagtaccacatagtcctttgtaatttaataaggtccacgaggggagacactacatttgtcgtgtctactgctctgccccagaacacatgggtctgtcccattcttttactccatagatcttagagcagggtttcccacactcgagcatgcatctacctggagggtttgttaaaacacagattgctgagcccacctcaagaatttctgcttcaggaggatttgcatctgtaacaccttcctgggtgattctagtgctgctggccagggtaccacactttgagatccactggcctttcaaatgcctttcaaatacgacttcacttggcttgacaacctttctaaaactagtttccaaaaaggtcttttgcagtcagtgttttccccttcagtaattctccttaccatcaaattagtgtacagtattggaagcatgggaacaggatatatctacctttctaaatgatggcaataataattttgtacataacacaaaaagcctaaaagtgcttccaataatggttttgcactgccctgctgtgagttcaaaggaagctcaagatcatgagtatctattaaagccatagcacagataatcccatgaaattagaggtgacatgctgtgcagtacatatgaccgacagcactgacaccacgcagcatcatgaagtatccggcacaaatgcaatgttatgtcttcatttaatgcacttggaaagtcaggaagttactgaccctaataatttgattccatgttaccgatacacattacttgcttaacataatcacctcttcagactctttccggttcaagcaacttaaaccttcagctccctgcacaaaggctgatggggtttttttaaccatagaacttatcagccctcatggagccttaacgctgctggatgccactaatgaagacctccatataatttcttccaagatgaaaatacagttctgaaaacaggaaggaaaaaaaaggcacagcctgcctcactccgcaggctgggtgtgttgagcacacgaagtcccagctcattatgctgaattctctatcccctgttgagaacaggcaaacccagccagtcagcaactgccattcattatggtgcttggagcctgacacttccactgatccccaaagccttaagcctcaatggggaaacacactgacctctaaaatcctggcatcctaacaggaaaggagcagatgtcccccttccccagtatgaagagggtcctatggaatttgctgttcacaccataacactcattgctcattgtgattgataaatgctaagtgtaagcaaaggaaatcactgggccaatacaaaacagaggggtaaatggcatagggcaatttaaagatgaatcctgtttctttgggtgcttccctggtggcactagtggtgaagaacctgccttccaacacaggagatataagagatatgggtttgatcctagggtggggaagatcccctggaggagggcatggcaacccactccagtaatcttgcctggagaatcccatgtaagaggagcctggcaggctacagtccctggggtcgccaagagctggacacaactgaagtgacttagcacacaaggatgcctgtttctttgaaagagaggaggcagatcaatgcaaaggcggaagcagctgagcaagaaggtgaataggcagcttttcaaccactcgctgtattcctttaaatttgaatccctaagcttctataatatcccaaatggggttctgagttctttctgtggaggagggaagcagagagggagagactctctggagattcctcgcaagaggcttaagaaatgcgaaggctctgctaataaaaagtgaaatgatttattgttcagtgcagtgaaggcacctaacctgtccaggagtgggagtactgtcagtcacatgaggctgccacagagcagaaagaggtgagtctgaaatttgatggtggctctcccagcagagacaggacttccctggtggctcagagggtaaagcgcctgcctacaatgcgggagacctgggttcaatccctgggtcaggaagatcttctggagaaggaaatggcaacccactccagtgttcttgcctggaaaatcccatggatggaggagcctggtaagcttctacagtccatggggtcgcaaagagtcagacacggctgagccaattcactctcactcccagcagagaacctagcctcccaaggcaacttccctgtttcctgcccaaagattaccatttttctgaggggagatttctaaactgactccagcagaagggatcttaaaaaaaaaaccctgaagtttccaagttagtttccctttcttttttttccttcctcaacttgtcaataacaaaaacaacagcagcaacagtgctatgtaccccctactttacatatttgtctcattttatccttgggaaattctgtgatttaggagcaccatcaccattttatatatgagcaaatgaagtcttagttaagaactgttcaggatacacagctgataagtagaacctcagaattcagccacagatttagcctaccttgaagtcaaagcacttaaaactactaaagaatactctttctcatggatgtgggtcttcaaactcaattttcagagaaatcataactactgaatatgtataatgttcattggaaagctctcatcatggctgtattcttcatgtattcactgaaaatgcagtttcatgtagtatgctgctgctgctgctgctgctaagtcgcttcagttgtgtctgactctaggaaaagacttattccaggattttcataaattatgaaacattatagttcttaagagctatacttcagtgtgaactataatgtcaaggaaatgttttcaaaagtctcaatatttaggaaatactggttcctccttaatttaaaaacaacaaaagctcactaaataaacttccctagacaactcttaaagaaaaggaggaaaagtaagcatacacatcagataatttgaaatagattattaacagttttactatcagccaaatacactgtatagataccagagggggaaaaaaatctaaggagtttaaactataggataaaagaggaaaagggtctaaccttgcagcaattcacagtaagcccagtaattcctcttgaggtaaaattaaaccataagaattggagaggatgaggccagatagccagtggcttctgtccttaaggttccatttcactttcacaaagggaaggagaggtggttgtggctgccttggcataaacagcgatcatttaccaaggagtaacagttcatttgttcagaagggcttggcaccatgtgcgtaactcctggatttcaagcagcaaagcctaagagccactggatgagctgataaaagctcttaggccatgcagaggcaatctttctggaggctttagatgcagagggcagataagcaccgttagtacccaagattaaggcaaatggcatatgataacaaaaggaatcaagggaactggtaggccactgatatttcaaagcccctgtgttactgtgaggtatgcaccaatagtaaatgcaacagaagcattgtctttaagctgaataaaaaggatttgcacctatgacttatactttctcaaatgtttgtgcatttttttaatgattagcaagatactaattattagaaagatagtactgggaaaagagacttaatccttaagagctttttgtcatatctatctatctatatacttggcttcccaggtatggcagtggtaaagaatctgcctgccaatgcaggagatagggctttgatccctggatcaggaagataccctgaggaagatattgcaacccactccagtattcttgcctggagattcctatggactgggagcctggtgggctacagtccatggggttgcaaagagtcagacaagacttagaaactaaataacaacaataaacaacagactatatacacagatcgacagacagatggatatagtcttttcaattatgtattaatgggaagaattaagtgagaatctgatatttttattaattgaaaataatctccaattaaaaggtcttggatagtcttttgttgtaggcttattttaaattggcatctgtaaccagtctatgtaacacatggataaatgtttattttatcggaaattattaaatggaggtctctggaacatctgcttagaagcactctcattctagaggtagacttcctcagaaatttaaataatcccaataggaatggcaggtagattatatttgtataatctacaaagtgccggaaaataaattttatctccaaacacacacatggcatttcatatcctttgtgaaataaaatagaatatgaacaaatgacaaaatctaaaactcactgaaacaggaggcaattttcaaataattttcccttgtttgtattgtcaaacaagggaaccaagcctcagagaggttatgcgacttgacaggccaaggttacaaaagtactaagcgcgagagctggatcttgaaccttgatcttccaaagctaagttccacattcatggaatttatctcatccaggataacatgtctgctttgtgccttcctgaactctaggtacaaagttcctaggattcttacatgctgacaaacacatactccatttataatacaaagatcagaaggctgatatcttctgatgttaccatgtgacacattttaagccaagtatattttactctgcacttaatcatcacaaatgctgcagcatgggatgcattttcaatacactttgcatctatatgattgagcatcaaaaatgatcattgtttccagcttcatactggctaaaaagactcctgccatgcaaacagacttaacaaatctagcttgattcttcagagctgagaaatctgaaggtcacaaagatttctgatattcagacatctgagtaattctgtaatcacttgaatttctggatatttctaaagctgttttataactggcataaaatcttccgagatttatctgaatgaaagtaagtttcatacattcctctgtggatgtacccactggggaccacaaaactcattggtccccaggcatctaaaattgttgagccatggaactgggcatgatgacagttctgctaaaacctactcttgtgtatactggaatcttctaagagaagtgcttgattctttacatttttttcatttaaaaatcattaatattttaatgcaagtatttggcattcaggaggaagcagggaggggaaaaaagagaaattaagaagggcaagaacattagcatacgcaaaatagatagccagtgggaagtcggggcttccccgatggctgggcgggtaaagaatcagtctgcaatccaggcaacacaggagacacaggttcgacccctgggtggagaagatcctctggagaaggaaatggcaacccacttcagtattcatgtctggaacatcccatggagagaggagcctggctacagtccatggggttacaaagagtcggccaggaccgagtagctaagcactttccacttagtgggaagcaaagtgttgctgcataacacagggagctcaacctggtgttgatgctctgtaacaacctatagggtgttgggtttgggggatggaagggaaactcaagagcgaagggacacacgcatacttagagctgattcacgttgttgtatggcagataccaacacagcattgtaaagcaattatcctccaattaaacatttagaaaataaaaataaataaagaagggcatgaaaacagcaaacttcttaatatgagatacaaataaaaaggaaaataggatttttcacagaattttaaaatttttagtaaagtgtttctgtataactgaaaaaaaagcatgaccgatgtcaatacaaaatattttatattataaacacgttttttgcttctgagtacttattttagaatcatacatatttcccattttctgtataaggaccctgagtggaccttgaaagcctttctctagatttgacccggaagtaactcaagcatgtcttactaatccctttttgatccaccaatttaattttgaagaattactcagtttattttattaccactgctgttaattttatctcattccaaatatgttacaaaccaaaagataaataatagtatatatcaaagaaaatctatatttttcattcatgcgattcttctttcatacatttttacataatttccttgattctctccagagatgccctctagaatggaaatgtagtatctggctatgtgattgctgatgtttccagcagggactgtatcacaaagaagagttcttggattgttttccagacttgaaacagatatattacagatgactggaatctgatgaattgctttatatgttttcggtgattttgtctcattgtcatttactgctgtcatatctctatcatacaccgtgagtgggaactggactattaataacactataagagaactgcacttgaggagacacagcaagtagttgggaagaaggtaagggttgtcactgaaaggagaaaatggagcaagaggaagaatatattcaataaacctatttctaaacattcttagaggtccacggttcacattctaccttaatgacaatttctgggccaaggctgaacacagtgatgtgacaagcagattgtcacataaaggtacacagtgatcccactgacttcaaggattaaacacctgccctctgcttcttaactgcactctggcaaagttatgcgtattttcactgagatgctgtaaatttcaataccactgatatctaatctaaatctcaccattttccattgtgcacagatgaagaactccataaacaaaaagaagacagagaaacctgtagggagatgtaagaaatgaacagaaacagattaaaagactgcaggctgaaggaggctcaaggaaaaatgtacacagatacatgaaagagagaaaagtgcagcaaaaccactcagaaaaatgaactaaagtggaaacttataattcaaaaacatagggtaataagcaatcagaagcattagtataagcattttcagccctaacaacacttgatttttttatcccactattagaataaattcatgcctaaataaaattattcagcaaaatgtaaatagcttgagagtaaattttcatttgcttgaatttcatatgaacaaaaaatttgcattgtctgcatctcaatttttctcattttctcaagatttagagtgtgtcttccagatgtattacagttatccatatttatcatggatgaatgtagagatattagtaggcaagtttgagtgcacaaaaatagaaacaaaattggtttttgataaaatgttagcaagtaaataaatcagaagataaaatattttaataacaataaattacatttcacactaatgttcaattcttatttttgttatattgtttttacagtatacttttaaaatattatattttccttgggattgtgtgtaaagtagtctaaggtgatgcaaaccatattttcactacaaccaagttcctgagattcagatgcataaagttaaagtgagagttgctccgtcatgtccgactccaggccaaaatactggagtgggtagcctttcccttctccaggggatcttcccaacccagggatcaaacccaggtctcctgcactgcaggcagattctttatcagctgagcaacaagggaaacccaagaatactggaatacatagcctatcccctctcctgtggatcttcccaacccagtaacctaactgggatctcctgcaatgcaggcggattctttaccaactgagctatcagggaaggctcagatacacatggctgagaaaatgaactactcatcacaattctattcttctttccaaagtatcagttattcctgagaagcagctacctagatagacatttcccagactctccagtatcccctaggtgggagtgtggctcattcatccatgttgattgatgtgactattgcaggccaaggtggttaagaagtaggctgccttgtccacccctgcaccccacccctacttccctagttgcagaggatctatacagaggtgaaactacaatgtggaagaaggaaactgggccacagaatcaatatgtgaaataaaatccaccctcagccagggacaccaacagtggactattacatgatttaaaaattaaacttttgattgtttaaagccactgaaaatctgtggctcatttgttaaagcagctagcattaccctaactaataagagaatgaaggacttcattttatcaagactttttgtagatctcagtgaattaatttatgagacaaaatgggtcctcattaattgttatcttacattttttgtttagtaagagactagtatatgacataaagtctttaaaataatgtcccacatgacgagaataaattaaaacatttgaaaaagttagaatagtaaaaattctattattattccaacttcccagaaacagcaaacatagaccccactgttcattcttttgaaatataatatcccctgcacttctgaaaattgctaccaatccaacaaagatcaaagtataattgtggttttttgaccaaggacacacaataagataatgcaatgtttaataaatatactcttacactaagaacaaggtgatgtaaaataaatatacccactttggcatagtaagtgggaattaagagtcaaaattccctcaggccattaacatgagtctcagaaggaactgataacatttctcctactataaacccataaatcaaattcagtcacacttctgaccagctgcatgataagaaatggaaggtaaacatggagacaatgaaccacgacaaatgaactactgcttctaccaccaaaaactgccttcaacatttgtgaccaacaatgacaagtctaattatttgcaatcattttactttgataactggctttccagttgggtgctctgggaatcagaatagaatgcagtcactggtaggactgggcttcccaggtggccctagtggtatagaattcagctaatgatgcaagagacctaagaaatgcaggtttgatccctcagttgggaatatcccttggaggagggtacagcaacccattccagtattcttgcctggagaatcccatgaacagaggagccccatagaatctcatagtgtctgctgctgctgctgctaagtcacatcagtcgtgtctgactctgtgtgaccccatagacggcagcccaccagactcctctgtccctgggattctccaggcaagaacactggagtaggttgccatttccttctccaaggcatgaaagtgaaaggtgaaagtgaagtcgcccagtcatgtccgactctttgagacaccatggactgtagcccaccaagctcctctgtccatgggattctccaggcaagagtactggagtggggtgccattgtcttctcccctcatagtgtcgggcactactaaagcaacttagcatacgtacatgcatagacatactaactaataggtaagtaggcgaacctattctcactcacttcaaccagatcagtcctctttcacttgttctatgtattgatacacaactgaagtgatccagtgcttttgaatagttttaacatcattcctccagatgctacaagtcaaatcatgtctttagataatttttggactcaatactggcttcctattaaaggtatatgacttggtttcataaatcgcctatctataaatgattgcatatatggatatatttgatcctaaaagttaaaataatttttcattgccacagatcctacatataggtaattaagggaaacattcttagcaggaaaggtataaagttgataggggaactaatagttatatcttgactttaatcaaaatggtaaattcacaaggccaggctccagagaacatgacacagcagcttaatggagccacagagaacggtgaagatgagaaggaaaagagctgagaggttaagcaccttgccagttaagagagataatatgtcattattaagaaagtgatgatgaagactcctgcgtggaacagttgacagctccctgcaaaggtcacaaaggcccgcagaatggcagaacctcctgcaagctcctctctgctctccttgggctttccctttaccaagacttgtattcccagtagaaatggatatcgtcatcttttatctttcagctcaaaagttaaaccttttgaaaaataagcttttgtgctttatcttgtatttgctaatgccttttcttagattgcaaggattcacaggcaagctctctccttagggatacactgtattacaaagtccaacacaacatgcaatggctgaggggccacctgcctcagaaagagaagtggttccctcattcacccaccctgtaatttcccttctcttacatagtctcccttagccctatcctcgaattcctataaccaagaaaagaaaaaaaaatgtacatataccatcgcaagtgtaaactttctttatgcaaaatcttttctctgaagttttgcctttgatgtttgttttaactttatttcatagattatgaaaaattctctggactccaatctgaaggctggttcaagtcatgttccagtcatttgcagggacctagaagatcattggacctctccaggcttaaacttcctccttaaagagggtgctgaattaatgaaatgcagtgtccatttcacttggaagaccatcatttgatcactttagcaaataaagctgatttgtaaagactgtttaacagaatcctttgaatactcagctgagcccttgctcgtgtaccagagcatcctaaggaaatgcctgcttttgccttgctctgtcatttaaagaaaaaaataggatactaactttcaaactcttcttctgggtcttgagattatgattctatcctcaatcaggaataccagcacattacaactacctatattgtatcagcctggctgaccattacagaaaagcatttaaaggctaagtggtctgtccattctccaaattctaagacagtgtttatagatcaggtcagacctctggatgccacattaaatggacaatattatcaaagacatttatatttcatgcctttagctttcatcaaaatgttattgcaaatatatttttaaaaattatatgaatcttaggaggacatttgtaataacattattaaggatattgtcatttgatctatcagagttgcttataaaaaaagttcattgatttcaccactgtttgtcaaatatcttatttatgctagacatttgttataagtaaagtgataaagatataaactacaataaaaaattcattctcttatggaatccaaaatttgaacaggataagacatggagcaccccatctcccatccttcacatgctgccccagtcagtcaggctcggattgaaatctctccttagagaagcctcctctccatttcagagtatgtcccacaacccctgtactcctcattccctactattttcaatgtgaggaaaacaaaacatttttaactccaactgtctttgcaaatatccttgtatatccacatttaccaaattcaacagagaaattaaggacattcacctgggcacatcaagtgtcctgcaagcatttgctctaaaactctagggcaaatattttcatgaggagctgtcaggactctgtcactctccaggataattctgctttttaggaactttgtaatcacatgtggaaagagttcctggactatttggcctctattatttatttgtttatttgctttttatcaacctgttatttttggacatgttctaaaagaaatagttcatttaatgaagagaagataactactttggatgtataatgagattaaaaaacttagaagtgtgtttataattgtgatggaaagactcaaaaaacttaacaaatttaaattacttccagcaaactaagctatcgttttgactcttccttttatattatttttcacagctatgagataaatctgtacaaacctcccaaaagaagactttaaaaaaataaaaaaatggaagcaatgaagaggaaaaaggaaaaaaatgttaagaggcagctttaacgaaaaaaggaatgtttattccacccaaacctcatgtgaattctaaattattaaatctctgcgaacacctgatttatgaacaggataacacagaccctagccaaaatcatttttaataaaaagcaggaggtttcctgaagttcatctcagatttaatatcaaacacagcagccacacatgaacgtttccccataaaacatgaacacagcatggcactgtcagctggcaaccaccggcagagaaatagcagtacaaacaaacagggtgtccaaaccgtggtagggatcagggctcgcaatctagaggtagcagccaatggaaagggatcacacactgaaaagatatcactgaggaagggaaaaggctcaaggaaggctcacttccaaatacgtgatagcagctgactcactcccggtcaaagcactgagcttcttgattgactattggattgagagagcaacatgattgtgtcttgagttgatttctatgcatacatttggaactgtaccaaacaagttggaaccaccacgagaaaataagtgctagaaatgacataattcaatactgcattctcattttataagaaaagtagcaagtgtctaagagatacattaaaaacatgattcgagtattttcccacagatgtttggttcaatgataagaaagatgtcaaaggaaaaacttattatttctaatatatgctgcttaggaattgtgtatactgccatgtttatactctgtgtggcaaaagattatttctcaggagtataaattgaactagttggatacatacataataattacattctttcatgtttaatcccttacacggttgattcaacaactacaagcatcataaagaaataacttgtgcatgcttccactgaaatttctattgatattctggcatttggcattttgtttaaaaatatttccgaacagagacaatcattacaaaaggtgctttatcagtcgagatcaggtgttaaaaaaagaaaggctaaaggggaaaagattaagactaatattattggatgataacttgtaggttattttaattagtcagcattttaaaaatctaatagaataaaaagaataagccaacaattaaccatagtacacagcaaaagaaatttctagactataaagaatttagtcatatatgcaatgtgtgcgtgcttagtcactcgtgttcaaccctttgcaaccctatggactgtcactcaccaggctcctctgtccatgggatgctccaggcaagaatactggagtgggttgccattttcttctctatgcatatatgcagaaaatatctttatatagtgcaagttatatcacgagataatattatcaaaataacttgaaaaaccatgagttttaaatttcaaagtactgcatggattctcttcctatgcacggaaagctaagaatagaaactgtcttaatacaaatctgttttaccaatgttgatttatttagagaagaagaatactgattaaggcctccttttcctctcaattaaaaaagcattaaaactttcaataataaaaatcacatattaatttattgatatatcaatagaggagataagtgaaacagaatagattaccttgaaatacaacctagtacatgacatagaagcttaatatataataagataactgtagtaaatgttataaactaagtaaatattataagctaaaggtaatatgactattcaagaaatgatgggatattggaatattggggaaaaatcaaggatagatggatacgttggatggatcacactcgaaatccattccagataagacaaaatgttcaatggaaaaaaatcaaggaaaacaaacaaaacatgagtgagatttaaatgatctaggatatagaaacagttatgatataaaagcaatatacagaaaaaattttttaatggttacatttaaatgtgctgttgctgcaagtcacgagtcatgtccaattctttgagaccccatggactgtagcccaccaggctcctctgtccatgggattctccaggcaagaatactggagtgggttaccgtttcctcttccaggggatcttccccaccctgggatctagccagcatctcctgtgtctcctgcactggcaggcaggttctttaccattagtgccagatgggaagccccacatttaaatgtaatagatatttaaacattttacttattagttactatatttaaattcaaagttctataagtggaatcataaagaaaaatttatttatatgaaaaatcaatgaaatgtttaccaaaaaaagggatataaagaatcagtgcccatgatatacaaagaattctgctgaatcatgactatccatgccgccaagtggcatccacacagctacctgacaaggaagaagtattaagcatcttgtgtgaaactggaacttaaaacaaggaggtttaatttttgcttttcatttaacaaagattttttataaataatgatacaatgctgattaagtgttcttaattatcactattgggaaaggaaattgatatatgtacccattttgggaagcaacttggtaatgcaaaaagaggccttttaaaatttcattgcctttgacatagtaaaaggctcttttatcaatcttcctaagaaaatcattgactatgtacaaagatttatatattaaatacataaaaacaacattattagactaagaaaaactgggaacattttcaatgcctaaaagaaagagtacacactgatgcacctacccagtaaaatattacaccaccattaaaaatggtattagattttaaagatctacgaaaataatgaaatgacttgaaacttaaaaagtgagatagatctagatgaaaaaaagagttaagcttgacaaacagcaaatctagatggcagagaagacttcacagtgtctccaaaccgctgcggatgcagcaatgaatgacacaggagaaactgccaatatataagcaacaagtaaatacatactaaaatgccaaggttatgaaaaaaaatgcctctctacatttatctctactaatacatgcatggcacagatacacacacaaatgggggaaaaacaaactatcaataacaacgagtacttacatttgatctaatcatgagatgatagctgactttaatttccttctacatattttttatattctaaaatgatcatctattatttaagataaaaggagggagactatagactgttattgaaaatactatgaaaatcataaagttttactttgacatttcctggtagggtacagaagatataaaaagaaattttctgttctatctcttgactaaatcatttgaccacaactacatatgagaatttgtgtcctagccagttaaaaatggaataaacgaggcgtgttaggagaattatgagaacgagatactgggtattttgtgttcctgggtgcccctggactagccatgtggagttggggaggccagattgagaggtgaggtcttctgggaggagttgctgtagaaatggcaactatgctccaataaaaattaattgaaaaaaagaaataacaacagtaggaactgaattagcactatcttttaaagaactggaaactgctgttctgtttagtcacagagttgcatcataactttgacagtttgaaagcacctacatattcaagcagaagctctctcccttgctgcagttcagagttcaggttgtggcttggcagaaaggcagtttcatagctcagacagagatatcaccaagtttaatttgcagctccatactgccccccatctttgccactggatccccctctccctggcaagatcacatggcattatgaggatcagtagctaaatacatacatttaaaacacatttaccctttcctctatcagactctgagcagctagaaaacagtcttttttagaatcatgacctctttttgctatctcattcatttcttttgtcatttcctggctcaaagaagaaaataaattaatcgtgtcttctatatcaatttctcttttgcctgcctcaggccagaataaaggaagtgagatttttactgtttgacaatatcaatgcagggaaattaaatattgtccctcagagagatttcagaactctttcaagaactagtctatctctaaagattagttagagaaaagtttttaaaaacctaaccatttccttataatggcctaatattttaatatttcctatgctgccatctatggggtcacacagagtcggacacgactgaagcgacttagcagcagcagcagcaatcatcaagtttctgttttgattttgtaattaaaagaccttcaataaacgacctggaacaggatgcttaattcaagtagcctgggacttctttcattaagtgtgtgaataacagctttagaaagtcgaatacaggtaaatgttaatatttttgaaaagcagttttgttcttttctcaaatgacatacaagtgattcctaatgattatattctccccgtaactgttaacaatttcaaggctacaatcttgccctatccatctctcttagatttgtattcaaccatcattgctgctgctgctgctgctaagtcgcttcagttgtgtctgactcttagcgaccccatggactgcagcccaccaggctcctccatccatgggagtttccaggcaagagtactggagtgtggtgcctttgccttctccaattcaaactcattacttttttagaaagaggatggaaagggatcaagactgaaactcctaaatacaagcaaattaatccaccaatccaacaattgacttcaactgttttatctttataaggaaagggttggaaaatttcgtggctactttccttctggttctaacatcccaagcctttgtggtttattttttcaaggtcaagtggtttattttttcaaggtcaagttcaatgtgttgttaattgtgacagtgagttagtctaataaactgggccacaacaatgccagtgtgtgaatggaagcaggtaaatgggtagagaactatttttacacagaggtaacatgaaaattgaaacaatatagccctttagagatattattatatgctttgcaatctatcgttgaatgaatgaccttgactgtacaatattggaaaagaagaaaaaatgacatcatgaaaggccaaaaagagaaacactttagatgaatgggacagcagatgcctataaaaagctcagtgtgataggtaacctaccaggttctggaaacaactcagtttaaaaaatcatgcattataatcattactctgtttcttattttatggtacatgattgtattataagctttactttttcacatattatgaaatattttattgttttgccatagacttaatttcataaattatcttccatataatatagtatatcttgccatataaaatatatggtgacttcgatggtaaagaatccacctgcaatgcaggagacctgggtttgatccctgggttggtaagatgtcctggagaagggaatggcaacccactccagtactcttgcctgggaatcccatggacacaggattctgggggctacaatccagagggttgcaaagagttggacacggctgagcaattaagcacagcacactatataaaatcactgcattctcaacaaatttgcattagtaatgattattgttaagcttttgatacttctatctgtcacatgtttataattttaagagaggaagaaagaatacctaaaagtggggtatgaaaacatggtacagtagtaaatagttgcgagaatcatctgatgtttaaaagtgatgagctagtctccggttcaggtttgggaatgcatgtacacccgtggtggattcatgtcaatgtatggcaaaaccaatacagaattgtaaagtaaaataaaaaataaataaattaaaaaaaaaaaagaaaaccaatgaaatactatatgtctttgaaaaacagcctccaatgccagagatcagaaaagcctaactctgagactgagataatttctgcttcccatggcaaagcacttaaaacaaaggtgtcttttaccttgtcataatggattgcaaacccaaaaattaagcattgcagaagaaaaaaaaatactgtgcccaagtttacaaatcctgatctgataacccttactggattacaaaagagttgatgacatgatgtttgatgataacaataaaaagtggcctatcattaaataagcatctactatgatcaaagtaatgtcagacacatcagtaaattgtttctgattgtcaccaaaactttgcaagataagcatatgaatacccactgaacagctgagtagaagaatgaatatacatttttgaaagtctttacaaaaaaacctctcatttcttaggtaggaagcataaaatcctaaataaatcaataattttaacctaattattgtaaatgtctaacacttaagataatagagcttatcatatatgtgatacaattagtaaacagatccagggttcatcatcacattttactgatcatcctaacaagtgtattaatatctatattcctcttggcacactccacatatcataagatcctatggttaaggtagtcccaatgagtcagttttcaaagcttgtatctcaccctagatcttcaggtctgataaattctcacattgggatgagggtggatgccaatctgtctttattacccccacatgtccacccaaacttcttaccattttctaaagtaactcaaacactttagtcctgtccaatctcccaatcattatgtgatccagaaactggtcacagttgacaatttttcttcctcagagaggtctcataaatttcatcccttggccatgctccccaaataccttctacttgttaaactaggtacttgcatgtcatctacaagaatcacagaacatactggcgttgacagaaaattcaagattcgctatgctacccttccttttttgcactgagacatcaaaggctcagagaagatagaggatgtggccacagacacaaaattaagtatctccagaaccagactcctcatcacttatttcaagttaagagctttttctacaccaatgtgaatctcactatgcctggcagtgctaactgcctcccagcccaactcttgtcctgtactgatactgctatttccttgcctccttacactcgtttcccctagaatccaaatgtttgaatgtcagattttttaaacccaccttatttaaatacttccaaactctgatacaggattttttttttcctttccaactattttttttaataaaaagataattattttacaatattgtgatttctatttgaccttaaaaatctaactaaggatttctggatttcatctatcttcctagtatgtgacaccttccccaataatatagacctgtgatgccgtagaaagcattggttcctatatattcagtaatctaaaaagagaatctttatattatagaactcgaagcaagtttaggcaatggtttctctgatttttttcaacctgaatatctaaatcattgtggctaaatgataacccgtttagtttgattttgataattctaatgcctaatcaaattatctttgtttcaacacataccaatagaaatttattctaaaatgaaccctactctcatttaatttagcttcacttgctcttttattggtatggagaataaatgacaccacttttttcattaaaaaagacaattctatattttttaggagagttatatgtagactatgctgattcactctttttctctaagtagtttgtttagtccatatctttaggcttgggaagtaatgatagaattttctgccacgtttttttccaccttgtctgactctagcaatggttcaattccaggacacaactaccttttctaagatacatatagctgcttcacttcaatgtacagcagaaacgaaaacaacattgtaaaactctaatgttgtaaattgtactccaataaaaataaatcatataaaagaagaatgaaatgtgatttcttcgactggaattctcttcaaactgtatatatgtcacaaaaagaaaatccactgaacatgccaccagggtcatcctacccaaacactgcttcatgtacaccaaaaacattcaacatacccccacccaccccatcccatagggctcctagatcaggtcctcaatttttgtaatggaggataaagctcacctgacgccagcacccacgtaataactaccactgtgtcttcttatccatcttcacaatcctttgctttagctaaaggagtccacacaatattccctaaaaccaccaaacagctccatggttctgtgcatgcccatcccctatcagagatgccttcacttctctattctagccttccaggttctgcccttctccaaacttcctctttcagagccaagttacatccttgaagtgaagtcattcagtcctgtccaactctttgcaaccccgtggactgtagcccgccaggctcctctgtccatgggattctccaagcaagaatactgaagtaggttgccatttccttctccaggggatcttcccaacccagggatcgaacccgggtcttctgcactgcaggcagatgctttatcctctgagccaccagggaagcatcaagcattacaccatcaccctgcacacccatgggtcacatctgttttgtctccaaggagaatagctggtatatgagaaaaactctgatggatggacctagagattataatactaagcaaagtaagacagaaagataaaaataccaggatatcgcttatatacaaaatctaaaatatgatacaaatgaatctacctatggaatagactcacagacataagaaacatatgtgcttgtcaagggggaagggggaggagaggggtgaattaagagtttgggactagtagatgcaaactattatatatagagtggataaacaacaaggtcctactgtatagcacagggaactatatacaattttctgtaataaaccataatgaaaagaatattaaaaagaattatatatatatatatgtatgtatagttatataacggaatcacttttgctgtataccagaaactaacacaacattgtaaatcaactatacttgaatctaaaaaaaagaaaagaaaagctctggagtcagagaaatagtccattattatatcaaacatggattataatcttagtcttttcacgtgctaattacatggccatgagatgttacttcacttctatgtgctttttcaattgaagaatggaaataagacacattatattgttaaaaatagtgaagtgttaccctgaagtaatccatctattacttagataacaagtattatattttcaataattcatttttaaattaggtgaacattcacacacacacacacacacacacaaacacctttcagggctaaactagcacttgtgttctcctattttgtgtcaactccatagtttcctttctggaaataaaaatttcagtacatgatgccagccactcagatcaagaacatgtttgtcagatttcataaaggagtttcttgggaagagagggaacctaaaaataggtgactgcactggaaatacaaatagtccatccattatggcagtagcattggccaatggaatgaagaggacagtatgggtgtggtatgcaaatatttggttcagatgggaaaaaaaaaaaacctgccaagaaattcattctgattaagatgcatgagcttattaccacctgagggaggttagaaactattaaataaaaagcagttctcatcatcttctgaacccttaactactaataattgggcactctgctgatggtgcagaacaacttttcaagctgattaataggtcatgtatgttgaaaaggtacctttgttcataaaacaattatgctaatcctctaattttttccaaagattatgaagtattctaatctttgaagaatataggtttgagttgcaaatggtgtttgtatattacttgtcaggctctttaacattttttattttcacatattttatccttacaaccccatgggaactgcaatatagggattaataccctctatttaaaggggggttaataaagattcagaagcaatttagaggtctgcccaaggtgaaacatctcattaagaggagacagcattagaatttttattccctgagcaaacgctattttcaaagattcagtaagtaaatatttttatagttcataaaactgaaggaaatgttgcttaactggaaagtctcaactttactgggttcattttagatgtttacattattggaatacaattttagcttacacctatacaaattcaaaagttgctcattttcctgagtagatcgataagccgagtcaatgtttgaatatgactaaaacaaaattgtcaaaattatttcagtgcatggcaagcacacagctagtggcctagatacatcttgtttcttcccatgacaaacaatatgggatatcaatctatttttgtgagaatcttaaacactgtttaacaaatgagtgaataccatgcagcagttcaagaactagatattagtgttctaagaagttcttacctagtatagtccagaatgtaagatttagttatgagccatcttttgagtacaatcattgattttcaaatccaggcatagagaagggtagcttatttgcataaagcagaatactgatgaatggagctcctggaatgttgaactcaaaagcaggagacaatctagtgaccaacattacttctaattgcagaaggtatttcctttcagataagaggattctaactctgtaacatctagtgtttgaggaattaaatgatatttgaaagtgttggtgacttagtcatgtccaactctgcgaccccatgcacaggtgcccccctggctcctctgtccatagaattcttcaggcaagaatactggagtgggttgtcatttcctactctagggggcatttctgatccgggggtcaaacctgggtctccctgcattgctggttaattctttactgtcttgagccaccagggaagtccccaatggacattcttgttgtacctaataaagtcaagacatttggtccaccctatttatgccagccagtcaacaatttatcaacgtttgaaatgcttatagaaattagcatgttgataatcaacagatgcaagtaaaaaatattggtagcccagttcaaaaaggctacagtaagtttcccaatgtttcttatatgaattatatctgtttaaagatatggaagagattcatatttggtaaagcattagattagacagcatgcaaagtccccctctagttctgaaattctttgattctattcatcacaccacttgcagtctcttgttttacatataattaatgggaacaaaaacatgaggtagaaccaccactattgctcctaaaacataagtttacggatttagactcaaaatataaacttcaaaaaagttaaaattcaaatttagagacaactaaaatgaaaggaccaaaaacagtcaaaagcattcaccttcagatttttgcctcataatagtgttagaatcctaaaaattaaaaaattttaaatatcttccataaagcacatgaaggattaatatctgtcttctttgattactgcttgataaaatattataacataatcctgtaatttctgcaccacttatttgacactttagccttacatgaacaaactgagtttgagccaaatgtactttttatgcatatgtgaagctgagaaatgcaaaaattgtgatcgcagggtacatcaacctcatgttccattagagagaaatttttagacagcacaaaggcaaggaagagtgacttggtgaccttgttctctgaacacagaatcatctcttctctgtgttatttgtacaaatcctgatcttttgtctgcctcagtggctcaaccagcataattatcctcctactctgaaaatagttaaaaatacatctgccaaactttttatatatatttccagaagaaatacataaagtagaatgatttcaatttaggtttcaattatttcaacaactgaagagaaatactgtcacatattaaaataatcctagcaatgctctattgccattaataaagagatgcctcactttgccaaagaaatctttgtaaacttgggtataaattcaattttacaaattagcttcattaggagacatcatgtctaaggagctcatgtggcaaagacttttacaaattaattctgcttaataatctgtatttttctagatacatttacctacaatgaggtaattttctgtgaaaattagtttacatatcttaagagcatataacatttgagtatttataaaagacaccttgggaatactctaagaatgaaaataatattattttttgatgtcaaaaagatcacaaaacaatattactataatctgtgcatataaacattatatgttattttctagcaactattacattagaaagttagaaagtatttaagaaaacttgtctttcatagaaaattacatcctttaaatgccaaaatgtaagataaaagatttcaagtcaacttttaatgttttatcaggaattttgcttcagcatatttggacaatttttaaattgctttgttttgctatgattttaatcatattaacagtttcatatgtcctataagcaataggcatataaaatcataaaatattattaacaaatgcctttactctggcttactacaaatcaataaggataaaaacatacatactaagaatttaagactgcatcatttgaactgaatgtaaataacatggttatggaccatttatgaaccactctgatcaatcccaggaccttaaaggtctttgggcatttttcccaaaccaaatttctcctcttctaaattatcattggtataaggtgtgatgactttcaggcatcaattaatacaaattgaaagcaggcaaagtattaattaaacttgacactctgattatttaaaccttctattaaagctgattaatcatagcatgttgatagcctgctcttcaataatgacagatgatatcaaggcttcctgacttccttcaagtctactgtttccagctcttcagaacagaaggaataaatgaagtgaaaagaacagtggaacaagtcgactaatctcagacccccaaggtcaaactaaagcaatccatttcttggctttcatcagcacaagacatgatttatccatctgaaagcaggattacaaacattatacatctcaatgatatgttctttgcaccatgtaactttttgaacaatgatagattgcacagttgccagaaaagtaatgtcacgaagcaaaaactcattatattttcaaattaaaacattttgatttttaagaacaactatacacattaacaattattactattgcacacttcatttggggagaaaatatcattttaaaattcagatatttcttgggactatatatcacctttatggtccaaactttggacatttgtgctcctcaaaatatgactcttactctaatatttattgtttgtggagccagttaccatgctataaataattactaaatgaaataattttatattactacaaaattttaatgataatcactgtgttttcacataaaaatatttaataactcctaaatgataactccttccatagagccaaagccacttttagagaagaaaatataaattataagaaacaccatggaaacattttttagcactacaaatataatcatataacaggaattttgccccaaattttagtattttataagctttaaagaataaatgagacttaagaaagaagtcatgcgctatttggattccgttattaagattccattaatttcccagtttctctctcatttgctacattaaggaactgttgtataagtcatagtcataagagcagttcaggaattattccatagagcaatgttagttaatttgaaagatttccactaaaattaaattatatgtaaagggtaactaattgcgatcatgaaatcttattctacgttctatatattttaaatcacatcactattttcactgatctaaattaatgatctctttttctatcaggtcacaattttagggaaattatgctgcctaggtgaagaggacagtaaaaagtattgtatctccagctgatgattcatttcaccagctgccagaatgctgcccattacagcacacccgtgactgattgggaagcatatttatcttggcacatcacaaaggagatggaataataattattctcccttgtaactaaaggtatttgggagctgtgtctccctacaaaataatacaaattacacagctggatgaagtctgcataattttaccatctgttctctatattcaaccatcaatatttcccaaagcagtctgtttgtttttttttttttaatatgagttttaaaagacttggattacctgtcaacatttcagaggattattatttttaaaattaatgcattgaatattggttgataaatacatattacaaattaatactttccattaggtactttccatagtactttttattaaggggattctgcagacttctcatattctgattctgagaaaataaatgtgttgtctgagttttacaaagaatcttccatgcaaaaaaggaatatctgagtacctaacataaaagaacagaaagaaattagaggtttctttcttcagctgaagtcttcgcagttactcatcatcctaagataaaaatctagggatctgtactctctcctaaaaagttccttagtttaagagcttaaaatgtaatttcaaattaaaaatattctaggaagagttaatgaaatttgcagaatcataatttgcaataaaagacaatatttcatccaatgtaaccagtgataacaaccttagtcttatgcaacaagtttcaatatggtatgaaataatctttttgtatttccttcaaaaacaccagcgaaaaagaattgcttaggatattgaaaactagaaaacattcttatgggagtaacattttaccttgttccaaaagtaagaatataaaaatattagcaacaaccaactgtgtggagattaaaaacaacagtcactaatctacattatttatacatatcagctcattatcataatccaataaggcacgtgctattattatgattactttttggtatgaggaaatctctttgcaacaacaatgatgatgatgaaaaatcactgaaccaatacatcaaagtttttagtatttgtatatatattgatcgtggacattatctatgtgtgaaactaaggctctttaagaaaaagaaaaggggagaaagagaatccttgactggcatctctctctgacagaatacatcaaaaattcattccaagctaataatggcataaatagtcttgaatatgcttaatatgcacaatagtattattgtacacactgaaaacaaaacctatgcctgaattattaaataacattaaaaaagaatatgaattatctccatgccactgaggtaccatgtcataaatgttatattatgggttcacatccaaacctatggtttgcccttgttttcagaagaaattgtctctgataatggattttagcaatgggcctctcaaaatgtttttagacttaaaagagacagccataaaccatagctatctctttaacacagagcaaattcaataaatactttacatgaaacctagtaagagaagtcttttctccacattgccacttacacactaattatttaaaaaacaacaacaaagcaacctatttatctctgcaatcaatagatttagagtcaaaatgtagtttatcatttcagagtaatgctagaaagaactagtttctggtaaatgtatgttctctgccacagttctagttataaagataaaaagattgctataaatttatgtttctcaataaaagaatcttttcatatgtttaaatttgcataaaggcttacatcagatagtatgaaatactgttttaacctcaactgctgggtcgggaagatcccctggagaagggcatggcaacccactccagtattcttgcctggagaatcccatggacagagaagcctgtcaggctacagtccatagggttgcagagtcagacataactaaactgacttagcatgcacacacgctggtttatgtgtccaaaattctgacagctctggtacttggccagatttaatcagcttccaatatacttgccgccagaactttagtctcccttcatttgaactgtcaacccttaggcatgttctctgaagtccaggttacttcatactgactcacctttgtacttgtttcgctttcttcaaagtctgtcccttcctctccctttatctccctttctctctcctttattacctaaggaacacctggggcttctctggtggctcagtggtaaagaagatgcctgccagtgcaggagacacgagttcaatccccaggtctggaagatctcctggagaaggcaatggcagcccactccagtatttttgcctggagaattccatggacagaggagcctggcgggctgcagtccatgaggtcacagaggagtcggacacaacttaacaacaacacaacaacacggatcaccagctcattgtttgagtctctgtataagcaacatctctctagataatatttcctcctttcatctctgtcagactgagaaaataatctactgtggtaccaatcacaccatgttacagttatttgattatatatttgactcaatggttagacaatagaatcttgaatgcaagtcctattcatcatgtaagatgatgcacaatagttggaacatggtagatatttaataaaagtcagatgaattaaatagcttcaaaattctgtctttatcttacactgtactacttaaattgtccttcttttgactttctggccatagattatgtgatttttcctgtataaagtccattttttatacaaatcataaaaattcatttttcaaagttctagattaaaaataattcatttatatatgttcattggaacatatataaactatcatgccacctaattataaaagggtgatttttatcacaacaaaaagtaaaagcagtcatccagctcctcaaatttacaagttcctatgatattccacagctatttacaggctttcataactacttgttcattaattacatcattctccttaattggatagttatgaaaaaaattcacatgaatactagaaacactcaagttttggagttcacaaattatggaacatttgtgagcagccaagagtccattttaagttgtatgtatatttttaagaaatgaattacctcaaatataaatctattcttttatgctttcaggtaatcagacaattcaaatattggctgtggaatacacaataaagttatttacatctaacttatgataaaatcaagtacatttttctgcacaagaccctgatgatgatgatgagaaagctaatgatgatgatgagaaagcccccgctgaattccttctttaggtctactttttaaccatgtaaccttacattttattccttataaatatttcacagtaaatataactacttacttttcaggattttctacttcttcagtaacaaagttgagataaaacctaaaaagacatacataagttacaaactattaataaactttatgatcaccatccaaagtttcacattttaaatatttataatcaaactcagatttataaaaactttataaacaaataacctaagatgaaattctccaacactaaatgctcctgcattttatttttctattaaacagtatttatggagttcttttctatttcttaatttttttatggaggtataacatgaacagcaaactgattagtaaatagtgaacaaaccttaatgtataaacatgtaaacagtaaatgtgtaaatatgtataatgtataaacagcaaacaaatctcaacatataatgataaatttttatttatttatacacctacacaaccaaaacaaagatcaaaacataaaacatttctagtaccctagaaggttccctcaaggccctttgcaatcatctctttcaccctcctataaaggcaactactattctgatttctatcactatagattttagttttgctcatctcaatacaatagactaataatatctgcttgtataactattatacaatatttattcctttgtgtctggttttgttttgttttgttttgttttgttttgctggactttatatctgttggttctcatccatgttattgtatttagcagcatttcaccattctttatttttgcttttcgttgtatgactgtaacaccaatagagtcaaccacttatgggtatttgaattatttctaatttatagctattatgaatatggataccataaaaatacgcttgtgcatgtccttttggggaccatgcaatcatttctcttgtgcatatactcagaatatgatcactgaatcataggttagatacatgcttattattaaattatttttttttttttactgtttttggattcctaattgcattccagcaatatatgagattattatgtgttagtcactggggaaataaaagtaggaaatctataatccctctccttaaagagctcattgttcatagaatggtccattgtggatataacaacacaggaggcaatgctagagcatgtccaggttaccaggagccaggggtgaggtcaaaaccagactggcaggtcatagaaagtttttgagaggaggcatcacccaagcagaggcttcaaaaatgcttacctattagccctggtgagatggcataaggacattccaagtggagtataacacacgcacacgtgagtgtggtaaagctctgtatgcacagagacatgagctacagataggtgtcctgcagtacaaagggtgcccaggagtgagaacagagtgaggacaagatggcctctggcttctgggaatctagatttcagtaggggtgacaggtcaatagaaacttgtagaagaatagaagtatgataataacatttctcagttttagggaattggcttactagatatgaacactgagacaaataggaaataaaaaatgggataaaagataataaattctcaattttcacttcttcctttcaattcagttttccaatatgcatcccatccaaaaatctcaagtcataaggcaactataagaacaacatgaggaaaatatgccttatgcataatagtaactatgaagttgccaatttttttgtatatttaggcagctaattttaggtccattgttagtcaataccctataggctgatactaaagaacataacattttgaatatttcccccaagacctgaacacttttgtcatctcttacatgacaagaagcattctagacacatgatatttaactttctagtcccatagggttgcaaatattaccctaaacttatggcccaagaaaaattcagattcctttccttcactttataactctccttatcccacccaggaatggtggctgcctcacatccttgacttctttttccagtctaaaaggactgctggagaccctttaaagcccttaaagttctctttcaaggttccaagatgcagcagacccctcagatatgcagacatagataaccaaattgtgacgatggggaaactaaggcatcatatgaatacagctagacatataaggacaaagacctttccatttcttcactgtagaggcttagaaaatgtccacaaagtgaaaaagtcatatttgcattgtactcttccattgtttttattattctttagaagataaaatagccattacataggtccacagaagcatgggtcgatcgggacaaatcctctatataatctaaaaccaagtgactagaatattagtccatcagcctctaatacacttaaagtatctcataacttcaaacaaagatgagaaaacctgtcttattccatctttattcacaagcaggcaactgatgctcatagttgtaaaaaaccaagacaacaggcccaaaatggagtcatttatgcttaatcctcgtgtcaccaaatcaaaacataattcagttaaagtttcacacctcccagaaatggaatccaaaaccagtcagttaggaattgccttacttaagtattctgcctggtagactcttgctatcccctaaatgaaaataactccgtaataaccaatctgttttttagcttagtataacttttttgttcccaccctttcagcctataaaaagctttctcttttgtacagctccctggagttcctttctatctgctagataggatgctgtcaattcatatcgattttttctcaaactcttaaaaattttaatatgattcaatttatattttaataaagttaaggtgtctgatattttaaggactatatgtgaagcagaaacatttgaatatctgagagaacagtagcaacaaaggtgatctaaaaggttagcagccaaggatattttttaatgactagaaagtaattttctaaaaatagaggttgtagttataccaggaaggcaagcaaaaatcaatacttatatctggaatatgcactctgagggatttgatgcgtttgttataagcccaaggcaatgggaagtacaagaagaaaatgaacaaaacaaaatccaaggaggaaaaaaaaactcacacaaaaaccacacacacacttagaaatatttccaggcctctcacctcaaaaatagccagttccttctaaacagttgttttagaaaccagtctttttccaacaatgttaaggaaagaaaggaaatatttatgaaaaaagaacccaatttcaaatattttccatagagaaaaggaaaggacttgggacatggtagcagggtgggaaggagaaagcttctaattttggtccaaacattcacatcctgtgggaaatatacctttatgctctcctagtctccagtcatgcatccatagcattctctatacatctactcaagttctctagagaatgttcacaagatctattgttccagtttttccatgattgcatataaaaggcactgcaaagctggcaatgcattctaatacccaactatgaattattttaaaaagaagcttattctttagattagatttgacacaatgctacaaaataatcccagcagatgctttagaagactaaatcccccgaggatacgatttaaaggggaaaaaaaaaaagaaaaaaccacaatgaaaaactatttcctatcacatgttaaaaaaaaaaaaaaaattcccaccaagcaatatttagctttggatcaggatatgggactgaaattggttgagttcccttgggccacagggagactgacatatttctctgaatgcagacgttggcaataatattaaagttgttctgacccaactctgtgacctggctgggttaatgatttctttcccccaatcatgtttctgtgaaggagttttcatcattctaaaaaggtccagcactcctcataaaccaacagcctgctctattcacatccaaggtctggccgtgcctttttcctattcaatgggtaggtggtgacttgctaaccgaacaaggcctcccagacaacaagggtcttgctgcttttacttaaaccgtgggtggttaagttctgaggataatgactgcttctgtctccttatttgcagtgccccctacacttttatttttgcatcaaacattgtcagggcaggagcacagggagtggaggctcatttacggtgccccacttataattccacaacacagtcttttaatgccatcatgaaagacaaagaaaggtcagagaggcaggatcatctttgtaaagtgactacataacccccgctttgggcactcttttagtttccatcttgttccatttatatccagatattaactttttcctctggaattccaaaccagcagactatttcttctaaacacagctccctttttctaagacaaatggccacatattaacaagcaggttatttctacctacctgcaaagcagcattcaggtagctgaacagctgttggaaatatacaattacttatctgccccatatataaatcacttttatcagatgacattcatttaaaatcctggccttaatgtcttatgactcaaccctctagaatataagaaaaccaagtttcctgttctttaaaataggacatggacacgaggattctatgaggaagagtataatataaacaaaggttcatgtaaaccccatttgccctgtaaacagagtattgaaataaatttcaatgtctaagatggagccactaatctccaagtcaaccctgggttctatacttatttccctattttacattcattttccatttttcttttctttgttccttactcttcatcccataaaagcttcctgtcttccacctcctttttaagttctctggactcttgtttataccaccaaaactgtctttttaaaatctttctaataagagtaacattttgggtttagtatcaacaaaactaaagattaagataataagataattcaaaatgaaaagactctttatacttggagaaagctatcagccctcaaaagcttacagaagtgaagatttgctctccataaagcaggtgacttgagtattcggcccttgtagcaggggagtgagttgggtagaagaatattttaagattctgtgggaacagatgcatggcactcacaggcaaaagaaacttcattcaatagaattaatcaaaactccctcatgaggatctccacatgccacattcctgactgaatactgccaagcccccaacacttggctctaactgaaagcttttgtcacctccccaacttgctctggcccctcctggtgaccctcccagggcttggccgctgccccagggcgctggagctctgatcaggctgaatagccatagaatagatgattccactgctacccctgtgggagcacaactcctttttaaatttcttttcttgctcagcaccacattgtgctttggacaaaaataaaaagacttcaaaaatactaagacgaacacacatacacaatggctatcaaaatattccaaaagtacacaaatattttatgctagaatcttcagagctacaattttctaagaacttcaaacattatgcttcagatgccatgctaaaatttttagttcctttactctcctaatcctcctctagtgctctgaatttccataattcagtgagattaatagggtaaaaattccatttattgaaaaatatatttttatattccatgcattagttagagagtaagatcctaaaaactgaagaaacaaaaagaaattgtgtttgtatttgagatgcatttacataattttaaactagtgtagtttgttgcttttttaggctcatagaacattctcactgcaactgtacaattaactccataaattattttttaaaagaaatattgctactaattacttcaaaactgaaatttaattttactacaatcattttgatgtttaaataatggcatttctagtggcatttcttgcaataatcacctcaactgaatcttactagatcaataaaatttaattagaaaaaattcctactcataaccatggttattgttattcaagttcctaaacaaagcaagacataaatacaaagctttaatgcttcaaccaaaatgtcatcacattttgacatggatccatcacggaaatgtacctatggcactgtggttttattcatcttttctgcattttttgttttcaaatgttgaagaaattttaaggaatttataaagtcctttaaaatgtagcagattatccagtacatctgattttgctctcccatttactccttcttgcctttagagtaccattttacctcctgggaagaggttacttatttctatatctgaattctttctttctcataggaaggcggaaaaaaaaatcaactaatcactatttgcgtagaccttggagcttcagcttggaaggctttttgacaaagtactattctttagcggcttttggcactattatgcctttactcatccatacttataaatgacttgtattggttctcaagacccagcatttgtttattttttacattatcaggttaaatttacattatcaggttaaatctagtgcctgccttgactggaaacctcagtgatgtttgtgttaagttgtatacacagtgactgggctggtgaaggaagccacattaccttcctctcttcaagtacagcatatcatggtgaatcatggctgttcacaattacctagcacctcacttggcacttgaagtacttgaaggaattaatgaatcatccaatcaccagttgatagggatatcaacttaccagccagcatatgcatacattccataataaaaggccaatggcaatcccataatacttgcatctcttcctgaaaaggcatctttaaaatactgtgtttgccctgaaatatgaatagaaagattaaggacttttcaaacagctggttattattcattctttaaccataaacatgaaaaggggaagaagggggcttggggatggactatacagtttcaggtctagatttcttactctctgctcatttccaactttatctattaatgctgcatccattatagagaaggaatcccaaacatatgctgattgctactaacactacttcacatttattttttttttaatttttgtgattagttgtcacatctattactgtaaagacaaataggcaattgttttaaaccatgtaatcataaaataccatttaagaagaagcttttgttgttgttattcagtcactaagtcatgtctgaccttctgcaatcccatggactgcagcatgtggctcctctgtccttcactatatccctgagtttgctcagattcatgtccactgagtcagtggtactatctaaccatctcatcctctgctgcccccttctccttttgccatcagtctttcccagcatcagggtcttttccagtgattcagcttttttcatcatgtagccaaacactacttcacatttattttaataaaatcatggcaaagaagaaaacaacatttcaaaaacagtcccttgctttagcatgcctctactcttaacagtttcaccatgaaaaaatactaaaggatcacctgtaagttatagtgtttaggagtgtgatataattctcaacagcgatgataagacagtgcttgggaagaattattcaagcgtctatcttcaatgaggaggtggcatgaaaccccagaaccaccttctcacatcatttaacttgctttttttgctttctccctatagttcattagataccaagaggggctgcaaaatgctgtgaaacaaatctgcttagtacttccaagcttgttttataaaggaaaacttattggagcacagttgggcttacttatttatctagataccatcagttcagttcagttcagttgctcagtcgtgtccaactctttgtgaccccatgaaccgcagcatgccaggcctccctgtccatcaccaactcccggagtccactcaaacccatgtccattgtgtcggtgatgccatccaatcatcccatcttgttgtccccttctcctcctgccctcaatctttcccagcatcagggtcttttcaaatgagtcagctctttgcatcaggtggccaaagtattggagtttcagctttaacatcagtccttccaatgaacacccaggactggtctcttttaggatggactgattggatctccttgcagtccaagggactcttaagagtcttctccaacaccacaattcagaagcatcaatttttctgcactcagccttctttatagtccaactctcacatccatacatgaccactggaaaaatcatagccttgactagacagacttttgttggcaaagtgatgtctctacttttgaatatgctgtctagattggtcataattttccttccaaggagcaagcatcttttaatttcatgtctgcaatcaccatccacagtgattttaaagcccagaaaaataaattagcctctgtttccactgtttccccatctatttgccatgaagtgatgggaccggatgccatgataccatcagtctatggctaattttactctccaacaataggactgataattgttgcagagatcacacggcacacaaagttgaaaacatttactatctgtccaattacagagaaggtctgtggacccttacctagagaacagcactgtttccttctagaagcatggaaaagaaactatattgaactttaaataggtttaaacacattgttgcatcaacatgtagactgagtgcttttatgcatcacagttttctcctctttgtgatgggacttttcttctatatcttttggataattaaaaaatagaaattcagatttagtcagtcaatattcaaagtaaagcataatgagtttctgtttcccaaagaaaatggcaaatgagattatctaaatgggaaatatgactatttcaaaattgaccatcatgtaagtaaataaaaggggggggtggaagacagatggtgtacataaaactctctccacacttaaatctcagtttttgtttgcagtttccagacaacaacatatatatcaatacagtgtgtgagttttgaggccaaaaatggagaatattgtgttatctactaaatgactctctcaaaacatccaatacctaaatatatctcattttttttaaatgacactgtcaattgagaaatatctattttattaaaacatctctgtgtcctcatagaagaaaaacataaatcttggaacccagattaaaaacatctgctgtctattgctttatcatgatctgtggtctcctaggccttatgggacaacattgctaaaagtgcaatactgaataaccaataaaagatacaaaactttgtaaagacttaatcctgagcacaaagtgttacaaaagagagttgtttccaaatttcaggagtatttggctgcataacagagctctcaagaagatgaaagttattagattcaaaggaaagtttaacaaatcctcataagagaatatagaacatacaattattttctgaatctcattagatcaaaataaatgtacaatctgggtaagtaaaaattttctcctcttgaagttttgtactaatgtgaaacatatgtgataagttagagacaaagaaatatcactgttttatagtaatagagcaaatatacctgctatgaataatctccaaaatatttaacttactttaaatgtaagagaaaattcccaggtcatttctctgctaagtgagatatataaggaaagctggtcgcattaagcactgataatgaaactggggacagaccactgccttgtcccctgccacgtgtttgtggaagttttaggctcctaggcttccctgagttccaaagagcgattttaatcagagaagtgagaaaatgcagaaacaaaggaaagcagtcaagaaagattaaaagaataatagtttagctataaagcaaaattaaaattccttaattattcctcaggctttcctcgtagctcagttggtaaagaatctgcctgcaatgcagaagacccaggtttgatacctgggtcaggaaaatcccctggagaaggaaatggcaacccactccagtattcttgcctggagaatcccacagacagagaagcctggcaggctacagtccgtcgggtctcaagagttggacacgacttagcaactaaaaccaccatcaccaattgttccttagggctacagctgacatcctgagtcctatccttgagttgtttcccagacattaaagcctgtatcaggaggaagaagctaattgtaagatgaccacaatcacatagcttgcaaattggctggaacctaaggattgataatgttgacctctgtgacctcacctttatcatcaacctatcagagtattgtgcaggagcttatcaggtaccctgtgaccttctccctcaaactctctttaaaaagtctttcctaaaagctgccagagagtttagattttttttaacataaggtgcccattctccttgcttgactccctgcaacaaacactatgctgtccttcaccacaatttgatgtcagtagattggcattgctggtccttgggtaagcagacccaagcttgattcagcaacaataccataaatattaaaggatcattctattgtaagtgtcaaaaaaaaagctaaaagatatgtctgctctcaaggaatttgcaatacagtaacatttgggcaactacacctcacctcacctcaccaacatatataattaagtggtaaaaactgactacagtcttacatcaaaaagagaaaagaaaaaaaaaatctttgttttaaaggactgcatgtcattttttggaatctaaatgactcagtttctgaaatttccaaaaatgtaagaaattccttatagaaatataaagagttagcccagaaaaggaaagcagtaacaaagtaagttactttccctacatttctaatggatcagataaagtatgagaaggccagctctgtggagaccaacatgaattagaagagttcttgttttcccttcagtgtaagctatagtattgaagatcttcattgtgtttattttgagttggctgaggttgccgaatttgatgcaaacatttagccgggagagttctaagatgtcccactaggttttattaaacagacagcagtggttccctttccccaggtatagaatgacaaatctttccacctttgttatcgtttaatgcctctacattcagcaatgattttttgtttaattttggtatttcctttagccttgagtaatccttctcttgcaacttcatcaaatttctctataaactccttttcttggaacagacaacatcaatgtgaacatgaaaaactttacgtgccaaagttacacatcactcctttatcatttcttcttactttctaaattatttcctactactgtgcccattgttagttaaataactcactagacctccttctcatccaataatttcccctgaatccaagcaattgcctgtgccttcttacctagaacaattgaaactctaaatgacatcactctcaaccatctcaactctaaaaaggcaaatactcccagaaaatggtgttacatttctgtagaaatgcagattttacattaaaataatgtaacaataaaatacatttttacaactatttttattgtcaaatagcattttttttatgaatgctgtttccatatctgactctccttctgtcaaaattccattctcaaggtaaaaggaataattacaaaaaagtaaaacaatattttatcatttttcattattttccagatatctttttctctaatgtttaatatatccttgaactactttaaagtaaaaataagaagacacatttatctgtagttaaaactaacagcttattttttttccactttgtgttttcactacaaacagtttagaccaagagaaaattcactgatgccttattttgctgcttagcccaggcttaatcctcttgttgccaatcagctgtaaataccaactcaccccgcaatgttacaggctttcaaatcaattagatgacagtatagagtctaagttccatgagcagagagactaattaagggattctgctagtacaagtgaaagtcagtgttagaagagaccaaaagcagatacgtattttaaaaagcatttacttttcagtccatacctttaattagctgcatcactccagggactataattatcagaattgctgtaagcttgcaaaaggttaggaaaatctggatccgggcactccaactgacactcatgctatttaggaccatcaccacagctgcaaaaaaacagatatacgtgaagacgtcttaggtcctggctactcaaagtgccaaccatgaaccagaatattgccattcattacctggaagcatgttagaaatgcacaatctcagatgccaccccagacctaaggactacaaacatgcatttcaatcagatctctaggtgatttttatgcatcctgaagtttgagaaactggataaaatgtgcagacaatacaaagttacctctcgttctttgtatgggcttcccttatagctcagttggtaaagaatccatctgcaatgcaagagaccatggtttgattccttgtatatgttgataagagtgaacaaggattgtggtgccctaacaatcatataaaaatatcttctaagccaatcctgaggtcatcacacgcagattgttgaatgtgactctagcctgacacagtggacagctcttttcctccctcaatgtccgcatgcatagtgacctgccaacttgggatcacattaaagaagggacaaagttgggatcacactcaagaagggacaatgtgtggaaaagtgggctgggagtttattctgctttcagaattagccttagccagcactttttgtattttctctccactttccaatcagcatagtaaggagtgactttcaacttaccctaaatgtacaggtttccaagatatgttttggaacttgaaaaaatgttttgaatgataaatccaaaagtgtttccagagtaggatgcacacagggtctgaagccagcataattactttttcttggtgatgctatctacaatgtcctcagcaactagccactcaccccagacggtggaccatgagaatcttgagaacagaacaagcatcattcatctctgtcttgctagtatccagcttcatccatggcccaggaagatcattaacacagttttgttgaataaatgaatgtgctggatcctcagtttttaaaacaaaatctgtaataccttcagccaaaaaggcatgaaataaatggtggtactttcaggccctgcctcctatactattctaaaataaccgagttattctagacagcagatttcaactttatactctgtctaaaacctcacacttggtgttactcaccctctcctcccccctcccaacaaataagccacttcatacctgacatttgtagttattagctacaagctttatttttaaaaggtgtattttccctatacaaacaacaaaaatgaatgaaaatacttcttgggggattttaaaaaaaaacagaattcttacaattcaggttgcaataggaagctttccgtatgtacactaatgagtgatcttcaaagttctagttgcctgatacaatcactagctcatttcagaatttaagaattggtgcaaatgttttcaacacataatatacaatagcaaaaatattttaaataatctagccttctaaatgtaggctgattaaggtatgtcttttaaaggggttactatgcagccatttaaaatcatgacacagttaaacattacataaaagatggttcatgacatgttactgaccaatacagaaaattacagagagacaaatagatgctacattaacatataggaagacaggtagaagtcaatgctacaaacatagaaataaagaaaaggaaaaattctgaaggactatttaccaaaacattaagagaaggtatctatagatgatagaatatggaatgagttttaagtttaaaagtttatttttctacactttttaataatccttataatgaacacaaagcattaagtaaaaaaatcaaaaaaagcaattttcatctttgagaaaagctcaaagatgggaagagtaaggaaccatacaaagttaaaatagggggttactaacgaagaaatgtttcaaaggagacatgatgagaatgattagaaaggctgaagccctgaataagctatatggtaggctgagagaaatattctacctgtgtttgaagctggaaacatgaagaactagacagatccattgttaattgccaagtgcattattttatcagaaagataaaaagtaaaatgatttttctcgcccctgtaaaaagcacttatatactgaaaataatttaatgcaactctgcactcatcgtcatcaaccagtgattcttgtcctttttctatgcaaatggctctgtgataaatgaatcatcatatgaaagggattgtttttttagttaaggagattcagcattggtctgaaaataattggactcatgttcccaccaacacaaaagagcactgttttcttttaagcagagctcccaaaaacccaaacaccatttctgagagtactccacagtagaaaagggctattgtaaagagaggaagggaaaagaggaggaaggaagaagaaaaaaaaaggaatagagagagggaggaaggaaggaaaagaaggagggggaagggggagggaaaagagaggcattctcatattagaacctctatgtatttgggaagaggaaagaaggtttgttactttcataaagagtgttagaattcaatgcctattgaaatagaaaacaaaagtgagtgctgggaatttaatattttgtaaagttttcttagaaaaatggaagacaaaaatcaaacaaatattatgaattgataatctcaccttgctttcctctcaggcagctgaaatcaaaattctggttaagcctgatttctctcaaaaggttgctcaaaaccctgctttatctgagcatccagacattgccctcattactccatatgccaaattccggctgagacttacctctatgaccctgaagagatacagcttaacaagcaatgaggcagccagtacagagggactgtggaggtcctcaggtggcgagaactgctgtttcctcatgtgtctttacagagaagtctaagtccatgtatgttgcttatccaacaatgttgaaaagggatttgggattcactaaatgctaagagctttcagagtttctgaaacaaatagtatctactctggtttttacacactatctatttacactgtaatcattaaagaaatctgagcaagctttcatcctagctttacttcctttgaataataattgctaatttcatgcattaaaaattacctgtattgatttgatcttattattattttttgctgaacttaaatgttaccaaaatgaaaatagagagacatatagcttttatttacttattaatggtgctggtcggttcctaagaactgaaatgcagcaatgaaagttataggtataaactctggcaatcagaaatacataaggaagggagctgtgtttgaagaggatgtttagaggggtgttaaaaactgatacagtgatttaaggactagcaagcatttctttctgtacttcagtaattcaaatttgtcttttgttttgtagagggaggttgctaagtctggatatattgttttgttttgttttttttcccaggttcaggttctccctggcttctggctgctttgtgctaagctggtaaaatatatggacactgtacggatgcatcatggtgagctgaagtgaactgtcccactgttctttgtagcagctgcctgggttgcccccatttttctgttagcatttgtttcctggacggattcattgcacagaagctatgtagcaataaatacctttttgaaggagagaggctatatctaggatctcactactgggaataaaaatggtaagcattaaataaatgtacactattatatgacacatattgtgcgaagaccttacatgaatattatttaatcctcatatctctatgacttggttaccatcatcagcattatttttcagatgaacagctgagaacccggatattacttaacttgtccatgttcacagaggtaaaggtgaagataagatggaagccaagtaagctgactccagagtccacaattttaccagcagttcacaggtaacaatgaggaagcaggtcaaaagacacatatgatttcactagttctctcaaacatctgatgctcttcctctctgctaaggatcatgtttatcttggctgggatttcaagacacttgattcctcattttatttctcatccttctgaagggttgattgttgttttgaagtccttgtatatttcaatactacatatctctacctaagaattgattgtcttggtatttagttatggtagaagaggagtaaagatagtccaatttggggtttaaacagagccactttatgtgcaaaatttgaaaagctagcacagaactcaccctagactttctttcatgtaatttaatgatgctagtagaatacagtttgaaaaaatacagtaatgcatttatagaaatggctctctttctcacatcataatcacaagtgttattttgcttactttctccaattattcccataggttgtcagaagaagctaatgttctttattcacctatgtaaattaaataagaaaactgagactcagggaggttgttagggatgtgtctgagataagagcccacatctgacataaggaacttttattagaatattctgccactcaagtgtatacttaaacagggtctggtttcaggagaccagaaccgaaaactaaatgtcattttaactcttgaacatacttcagtatttattgaagcttcgaggagagtgaaaattcatgaagttccatagaaagtaaagggagcaatggccctttacctagggacactgggctagaggagagaagacaaaggtgaatatataagatttccctactcagcttccacatgcctgacatgcttgccagaatggacaagacttagagtaagcaaaacccttttttctttaaagacttatttttttttaatgtggaccatctgtaaagtctttactgaatttgttacgatattgcttctgtttcgggtttcagttttttggttgctaggcatgtgggatctagtaccacgcaaaggatggaacctgcatgctctgcactggaaggcagaagtcttaaccactggcccaccagggaaggactccaaaacttttcacctttactaatttgagagaaatgaagttgaatactttcaaaagaggagaggagtaaacccaaccagtctccttcattcatgggattttccaggcaagagtactggggcaagagcacacttccttctctacgggaccttcccaacccaaggatcgaacccaggtctctcacactgcagacagatgctttactgtttgagccaccagggaagccccagagggggtatttagtatttagcaatgccacactcccaccccactctcacttctcaagtgatcagttaacatttcacaaaccctgaaattccttttcgtctatgatttgaccataacaatatccttcaagtttgttcttcttctacacttgaactagagaattcaaactaccacaaattgcttccatccctgtaggagaacatagggaagcaattcatgcaattaaactccgttttctacatctcactaacctttcacccccagcaggcagaaaatcacctatctcctcgctttgaaccattcagaatgtgagatttgcccccaggtaaatgtctccttttctatctccatctccacctgctgttgctttaaagctaaattctcaaagacagtttgactttcccaattaggccattgatttatatcatctgccaccgagttgcaggaatatctagtttcatctttcagtgcttctgatcctaggaacaaatttcctcagaaactcaagcttgcatcaaaatctgtaaattaatgttataactaatggtaaaaatggaagaacatgactaagttcatgcaagatttactcaggctctttgttagttacaccatcaccaaactatactacagcttttgtaaactgcaacatatttaatcattcttacctataactgctttaaatttttgatttgaacagtttccatttactcctctaaaatacagttttccctttaaaatgtttaacagaactgggacaaataaaggagctatctagatttaccaaaatggtaatgtgttgtcattatctaattcattccaagtccttctcaatccaagctgtggatttgtaaatgtttacataatatataatgaaagtttgctgttacagcttttaatcagtaacctctgattggcaatttacagagctctcaaaatgctacccgtgtttctcttttcaaatataataattgtgatatgattctgcctcagtcagttgagaaacaagaatgaaatgagtacaacagtggctactgatccagtccctaagtggaacactagatttatcaagaactttctatgggcaaggcactctgctgaagtcttaaaaatctaacttcattcttccagagccattcaagataaattatcatctcacaggtaatttaccaataaataaagctgatgcttaatgagatttaatatttagccccaaatcacataactgaaaatcccgactctaaatttcaattccaggttgtttgcctccacagcctgagctataaccacaatgctaaaatggttcaaaaaattaaaacttcatggtgttagatctgaacaaaatctatttcatttacctccatttcctgctgcttgagaaacgtgaagatgtgtaattctttaacacctaggcattccattagcttctctactagagaagaatgctcatatctattctcattaaaatcagtcatgaacaaatatttgttgagcacaaacaacatactaggggctatgtgaagggctggaaacagcagttagttaaggacctggtcttatggaacttgatgagatgtgttcccacaagagtataaaaagctaccatttgtaatttcactctttaaacttttctagcattactcaaaacactttatatacacccttttaatatcatttaatcttcaaagacaccttatgagactggacatgatttataaataagaacaccgaggtgcagaaagaagtgacttgaccccaagtctcacagccgtagtgtgtgtaaagggtaagatcaatcgagaacaccattaccactccagaacttagacatatatcattcaagtgtttttcttggtcttccctcaaatattccacatcacaattattacatttcatgacttaagggaggaatccaggatgaacctacttaagtgcagcaatatggagccagtactagagatgttttatgtgtaactcctccctctttcctactaatcactcagctctctactgtgaaatgttcacctttttcttacaacaggaagttggagtcatactgagcctcacatcacttacttcatgttgcgcatgttcccctttttttacttcctttttttttaaaattctaatatctgtgcccaacgatgaaaatgagcaacttcctaatttggaaatgataaagaaaactcctatttgagaaatgctgctgctgctgctgttactaaatcgcttcagttgggtccgactctgtgtgaccccatagacggcagcccaccaggctcccctgtccctgggattctccaggcaagaacactggagtgggttgccattgccttctccgttgagaaatgctactaataatcaaatgttggaagaagagtctagtgaccatcaacggacagctaaaatccgaacacagagtggcaggtggtaacactagaaaattcatggacacaacatatacacccaacacacacacaccatttcatgggggtaagggccttatacttctacatgttattgctaaggaaggatattttataattcagaacacccatttaaaaattgggttttcacttgtaaaagtctctttttatgcacaatcaagttactgttttactaacaaggttgttttgtttgcctgttttaaaagattagccattacatctattgacccaatacaaaataggcttataatgttatatcaggcatcactccaaacccttattcttttctttattttccaacacaaatctggcgagcagttgtaagcaagaacaccaccatgtgaggagtagtaccaccatgcaaaaagtctccagaaattttgtctccaatcacttttgtaggggctgttttctttttcatatttatacctatgatactcacttatgcccacagctgtaatgagcttgatcgcaagttcaggaatttcacagtgaataaaaaatggttccagaatatagcgtccaaatgccagagatatcacagcagtggctgcagggctagaagaaacgcatatttaggttaaccacagggaaaaaatagcactttcactaactttttctaccttgaggtactgttactcagcatatggaacatattaaatagagaagtctatgatttttcagaactctatatttgattcagttcagtcactcagccatgtctgactctttgtgaccccacggactgcagcacgccaggcttccctgtccatcaccacctcctggagcctcctcaaactcatgtccatcgcatcagtgatgccatccaaccatctcatactctgtcgtccccttctcctccctctatcatccccttctcctccctctatcaatctttcccagcatcagggtcttttctaatgaattggttcttcacattaggtggccaaagcattggagtttcagcttcagcattctcttccaatgaatattcaggactgatttcctttaggatagacttggatctccttgcagtccaagggactctcaagagtcttctccaacaccacagttcaaaagcatcaattctttggcactcatctttctttatagtccaactctcacatctatacatgaccactggaaaaaccacagctttgacttgacagacctttgttgacaaagtaatgtctctgctttttaatatgctgtctaggtttgtcatagcttttcttcatggctgcagtcaccatctgcagtgattttggagcccagaaaaataaagtctgtcactgttttgtttccccatctatttgccatgaagtgatgggaccagatgccatgatcttagttttctgaaggttgagtttttagcctatatttgattaggtcatcacagatattccaaatgaaatactgtctgcaactttggtagctagtttttaaacttcacatctgcttgggaacaaggctgagtgctgtcagtttttcttcttcccacccatatttaacttttttcttaaaaatctagtttattacttgagatccaatagggctgggccatacaagaaatagtctcctttctcagaaagtcaacgattaaattccagcagaatagggatgagttaacagcacagtctaatgggttcagaaaaggaacacaaaactcaactttaaaaaattagtattaataagtgttcattgcaaatatatgcttacatgcttgacattgtattagtctagatttttccaaacagaaaaaccttgaaaagccaagtgattattcttaattacatagaaatatttaggtgaaaagtatgtgttgaaaaacaaaattagtcttgtaattttataaatagagaaaacatgaatgagataagaaaatgaaataagttcaggtatatagtaaaacaggtagcaaatgattctattttagcttttcaactttctgttagaaaatgacacaggcctttccagtttaaatatactgcatatgaatgcatgtttgttagatacacaggcaagtcaatggaattattaaatttcccatgccaagtcttccatttcagtttatcttccatctcatggttactcaacctccaggtctaacacctagattgtcaggaaaccaaccaccattatgtattccaaccctgacctgctggtattagaaaccaagatagatttatttatttttaattggaagataactgctttacaatattgtgttggtttctgccagcatcaataggcatacatatgtccccttcttcttgaacctccctcccagctcccacccaatcccaactcccctaggtagatacagagtaccagatttgacctccttgcatcatatagaaaattcccactggctatctattttatctgtgataatgtatatgtttcaaggctactctctcaaatcaccccactctcctcctcccccatgtccataagtctgttctttaggtctgcatctccactgctaccctgcaaataggtttatcagtaccatcttcctagaatccattcatatgtgtgaatatacaatatttgtttttctctttctgacttcactgtgtataacaggctctaggttcatccacctcactagaactgactcaaaagtgttgttttatagctgagcaacattccactgtacatatgtaccacatcttctttatccattcatctgtcaatggatatctaggttgcttccataccctggctatcataaacagtgctgtgataaatactggggtgcatgtgtctttttcaattatgatttcctcagtgtagatgtgcagtagtgagatttattaatttttttttccaagacaatctcctcctgaccacaagacaatttttcttattctccatcatttataaacttctgatgtgtaaattaaaatctaatcatgtcattttagtgctttcaaaacatagaatccacaaaaatccttcaatacaaggctccatctggtcaaaactttctcttcctcttcagtgtgcttcctcccactagaaggatctgaataccctttgctagagcccctgaaactcactgacagtttcttatacctcaggtcttagttcaatctttttcccaaggaagcttcttcagtcctctaattgcgttagatctcccagagtatactctcttatggaacttcatagcccccctttcacgtgtgtatcacagtagcaactttttattctcttacatgatgtcttgattgataattgtctccctcacttgaccgtgagcttcgtgagtatgactgtgtgcatatcaatcactatttcatcctcagtgtatggtaaagtgtctagtaaagtgtctgtcacacaacagaaaactaatgaatacatggtgaatgcatggattcaaatgaccccgatgtatgatttctttttacgatttgttacagattatttctgacaaaagtgacttaatctgaagtacaattttaatagtaaatatttaggtaccatgggtactttcaatggaagaggaatgttatatgactcaggtactttgtcacccctcaagtcattcattactctgagagaacaaccgagtaatgtgagtccatatcacaaagaaacatatgcatccattacaaaagcttctagaaaatatttaggtaattgcttccataaacacatacccggtgaagtagctatctaaggtaatatgattataagctacttgagaagaagaactgaggctcacttcactttagatctttttaacttgccatacatcactcagtagcatagtctgtggaatgaacagatgaatgaatgagcactgtgttggtgctactagtgcaaatggaatgatcaagtccatcataatgctgagcagttaaccaaagtatggctaaccaacacaattagccagtacatggctggagagggactccagctcagctgcatcaggccccaaagcccactattctgacaggccaccactctaaataagaattgtacttatttaactactgagtatattttattcaaactattagggttggcaaaaaaatctgttagggattttccatgccatcttaatggaaaaacctgaatgaacattttggccaacccaatataacttactgaaagattgaatatttactaaatttttcaactgctattcaaaaagaatttaatatatgacaatcagtgcatttaatatatgacaataagtagtataagagttacaaaaagtgagagacctggttttatatgcttgaaatgcttgcagttttaacatggaaacagagcacagattcctaaaatattcagtaagaatataagccagcatgttcaatgtcaaatgagaagcagagactgcattttttttttccagaagaattaagagaggaaagaaatactataaactagggtgaacaggaaattaactgtggaaaagatagaacttaagttgacctttgaagagtaatcttcatattatctgaaaagagtagaaggcacctcccaggcaaatcccagagtttagaaaaagaacaaaatacttctttatcattatttcataataataagttttaaataatgcaaaattgcttaaaatgagaacagacttaacaaagatgtaaatactattctaagctctttgctaccaaaaaaactcctaggactataaaaatcaagattagtgttaagtcaatacttattagctctgcatttaccacttagctctaaatgataggataagagctcacaggagctttcagctgtgtaagtctgataagtttacagtaagaacaagtttctttaattatttctgttaaattctgctgtcagaatgtgctagtcacatttcatggaagcagtttgctttaaggataatctgaagttctcacgtgacatcataagtttcccacaaaattggaggaaatttgctattcagagtgacttagcattatttggtttgattttaaaccacggcaatcaggaaggggaatgcattcttacaacaatataatcaaaaagctttttgcaactgtagttcactgatttgtttaacgtgaggatatgagtcactgtgacaagtgtgtgtgtttgttttggttttttttttttttttggtagaatataaaacttgatgacatactaagttgctaggaacagaagtttcctagtcacgaaaactgagtaaacttaagatggcttaatggtgtgatctacaagaaggaaaaccccagttcctaggagaatatttaattttgtcaaattacaatttataatcaaacaaaaggtctgatttatcatggtagattttgacaattcacattcttttaggtcagcatctttcctgaaaatgatttagagaatagttgaatattaacaacaagcagatgctttgaaagtttggcatggttagaaaactactgccagtggcaaaatggcactaaaaacattaattgagaaaggtatttcatcccagattttatgtcctgaaggagacatatttaccacatagtcatgcatatttctaattatttaaaaataatcaaagcgattcaaaaatgggataatgaatagatttatttttccttaatctttttttctgtctaggctcttaccgtattatgagcagttctacccagactcgcacaaaagctggtaatgggccaaagacttctagaatatatgtgtaatgaccaccagatttctttatactagttcccagttcagcataggacaaggctcctgtgaaataattgtgataaaaaggcacaagttaaaatattatcaagtcatccagcagtagaatggacacagcagtatttcatgagatgacactacttcctttggtttgaatgacaccctttttcaaattaaacaatactaatcaaattcctaagaacctccaaattccctttgtaacttcctcatgcttgaaatctcgttctttctgttcaaggtaattttacctgaaatggtaaagacaaacttctaaaacaatataatattattaagaattttgaatccacaatccatttttgaagaacataatttcacatcaagacaaagagttatatcaaattgacctcactatattgagcatccttttaataaatgatgtttttgtgacacatcaaaataaattaaattcctctcttctcctgaaaagtattgtctcaagattttggaaggcttcatttaatttatagggtatgttttgtttatcaacaaaattaatttgactcagatattctatttttaggaaagtttcttatggatgtatttcagagtatcattcctgggtgactgaaataaaagttttgaaaaagagatgctttaacatatttatgaacatggagataaaattatgaaccaatttttaacatttagcaataaaattcacaaagatttgagcagattatgtaatctccccaaacctgtttcataaggggattgtgtgtataagtatgaaaatgaatgtcaaggacagtaataggcctgacacacagaaagcacctcatgaaatacagctttacctactactgtgagcaacttattgtatatataatgaaaagtatatcttgacattatgtgaaaagttctacccatactgttaagtactcaaatgtaagacataatttctgcctgagctactctggagactaaaagcatgagaattattactaatcagtagagcttcaggtagaactgtccaacataagcataatttggatagtcagcaaaatcttagtgttgcttatcctatttccaaactagaactgtatcagagtcacctgggaacaattttttaattaaaataaaaaatacaaccactaaggccatcccctagacctactctctgatcaagagaagccagactcttcaacagaggaatcaaagaaaatctattatttttaaattagcacagctaattctaaagtaacttagtctacagatggatagttgggaatcactgatacagtttgtccacttaaaactaactataactacttgcagttcattctctattggaaaccaattgccatgttggtagactgtacaaaaaatcatccaatatcaaatgttattagaaaatgtcttaagaacctcagaatttatctccagagacttaatacctagacctatgtattctttggttaaactccaggatggttgccccaggtttaaattgagtgctgggaaagtgaaattttcatttgaaggtctcaagctccataaccatattagtcagatgaaaacagttcaaaataggatgtaagaacccatgtatttaacctggctttagacaaaattgtaaccacaatatacacattctatactcttagttccagagttttaagacaaagaattttttcccttatattttgctttgctttctgttaggaaggcactctgtcaaaagttcctaggagctcgtgaccaacgaaatgcaaacatggagaaatagattagtatagaagcatattccctgtgattagtaatcaaagaataccaactcaagtgtaaacttagctagtctcattagtttatttttaatcacttgagatgacacacttatgcagaagcatattttcttagtacaagtcaacatcactttagttaatgctcagagccacccattttatcatatctgaatagccttttatagtatacaaaaatggaatcacgtagtggaggctgcatgcacacaggatacaaaatccaggaaactggttgtggtttctcctattagacgatgatttattctgaatataccaagtgttggggaagattaaaggccgagggtacacaaaatcatttaagaagatcaataagtaggtttctctttgtctataaatgtgtatgccacatcatatgaataccataaaccctttgtaaacacctaaatataattcctctgttgatatttctatactaagtttttatttcaacaagttttgtttaaaatactttcttcctaatcatgacaatttgagttctctagataaatgttcaaaccaatgcatgaaaaacattgccaagaccttcagaataaacaggttggtccatgtaggaccaagagttagtagtacttggtcctagagagttaggacaaagagttaaaacctttaaagagcagtatcttttggaataaaaaaagcactatttgccagagaagagcaaatatatcttagacattttccccatagtataaatacaatttagttttcttgaccattcaccagtttttaacacctttacagctaatccaagaagcattccagtcatatgcccacctcatgaggggacatttattatctctttattattaattatgacatcaataaaagagatctaggttttgaaaaaaagttaataatcacatttcttctaccagttctaccaattctgttgagactaactctgcagataggtggaccaatgacctgtgtctccgaagaccaagtgaactgtaaacgaagaaaacagagctgggcaaacagcaagctaatacccaattccaattttacaatttatattgcaaaaatttatgggtactggggagagatgaaaagtacaaaaaaatgtgaaatatgctcacacccttgcaataatccgttacaaaaggagctgaattatgtgccatcacacttcgatccacattcaaggacttttgaaagaagactaggaactgacaagcacatgaagttaaaaaaaataaaagggaaaagactgccattcatttgttttgccaataaaaagtcagtaaaacttctgctgagaactcagttctgtgtcgaaacaggccacactgggtttcacttcacaggtgtttcattcagcttgccagctgccaagacaccccaaacataccttcactgagcacaagtgccgggtacagaaaattcatctgtattttactgggtcatcaaagttagcatcaacattcgatgccaaagggaaaagtcagcacatagagcgccttggtcaggaaaagagagcatagacttaggatgcaatttcagggaactcagcattctgccaacagtggacagtgtgcttagatagttcgcatacctcccctaaaatcagaaaatctagggtagcctttgccattcattcactcctttgaaatctccctctgctctcccagacagcacagtgctcagccccacagacacacccccagagaagcaggaacactcaccaaacagtgacagaaccccacagaccgtccagaccaccagggacaagcccacgctgcctgtgttctggagcacgcccttaggagagatgaagattcctgctccgatgatggtgccaatgatgatggagattcctctcaacagagtgattttcttcttcagcacaactttctcctgcccaggtggctccttgccgcccacggcaggcagcctcccattaacactgccctgcaggtaagccccattggagatggtggacaccacaggctttctgaccatggtagtgacccgcagggggaaaaggaaatgaaaaaaaaaaaattgttttttaattccaaactttcaactgtggtgtctcttggggtgactgaccgatctaatctctttcctttttgctttcagattcgcagtgattttgtgctcccaggtaaaagagctaaggtgtattttcaccttccgcgatctaattacacctcagaaacacctgtgtgttcgatcatggtgctctggttcgttcacctccccgactacccctgctgctgcggctgctgctgccgccctatcactacagaccagatcagcttcctcatgggctggtatttaagcgcctgcctgtcacaccaacttactccagctagatgatgatgcaaattctccaggtttgcatcagccacatgagaaagctccagcattactcagctctttttttttttttttaaacacgagcagcaagttgctcaactgaccaaagctttcaaagaacaaagcacacacttaaa

SEQ ID NO: 95 - DNA, 3416 bp, Hippotragus equinus
  source 1..3416: mol_type = genomic DNA
tcaaaagccaggagagaattgctccgtccctgtgcgcgccaaagctctccaaagccgcgaggctccgggagcccagagcccagccttcccagccggcgcggagccggcacctgaaagccaggccgggccggcggacctagcgcgcccggagcaaggacgcccggctctgcgctcaggaaggaaaacgacctctcccgaaaagactgaagcacttttttcctctccactgaaagcccggggcacagcccattttgaaccagaataatttagtctgacaacagattcctcctctgctcacagctggcccagagggaggagctgaaatctgaacctctcggctgtgattggacccttctcgcgaaagagaggaaaaaaaggcctccccgccgccaccgcgggctcagtccgcgaggagcccgcgacctggcggcgccgcgcgcgcacctgcggggcagagatgctgtaggaccgcgcgccccgcgccccgcgccgccgccaggatgccgcgctccttcctggtcaagaagcatttcaacgcctccaagaagcccaactacagcgagctggacacacacacaggtaagggggaggtgcagatgtccgcatctcagtctgtaaataggtaacgacaggggtgtgccgccgctcgactttgatacgaaagagctggacacccaggctgtctgctcccgaaagagcggtccttcctcagatcgttcgggctcgggtttaattcaaaacttccacactctgagctggcgaggagatcttccctgggctcttgcgacgtcacgttccgcagcgtgtacatacttgcataatgaggacgtggaggctgggtgaggcagtgcgtgaacgttgaattattgcctttttcatgtaataaggctccttttctccagaaagcggcttgatttacgccaatccttgtacttaccggcgtgagccaagcaagtaccccacgcataagatggaagagaacttttctgtatctttagaaagtgggtaggtttccccctgcgctcgctggtcgggcagccccccacactcgctcgtgtgcggggccgggggtgggggggtggtgcacaaatgagccttaagcgcagtgaccccgagcagcagcggcggaaaactaatgtcctcccagcgcctgcctgctcctggggagtctgtctcctcgttccctgcgcaggcagcctggctcttcactgcgctttcacggtgccctctgtctcacgccccgctcctctcctctctccgcagtgattatctccccgtgtctctacgagggctactccgtgcctgtcatcccgcagccggaggtcctcagatcgggagcctacagcccgatcgccgtgtggaccaccgcctctcccttccacgccccgctgcccgccggcctctcccctctgtcccgataccccgcatccttggggcgcgtgagtccccctcctccgtccgacacctcatccaaggaccacagcggctccgagagccccattagcgacgaagaagaaaggctacagtccaagctttcagactcccacgccatcgaagctgaaaagtttcagtgcaatttatgcaataaaacctattcgaccttctcagggctgggcaaacacaggcagctgcattgtgacgcccagtccaggaaatccttcagctgtaagtactgtgacaaggaatacgtgagcctgggcgccctcaagatgcacattcggacgcacaccttaccttgtgtctgcaagatctgcggcaaggcgttctccagaccctggttactgcaaggacacatcagaactcacactggtaagagaaacacatagtcagggtgtcgccgtccagcagaaggaagctctgggctggctgtccgatttgccttaagtggtgacacagtacttttgatgatggatgttcagttttagctacttcctgacgactcaaaaagtcgtcaaagcacaaagggctccactgcttgctcacagcctctgctcccgagactgcaaacagcatttagactttggaaagttagattcaggaggtttggtctcaaagatcagttagcaaatcaggagagatgtgcttggatgtgtgttctgtgaaatgtctcccaatgattagcaaatacagatgttgttctcccaatgaattgattaggcagaaagacggatgaagtttttggttcttggtttttgttagctacattcttgctgtgctgtctctcacccacagcaagttggatagtgagagctgaatttgctttccgttgtttgcttttgttttgtttttgcttttgagttttctattcctagcacaaaatcaccctgccaggagcgggggcactcacccaggcttagtcataatacagaaggagggaaaaggggaaatgttgggaaacctggggaggagctggccgttagctgcacctgccgaagaagagagcttgaacaagccaagtcctaggacaacaggaattatttctctaggactggcagcagcaattatatatatttttaattttttaaatttgatttttttttaagtgcaactttcacatttgtcttaaagggccagacattgaaacaaatattgattaagggggatttgaatcaagttttgctccttctcatgcttttggcaaagtgtgaagattgctgtaagcctcttctggatttgcatttcctctgaaaacactgaccatctttctttctccccaccctgccccaccccccaggggagaagcctttttcctgctctcactgcagcagggccttcgcagacaggtccaatctgagggctcacctgcagacgcactcggacgtcaagaaataccagtgcaagagttgctccaaaaccttctcgcggatgtccctcctgcacaagcacgaggagtctggctgctgtgcggcgcactagtgacacagcccctgtttactcgggcagacgcttttctagttcacttgtcacgcattttacttgtcactccacctctgagcgacaagtaaaagtcctaaggcattttgtcttgtgctgacaaacccgaataatatgtatagacacacacacacacacacacacacacacacacagctgccagggcaggggattccatgtgcatcagattaatcctttccatgtgaagtttaaaatgaccgtatatttactgaccgttagatggagaggataaaagacaagaatcttgctcttctgagatgaagcaaaaagcacattgcatctttccttactaagaaagaatgcaaagatttactttgctgccaaagcatttcaactgaaaagaacagtgttgccttgtacgggatttgtaatagattttcctataggacaagaatctgccagacactatctcaggtgccttataaagtattccaagttcactttgttacatgtgtcatgtc

SEQ ID NO: 96 - DNA, 154242 bp, Hippotragus equinus
  source 1..154242: mol_type = genomic DNA
catttagataaatcctgataatccacctaacattagtttgtgtcaattttataatacattgggagaaactttactattgtacttaatggtacagtttcatacatcaagtatttccattaattccattattagtgacagctaaaaagtgaccccatcaaatgaaataagtgacattaactgtgcaagagtaaaccacatctggattgctttctaaaattcgccagtttgcagaaagtaaacattctttgatttgatcataatatactgaaattgcctataacactggtgcagtaaaacagctagctcctgtattgttacagtaggacagattttatagtataaagttaacagaaaaaaatgctcacatattatgtggcgaaacttatttcacaaagagaccattaaataaagggaaaataaaccatgcagaagagatggcttccctgtcgccatctgtttcctatgggctcactcactaccacacatcacttgccacactatcaagtgactcctttctgctttggcgacagaaggttcaagcggaagatcctctcccagaagctctgattctccaccttcatcacctggtggatgataaggagactcagattaaggacaagaccgaaggtgtaggttgacatgcatcagactcacggtgagtacatttgcagcacacgtgaaacctgcctgacgcccatttcagagaacacagtaaaagaaatgccacgagtcagagtcttgcaaaggacagctgagatcaatttctcaatgttaaaatattacaggatatgaaaaaagaaatggaacaaaaaatatcaaattcaattttaaaaaagcatgtgcgtgcatgtgctaagttgcttcaatcgtatccgaaaacttgtgaccctgtggactgtggcccaccaggttcctctgtccatgcgattctccagacaagaacactggagtgggttgccaggccctcctctaggggatgttcccaacccaggaatcacacccacagttcctatgtctcctgccttggcatctggtcctttaccactagcactgcctgggaaaccctgtaaaaagcctgtttactattaaaaccgacctatgctttacgataggcttcccaggtagctcagtcataacgagtccgcttgccaacgcaggagtcaagggttcaatccctgggtggggaagatcccttggaggaagcagtggcaatccactccagtattcttgcctggagaatcccagggacagagaagtctggcaggttacagcctatagcgtcacaaagagtcagatatacacgcacacttcacatgctttaaaacaaattctgcttttcaggcgggattgcctagagatattgaccaacacagttaagcaatttttacattccaactaccatgttgcaatggaagaaaaagttctaaaaatcacccagccaaatgaagcccatctctataaaggtattctccattcctactgacaccactgttgctaaacataacattaaaactcctacctttaaaatgtgtcaataagccttttacatcaactctccagctgtggctcacaggctcagtagctgctccttaccatgtgggatcttacttccaccagggactgaacccgcatccccagcattgcaaggtggattcttagccactggtccacaagggaagtcctaatgtgaccttaaattttatattcttttttttttttaacagaatttataactgaagtatttgtcaccagtctacaacattatattcgctaaagccttatgtttagaaactttttcaatcactgtgattttaggccagtccaaagggtttctttatttatagcaaataaatatatatcagtgctttatagtttacaaagcacaacactttcacaaccatcagttcttggtattttcttttaaacttctctggccatttcttcttagatcccttcacaaactctaatgattttttaagtggagtattaaaacagggttctatcttagaatcttttcttctggcccctacgtattcttgggtgaactaatcaacccctgtgatttttagcaccactgtatgccaagagtccccatattccttcctcctgagatataaaactcttatatctaaaagcccccatggacttattccatctagacaattccgtgtctaatacaaacttccatgtgctccaaggtcaacatgtccagcacctgtcctcattcctctccctccgccagatctgctgcttttgttctgagagtccttactgctaagtaaatagatcactccctctttcttcacactgttagttacaccaattccccatcacagtgctagtctactcctactgttgctacctcagtcacttattttttcctaacccattttcctacctctagtcttatatctccaacccatttacacccaaatataatcatattgctcctctaaagttctccaataattttcctttgctttaaagtacaaactccttaataaggtatacaaaggcctttcataatccagaccctcccttccctttctggattgatcagtggtcagatttatatttgcttctactccatgctctagtcatttaaaaataatttttctttaattaaggcagtttcacatttcaagctctctcttaccttgacatgccaatctccccagcctcccccatatcatccccaacccaattcttcagactcatgcccttcagtgctgagtcatctcaagcatcatttcttgatttccctcttcccctactcctagaaagaactgactactctctatcagagcatcggtgacactgtaatttattgacatgttctgtaatttactagagggagactttgtttttgtatctcaggcacacagcagataattaatgtttataagatgagagaatgaacaaatgaaatgaatttgattataaacaaccctttatgagatattgttatttctctactttgcaggtgaggaaactaaggttctgggagattgaatgatttccctaaggccttctgattccataagttcttcacatacacttcaatatactaccaaaccctgctattttgtaatgctccttcaaacaaacacatcttagtataaaaagaaaaaaaattttgaaagtagcaggaaaaaaaaaaaagaaagaaagaaatataaaatccaagtaaagggttcaaagaaaaccttagaaatcacgtatctgagtttcttgtttacatgagtgaaaatccacatcacagaacagtagaaacggagcccacagaacccatgacctacccattcggaagtcaatgtagccctctcctccactaatgacaagcacagacttcaagggtgtctgcatgccaggctcctgtgcagatggccctgctttgtcaactgtcagatctgtaccactgctgccactttgtgggctgatgacttgacctatttatataggaatgcaagcaaatattatttatcaaggattagagtgggagagactcattttctcctgagtattttcagaaaactgaacaacataataagtacattctaataaaagcctctgcatgacaagaaaacatctataaggccgtgaaagcccaatttgaaattaaagtaaagctattttgtcccaaagcacaaacacatccagaatccagtatgagaactgtatattgcttagctggtcttagctgtctgcttcagactcttataacctatatcttttcactgtgaaaacatctctcctctggcagggtacatatgcgtttacataagagattgagaaaagtcttcaacttaagctttatgaatgtggatattcataattaatatctgaattaatttcaaatccataagttaagttattagctgctcagttgtgtctaactctttgcaaccccatggactgtagcccgccaggctcctctgtccatgggattctccaggaaggaatactggagtgggtagccattccctcctccaggggatcttcccgacccagggattgaactcatgtctcctgcattgcagggagattctttaccatctgagccaccatgtgaaaactcaaatccaaaggttttctcgtatttaaaaatagtacatattattttaaatttagatgatgcaaataaaatgactggttaatatataattctaacatttacattttaagatagaatctttaagtatgaaatgacagaaatcttgaaatattattcacactctaatctctatgagcatggattaatttcttgacagatctgctatcttttggtcaaactacacagaccatccctcgaggtgctaccaggacatatgatacacttcataaaaaattactttatgttggacatggacaggatagttttaatgaactagatttttatgtataaatattaacaaatctcaaaaatgagaagcaagttgcagaataatatatgtgcaacataagacttaagttcaaaaatataaaaaatactatatattatttataggtatgtcccaaagtggtaaaaatacaaaaacatgggcagaaggatacatgtcaacttcaggatagtggttatagatgaacagaaaagagggaagggagtaagattagaagaatgtaaaggagactcaaatgagtctctatggcatttttccctttaaagcaagaaaagcctgtaaccagcaataccacttctaaaagtttattttgaggaaacaactatacaaaaatattccacacacacttcaggaagctcattagcacgttgttaagagtgctgaataactggttagggtgccctgtgccaactaggtacacttaatcatttagcctttggagcaacctcaggaaaaagtatggtggctaatcttatgtgtgtcagcttggcgcggctccagacattttggtcaaactccagcgtagatactactgtgaaggtattttttagatataatgaacatttaaatcagtggactttgagtagagcagatcaattaccagatgtgggtgggtcaatcacttgacggccttaagagaaaaaggtatgtctcccaaggagcagggaattctgccccctttagacttaaactgcaaacatttacctcttttctaggtcttcagcctgccctgcagatttcagtcttaccagcccccataatcacatgaaccaactccttaaattaaatcaatctctctccccacagcctcctcctttttcttcctctttccctccctaccccacacccttttggttctgttcctctgcagaaccctgactaatacactgagataacaccatgtccaacatcacatagttgctgtggcaaagccagatttaaactttgtctaactcctaaacttgcgtcttacagggggaaaaaatatccaaaacacaggtcctgcttacagatgatcaggaacatcatttactattctcaagggacactttccacgggacatcataactgccactcttcatccggacagtgctttatagttcccaaagccctttcattaatctttacagcaaataaggttggttgaacagctattaatcacacccacttaggaaataaagaaatgagtatcagaggttaagcaacttgcttgacacaccaaccaagtggcaaaggcccagacccccagactacttctgttctttgccacaacactgataaaggtattagagcacattttccatctcttactaaataaagccttgatgacagggcttcttagaaatctcctttatgaggtcaaaactactcttggtgttctgcagtgacaaaacaatagtactgcttttcaaaagtgaaagaaatctcttaaataaaatcaagtttgtttttggggtggaagagaaattctaaaatagcttctatcaagtatctctatagcactttattcatatttccattatagaccatttcaaggattatgttggaattatctgtaattccagtacttactattagactggatagagggacagacaattatagttggtccttgaaccatgaaggagttggggcactgactctctgtgtagtcaaaaatctgagtaaaattaatagtcagccttccatattcacggttcttacattaccacaatttgtatccaaagattcaaccagccatggaatgatacagtactgtggtgttcactactgaaaagaatctgtataaataaacccatgcagttcaaacgcacattgttcaacagtcaacgggacatgcagtttctcaacagaatactctcactcacctgggactgccacaaaaaacttcacagcatccctgtgcccatggaagcaaagctgtgcgtgtgccattgaacaatagggtataaatgtccctggtgtcactttatcactgttttcatcaccatatactcgaatgacacttccaggacgatttcccgatgctcctgatgttttattcgctgcaacagaaaaaccaaacaccaaatattttcccctagaaaatagtaatgatggaagaggttactggttaatccttatattatctaaaagctacagccagttgagataaaacaagagcagcaataccaattcaagacaaagctggaaaaaaaagagatatatagcatgctagttatttttaagtatcttagtaaatggagtaggggattttgccagtctagcactgtttactttctaaacacatttattaattaaaaaatcattttagttaaaacagctttctcaggtatatccattttgttttttagtcctcatttttagacaactaaccagttacatagcttaaagtaaacaggtatacttttaagcagaatttttatactttatcttttcatttttctccctgtgctaagtatatttcccttgtgtgatagtaaaaagctgagcttaaaaggatccatctagaacaataaaatagcttttatttacaccagactgatggttggttaaatcattttagaatgaccagactcacaaaacaccccattccatgtgccagtaagtgaatgaaagaaacatgactggtaacaagagtaaacaatgtagattaatgacagttttcagagaggtttgtgtttttattggagggaaaacaaagtctgacagaaatttcagctgcaacaaaagatgataaatagactaagctgctgagcagtagtttggtggccatgtaacaaatattaaaaaacaaaagaacacctgctgcaatgcagtgattgcaagtggatgacatttaggaacattcgagagggtatctagagacgtgagaatggcctcacgtggccatgagaagccaggaagaagagtgtggctcaggatctgaacttacccctcagccccagtaaacgtccctggtggaggattacggctaaagtgagaaaggaggaaaggggacatggagaggtacatgacagggaggagaaggattactatgagctgccactcttcgcatattctatctggcaactcaggagctcaaagctcctaattaaataaacaaaatccaacttggtataataccaagaaacatacaaagttcttaccaaagcctctgaagaacactgctgctcaaaaaggacgattttatttactgtgattttgcttttcttaattataaagcaattttaatgaataagaacttactagaaagcatttcctaattgcaaatattcccctcttttcttgaagaaatcctgtgcaaatgactatgccaaaatggaactctcatctataaagaactgaaatgaactctggggatcctaaaatctcttaagatgtaagaagtggtctaaacacgtagatttataaatagctgtccagtggttaagaatctgcctttcaatgcaggggacgcaggttcaatctttggttcgggaactaagatcccacattctgtggggcaactaaagaagcctgcatgctgcaataaagacctcacacagccccaatttttttttaattaaaaaaaaaaagaacagggggactcccctggtggtccactggttaagaatatgcctgccaatgcaaggaacatgggtttggttccaagttgagaagattccacatgccatggggcaactaagccctgtgccacaactactgagcccattcctgtaactactgaagcccggatactctaaagcctgtgctctgcaacaagagaagtcactgcaatgaaaagcccgagcactgcaactagagagcagtttgtcacaactgaaaaagcccacacgctgcaacgaagacccagcggaggcccccaaaatatatacattaattaaattatgttaaagaaaatacagctgggattaagaatttaggttctttagggcgttccctggcagtccaatggttagggttccatgcttccactgctggggacccaggttctaaccctagctggggaactaagattctgtaggccacgcagtgtcggggaggaaaaaaaagtttaggttctttaaaggctcaaaatgtaacaccatccagtcttcctcctttctcctaaaaattctggtgtgtttattacattattttatagtagtattttcaaatcgttttaaattctgatgtgtttattaaattactttatggcaattttctcaaatcctgcccatgaattctgcaacacaaaatcacttatataatgagtgatcaatgtaatggaacacagtatgaaaaacatacaaagtacattttgttcacattcttttcaaatacaagatagcttatcttaaagtcagtgtttgatgacgtcctaagtaagaatgtctcccacaactcataagctatttaatgggatattctaaactaattgccacaacggtatgaaaaactaggatattaggtagttaggaaatgtttctggatactagtatatataataaggttgaaagaaaaatggactatgactattatttaaggaaataggactgtgattcccaaaatgagaaaaacagtttttcaaaatgaaaaactttcaactgtaaatattagtcctgatacatttgctagagtttgtaagtttcacagaaagagtgaaggaacaatagttagatctttgccatcagcttgactttctgaattaccacaggtttgccaacttagttctattatttagctccattccttccacttggatttcagacaaggctattccccacaactcttctgtgacagttacctaaaaacgtacttactttctgtcaatgggatggagataatgacaccatttcctgttcccacccacaaacgattacaagacaccataagcgctgtgatcctcacaaaagagaagcccagttttccagtacctgtatgggaggagggaaaacattttattgaaaagacagagcagatgacgttttaggttccaactccctcagagcagctggactaatagagaagactgtgaccagagctggttagatatttccagaagtcacatcaatcaagatcaactctcatttgactttattatctatcaattcatctgacaattcatggctatcatctatcaatcaatatcatctgacaattcatggctaatagaaaaagaaaactctaaaagtggctagcattatatcatcatccagaaggaagatgatgtggattaggaaatatgatgcagaatttacttaaggacctgcaaaaccaagccaaataaaccaaaacacaaaacaaaaccaaaaaaaaagctcaacaaaaacagtttactagattggggaaattaaatgttctttcattttataagctgagagagttcttgcttgccttaaatttctttgcataggttaagaaatctttgctaacaaaacctatactctttgctttttatatatttgggtctaaagtaacagaaattttagggtaccataatgcttgcaatttagggagaattaacgcactttttaatttcaaggaaattttaaactgatcttattttcagggatttgagaagcaaaattattaaacaggtaatattaataaatttaagacaaacaacatttagtcataagttctacttactagaaatgaaagtatgaccaaagaatcgcagtatttgaaggaatcttgaacagtctaagctagagatctttaacctatgatcaaagtatattcctgaaattggtttgtgtctatgtttatgtatgtgcgattctaggaagagggcacacagcaatcatcaggttttctgagggcaacgattctaaaaaaagttaaaaaccactgatgtagttcaacctcccttcataaagaaatcatctatgatgttcctaacagcactggatttggtgctaaggatactgcaaggaataagcagagatagtctaaagcccccttttcatggggctttagttctgcagggggagagacagtatgatgatactggtacaatcacagtaatgataagtccatgaagaaaaagtataagagggcctaaataaagctggaaataaagatgaggaaaggtcttttatggatgtgacctataagacatgacctgaaagccaagtaaaaagggactaagaaaaacttctcagacagaagatatagcaccatgtgaaggccttgaaacgggaaggaacctgttgaatttaggtcagtgtggacagaccagagtgagcaaggagagctgtccataccatttaagttcttctaataatctcacaaaaaaatctcacctaaagacaagaatattctgcatggctggcattacataaatggacgcatgtcatggtgatatttgcacactggttactacgtagaaaactgactggagtagagacaggaagatcagaggctgttggtcatctgaggaggaaaagatagtgacctagcctatgggaatagtggtagagataaagacataactcatttaagggaattccctagcggttcagtggttaggccttggcaatttcactgtgggccatgggttcaatcccaggctggggaactaagatcccaaaagtttggtggtgtggccaaaaaaaggcattactggtttaagatattctggggggaagactcgacggttctgctgatggattagatgtggagaacaagaaaggaagagtcaaaaatgatctttaagtttttgtcaagaatcacagggtagatggatcatttgccaacagttacagtgataagagatcactattcctgaggcaacttactcactggttctactcagcatttgaaatcatttaaaaataagccattttctttgactgacaaagataaaatgctttggacgcttacctagcattttgctcacataaggctcaatgtccacatcctgcagatgttggtaagtgtgtgcgtgatagagacggagtgtggagtccaaacgaatggagacccacacgccatcacccacccaggcaagttgccgcacttggctctccttcctggggtgtgcatcaaatgatttctagaaaagattgttcaatcacaatgttactttaattatctaggagttagtgtttaaaaactgtgctaatttgcacaataatttgacagactacctaataaaagaggagcctaaatattgtttactcttatatacacaattgctattatcccatactgcaaaaaaaaaaaagaaaagaaaaaagaactaaaggatgttgtgtagactatcaacttatgaaagcaatcttgacacattcattctgtgtaacagcattcaacaaaaagacggaattggacctcaggattttgcattgctccagagcaatacacaaaataagatcctatttataaacaaaaatgaacctactgtgctatatatgtaagcatatacctgcatgtaaagaatatatctagaaaataaacaccaaatggaacttctaggtttgtaaacaggatttgggacaaatggagaacttccaccttaaaaatttcctactatttttctttctttaaacaattagaataaatttatatattgtcgcaaaactttttaaagacaacaatgctaagaggtttttatttttataacgaattcccactgcaatattattcctcagtctgtgacatacatatggatttgcctgaatacacactgagtagtgggggagacttgagagttctcctcccaaaccacctctacataattcaagcagtacacgtatgggtctacagatactcagacatacatttagacattcatgtgtgaatcttccttcctttaaaaaaaatcacttcccaaactcatagtcaaaagcagcaagagagataaagtatcatagaaagctgagaattcatccagtatatcactgaagtacctcaaaatacacagattcagaaaacaatttctaaaaaagctgaagataattaaatcttagggatttcaggtaatataaattcagtaagtacagaaaacatgggttaacttgcctctattttcatggcctttggctgaaccacataaattttgttcctatagccacaccaaactttgtcatgtaccacagtcatgcatcggatggaatggtgaggtcgtccaagatctaacaggtgatagtttgacaaatcccactgtccatctttaaaataagaagtagattattagtttatgtataccatcttttactcaattttaactcaagaaatattttatttgggtgtgtaattaaatttattaatgaagtatccccaaatatcatgtatttcagtgtatatttacagatattaatcccaggcaagctgtatatattacagatatatatatacagtgtatatattacagatattaatctataaattaaatctgtaaatcagatataaatcaaacagagttggatgacacctcaaagatcatatggtccaacctgccacgcattacctggacccccttgctctcaacagaggtgatgtgataagttatttttaagttacctgtttacaaaagtattttaagtattagaatgaatttaaggttatttggggcataatatcgctctggctcacttgcatttttgatgtatcttcttagatagaagtcaagggcaactcactgctaaggctttaggaattatgcataactttagtgatgacaagaaattcattacaaatgagaaccaaccactgcaagcttgctttgcttgataatttcagtgaaggaaaacatacttcctcacaaagcagctgtttcattttaagaaaactgtaattatcttaaaatattccccatactcagttaaagtctgccttcttgtacataatcattctttcatctatagttttgcctaatggaaacacagaataaatctagtctcacttcattgctactgccctgtcttcgtgttttggacacatctgtttatggaactttcatcctaactccattttgtccagatccatttcatgctatctttctaccagagtggagcaggatcaccagccctgctctggacactaatttctatgaggtaacttgtactgagtttaatgtcaccctttaggtaactgtcactcttcacacaaatctccatctactctttggaacccaaatgcaggactttacatttatccttatttaatgtattttgtcttgctcagttttcaattcagtctaccaaaacatttattattccatttttctaggttctcctactcactagttgagtgaccatgaacaagtaaactactgtgcctcagtttcctcagctacaaaatgaggatgacaatagaattttcttcataagtttgctgtgcagattaaactcagataccgtctataaaggccctgaacaacgtaaaacagaggcctctcttttcattatggagtcattaaccaaaaatctctaggcacctaagtatcatctgcctcacatttcttgaggctgcaaaaagatatgagactttggaaaagccttgcaaaaattaattaataaaataaaaaaataatttttgcaaggcttttccaaagtctcatatcagatctatatttttgtatttccctgatctgccaatctagtaggaaggaaatatcacttttggacaatacatgtaccaaggaattatatgctcaatttcttaaattcactcagtgcagttttctgacaccttctgtctgcagatggtagaaacactactttaaaggggaagaatataaaaaacgtgacaagaaaatgattaaactttacctaattaaaaattcttttcaagaacattccaaatgtaagtgaatgcaaattacttttaaaatactggacaaaagaaaccatatactctcactaaattaggtctatgactagaaaacaaataaaacaaacaaatacttccactgcacattatttaagaggaccataaggactatttactcagtatggtaaacaaattttcactgaggtgtatgattaatgtatgcctccagtcaagcactcacatatttattcatttcatacatggttagtattcagtttaaacctttattccttctcctatgaaatatcatttctttaaaacatatgaggtcaatatgtttggaaaaaaataaataaataaaaataaaacatatgaggtcaatatgtttgaaaatgctcttgcaaagcaacgaatcagcgcacatgttacatattcatgaaactcaccaactcctctgtgaaagattgcaagggtgccgtcagccagggccactaacacaatccctttcacatgtctgcaaacaggaaaggggtcttagaactctccatttgggagtgcagaagacaccacatgatgctgagctagttcagaggttctcagaagaccaatctgtgatgtgaggagcttacaggagaatctaaaggaacagattcttttcttcactgagaaaagtctcgttatgaaaatgtcagctggactcaataggaagcatgtgtggtgactcagctgtttcactttctaacctcctctcattgccgacaaaaggtccacagaccagaggcacacaccttgagtagaaagagtcagctctgtggatctaagagagaaactgacttttcacagccaacatacagaaaaggactagtaaatcaatcacccaatcaacatattcacaaagtgtaaggaatattctaagacaaatatcacgggttttaattggttttctcaccaacaggctaaagaactctcagtacagtgaggaaccaacctggaaagttttctcttctacttaaaattacttggtttattttctagttttaatctcattcatacagagggttaaaaaagacatggatactgatttagtcatgaagtacatgttaactttaataggcttagaatctagtttataccaaaatacatatgtttcaaaggaagaatttctaaaatgaaacttacacaacactgagaatcgaatctttaagcttaatagaatggagacatttcctccactgggctacagatgaatggacatacaaactgcaagaacaaaatcgagactggtaaggcatagagaacacatcaagtagttgcttttatctaataatggcacaaagtttcctcaaaagaaaagaagagcaacataaacatttcaggacaaaacaaggaaaggataggcctaaggcagagaaataagctgcataagcaaacagaaacataaaaagaaggaaaagccagaactaacgcagggttggtttcagattaccacatacttcagaatccttggctatcaatcttttaaaaaaatagtcttcttacttttctactacaatgagctataaatttctgataatagagtggtttacatcagggagtggcaaactaaggcccataggccaaatccagccatctacctgtcttagtgcagtctccaagctaaaaatggtctttatattttttaaatggttggaaaaaaaaaaaccaaaaggagagtatttcatgacatacaagacttctatgaaattcagttttcataagttttattattattagaacatatccacaccagttcacttagtattgtcaacgcagtggctgcttttgcaccacgacagtatagttaagaagttgctacaaagatcataaagcaacaaaacctgatctatttcttgtctgacccctcatagagaagacgtatgtcaaaccttcattttgtagtgttagtcctttatgggaaagttgcactagtgatcttgtttaaccttaggaaaagcacaagtttgtaagactcttcacactactacaaagtggagaagtcctatagtgtttatcaattccgaagcttttagactgtgatttgtccttgttttcccagaagttatgtttaaaattgggcctttctgcagccagagatttttttaatcccttttatttcctgaacaacaggatctcctatttttagatcacccagatttttaagtttacttaacttttttcccaagaatattatatgaagggaacatcctatgacaaacatacggtttaccattcagaaccaatgcaagtccaagtccaagttatgaggtagttgcaatataacttcaaaattgtgtgtatataaaattcttcactttaataggtactttttgtttgtatttgtatgtagcacattttaattatcttaagatttctaaagcaaaagtgaaagactaaagatttctaatattaaaaagagttgatacctaccacccattttgagctccaagccacatagttggtaaaaggctactcattttctgggcttcctctctcaccaggtcttgttcatttggcaatactgatatttgatctttatatgcatctgagtcattactgtgggacaaaagggaaaaaaaatcttattgtgtttagctacagttttcaggaattgataatctctacattttagtgtactgttaaaaaaataaattccagtaaagccaaagttaaatgattatattaaacatttcagagacagtgagaaagggagggagggagggtggagggaaggcaggcaggcagacaggcagttaggcaaggcaatgggaggcggaggggagggagaataggaaggaatgaaaggtatataaatatatatatattgcagcaattgtaccagaagtaacactgacatactaggaggttcaaggtacagaaaagggaaataagacacagtaacgaaatatagcagttaatatctagactaaagttaaggttctcccttatagttatcttgaattttatgagtttcttctgtggggatagaaggaggagagatggtttgttttaaaactacacatacatacctacacacacacagacacacacacacacacagacacacacagacacacacacacacacacacacagacacacacacacacagacacacacacacagcacacacacacacacacacacacacacacacacacacacacacaggaggggtaattataaacaatgttctaaaataaataaactgaaacatgcttttattctacccccaaactttatttctttggactatcagaggacatttagttttaaaaaaaagcataactgtgctaccaaattcaaaacagataaatgaatcagtaagtctaaaaagatgactttacacccctatcacctttctataaggtctagagaaggcaagaaaggaaattaaacaactctttctcttgaaggaaaagtctgaaacaaattgttttctaacaaaatacttgccagaaatctaaattcaaaaggtcattaaaacccacatgggaaatttaaatggccagttttgtggatagagtgggtgtaggagtggggattaaaataatgagttattaatagaatagaagacagtacaattttttaaaaaatccatagatatttggtatggctttaaaaaacaattgtactcactgtcttctattctgttaataactcattattttaatccccactgactggtaaggattttgactaatatactttataagcaagatttttttaagttgcaaggaatagagagcaaatgggggaaaatatgtctagagagaatgcaatgtaaggaacagatgaagacatagtgggaataagtaatagcatctaaatctgccacaacaatgtcaattagtaggaatattttggcttcttgagattgttttggttcctttacatgtgcactctggtttcctcagttgtttacccatttttataccttgactgatacactggtgagaggtcttctgggatttgaactcccaaaggatctgtaaacacatgctctgtgtacacgccagtttgggagacatccacagcatcttcagctgatcctgcattgccttctgtagcttcagttgcttcttctgctgttggaacattttcatcaatctcactattttctgtttccttttctaaaaaataaataaagcatgctaaccattccaagtttgagcttttcttccaatcacttcccccaccaaaaccccctctatagaattccactcttaccctcttctccatataataaaattgaggattcttgatttcatttaacaatcatcacagcaccctctttcaagctctttcatccctgttactttaaaatctaagttaagtccatactgagtcacctgggacaggctcagaaactatacagatggtatctagagaagaccaacatacctggcggtttttccatcactggagaagtttcattggtattaggggaagtggcagctgctgttataccttctgcagaacaaccaactactgtgatgcctcccaacaggctatctgtctctgctgagctattgcttgtcatgcttccacataaagatgctttgtctacttgtccggattctgaaagctcttctcctgcagggtagtctgtttctcgggctcctgaagtacaagataaactttctttaaatagctcagtaaacttctataagtagcattttctctattaaagcaactataggtttgaaataagagtaaaggtgagacaaatatctatgcaaatacactgccaagatggtaaataaattttatttaaactaatttaaactcaattcacaaattgagaaagtagtttaaaaaattaagataataaatgcaacaataataacaactaatgcaagcacaagtaaaccaaaaaatgtcagaaatgtatttctgttcttaatatgagttcttaaagcagccaactaacgagattaaaaacaacaaaatataattctgacaagtcagcaaaattttttttaattatcactatttctattttaaatatgaatttctgccactattaaaaattaatacagcctaggtgtatatagtgcattaagatattagtaacacacttaaaaactaagcatttaacatttaaaaaatcttttcagttctctttatttagaaagatattcttatccatatcacattaaaaaattttattgcagtaaaatatacatacgttgttgctcagtcactccactgtatctgattctttgttaccccatgactgcagctcaccaggcttccctgaccttcactgactcccagagtttgctcaaacttctgcccactgaattggtgatgccactgaaacatttcatactttatcatccccttctcctcctgccttcaatctttcccagtaacagggtcttttccaatgagtcagctctttacatcaaagtggccaaagtattggagcttcagcttcagcatcagttctaccagtgaatattcagggttgatttcctttaggattgactggctggctctccttgcagtccgagggactctcaagagtcttctccaacaccacagtttgaaagcatcaattctttggcacttagccttttttatggtccaactctcacatccatacatgactattggaaaaaccacagctttgactatatggacttttgttggcaaagtgatgtctctgctttttaaaacactgtctaggtttgtcatggctttccttccaaggagcaggagtcttttaattccatggctgcagtcactgtccacagtgattttggagtccaagaaagtaagacatcacggtttccattttttcccccgtctatttgccatgaagtgatgggaccagatgccatgagcttagtttcttgaatgttgagttttaagccagctttttcactctggtctttcaccttcatcaaaaggctctttagttccttttcgttttctgccattaggatggtgtcatctgcatacctaaggttatcgatatttctccccacaatcctgattccagcttgagcttcatccagctggtatttcacatgatatactctgaatgtaagttaaataagcagggtgacaatatacagccttgacatacttcttgcccatgttttaaccagtctgtggttccgtgtctggttctaactgttgcttcttgacttgcatacagatttcttaggaagcaggtaaggtggtctcatattcccatctcttgaaggattttccagtttgttgtgattcacacagtcaaaggctttagcgtagtcaatgaagcagaagtagatgtttttctggaattctcttgctttttctatgatccaatggatgttggcaatttgatttctggttcctctgccttttctaaatccagcttgtacatctggaatttctccgttcacatactgttgaaggataacttgaaggattttgagcattaccttgctaacatgagatgagggcgactgtatggtagtttgaacattctttggcattgcccttctctggaactggaatgaaaactgactttttccagttctgtggctactgctgagttttccagatttgctgacatattgagtgcagtactttcacagcatcatcttttaggatttgaaatagctcagctggaattccatcacctcctctaactttgttcagagtaatgcttcttaaggcccacttgactttgcattccaggatgtctggctctaggtgagtgatcataccatcatggttatctggatcattaagaccttttttgtatagttcttctgtgtattcctgccacctcttcctatcttctgcttctgttaggtccttaccatttttctgccctttattgtgtccatctttgcatgaaatgttcccttggtatctcttgattttcttgaagagatctctagtctttcccattctattgttttttcctctattttttttttttttttttgcattgttcacttaaaaggctttcttatctctccttgctattctctggaactctgcattcagatgggtatatttccttttctcctttgcctctcatatctcttcttttctcagctatttgtaagggcccctcagacaaccattttgcttttttgcatttctttttcttggggatggttttggttttgatcactgcctcctgtacaatgttacaaacctctgtccatagttcttctgacactctatcagatctaatcccttgaatccatttgtcacctccactgtataatcataagggatttgatttatatcatacctgaacggtctagtggtttgccctactttctttaagtctaaattttgcaataaggagttcatgatctgagccactacataaagtctgccatattaaccattttaaatgtataattcagaggcattaattatattcacaatattatgcagccatcacagctatctacatccaacatttttttgtcactccatatagaatacctataccaagtaaataactctctgattgccatacccttaccccaggaatctctaatttaattttgtttatgactttgccagctcagatgaatagacagctcagataaggagaatcatacaatatttgtatctgagttgtttctaaggttaatctgtgttatggaacttatcagagtgtcattcctttatatggctgagtaatatttcaagctatacatcaactttttttttttttttgctgtgctgggtgccatgtgggatcttagttccccaaccagggattgaacccatacccccgcagtggaagcacaaagtcttcaccattggactgtcagggaatttcctttaatttttaaaccaatgttttaatatcacatagtatttaatatggaattctaaaaggcctttccatactaatccatttaaatagccccttgccctctgatttccacccttctcaaatttccactgttttatttttttcacagtatctaaaaatatcctccttagtcatttgaactcagtttcttttttgccttcacaaactagaagagatgcataactgtctctccagtaaccaatcagtttctaccagtgaggagctgtggatggtgcgaagagaggaactactcttacctggtacgcttgatatacacagaacatgagagttacaaacagtgaaactgtctaggatgttgcctggttgaacagcatcaataatgataacttttgtagctgaatgagtgctggtacagatccagactagactggataattcttcttgattttttaactccttctgttgttcctgcataggcaaagcaaagaaaatgaatgtttaaaatgagatgtgtgcataaatatttatatggctgtgctattacactaaaggacactactatttaaagttcacttccagattatttagaaggctgagagtataatcacctttcaacaataattagtagacgaaaaactagtagctaaagcagatcagtgacaaaaaatgttctctatcttgactgtgatagctgttacacaggttcacacatttgtcaaaactctttgaactgtacttattttgagtgtatactttattgaatgtaaaatatactctagtaaaaccgacttaagagtgagggcagggatgaggagtaatcaagggcatagtaaccccaattagaagctggacctagaagtcagtctgagaccaaagagctaaacgattagtctcagaaacgggggcaaatgcagtgcaagcacctaccttcagttcctgatctaacttgtctaagctattctgagatgcacttcgctgtttactgccttctgcttccaaaccagcaacatccttgtaaaatacacttgctccaacaacagaaccaccatctctggtcttcccaccggacaaattgactccaacagcacaccacagctttgttgggttaaaagaaaaagatggtattaagttattttctctctaaaaatgtttacaactcttcacattcccttaatagaggtaatgattacaaagagagggctctaatattcaaactatttcagtctaaaatgacaaaatgagtaactttgcccacaaaagtagaatttaaactcctgttttagaaaaaaatccatcaagacttaaagtaatattacctttaatttcatgattactttaccttcattgatgtatctttttcatctagaggtctgagatagacaggcacaggtaaatttttcatcttattctccccttgtccattggttatctaataattgggaaggggagagaaggacgcattgggtaagtctcatcgaaagtgaacttacagaaccagagacatgggcaagcactgctgcagcatgtttatgaagtcaagttcaagttaactttgtctttcttacttgaaaaatgagcagaaaatcaagtggtagttagagaaaataagggcgctcagaaaaaatacactaattcacagacctgttagtacacacatgtgggtgtgactgtgtgtattttaggggtagggaatatgttcttgaaagacgtgaattgagttttaacagtttgaaaggctccatgaggaaggcttcttttaatgtttaaacaatagatactatttttcttttaaatgaaatcttcaatattaaaacagagtacattatctcaaagtcccacactcaaccacctcctatactgacccctctccctcttcacagaactcggacgcatttcttttgaactgtagggctttagaaaacagcctgaaaacaaaaccacaatccttaatgcttctctaaatatgtgccaaatgcacgctgcttgaaacctgcaggtgtgggatgtgtgtttagaatctttcatgcccaggcctactcctctctctctgcatttcccaccagaagctctcaccatatgcaaacattacctgtttgtacttttgaggcagactccagccaaaagcctgcactctaccatcttccttctgaacatgtgcctttacctgacgatactgttctctcttttgttctctgcgtgaggctaaactagcttcagttctaaaagaaaaagaaattccctcttttaattaagtgaatataacaatagcttatctcccttcttctgctaaaatagacataacaagagaaaattacctttgtgtcagtttacagataatatataactgaatcctaacacttctgaagtaggctatcatgctcatttataggcatgagaggttaactttcccaggatgggaagccaacttcctcttacaacaaaaagtgttagttgctcagtcatgtcagactctttgcagcccatggactatagcccgccaggctactctttccatggaattccccaggcaagcatactggagtgggtagccattcccttctctgggggatcttcccaacccagggatcaaacttgggcctcctgcattataggtggattcttaatcctctgagccactagggaagccctttataggtctatccaaacccttacagctgatctgataagaggtaagaatattctaaactgttatttagagcataaccattagtctggaaaatacttactcttcactaaggaaatcaaaggctctggacttatccccagggagctgagataaggtgctgcttcttttcttgacagaaggcgtaacatgagaggttggtgcattgtacttcagattaactggtggttcgggcttcttagtagtgttacttgaggagctgaaaagtcggctgaaactaaaaggaaagttaagagagaatgtgtgtgtgcggtgtgtgtatgtatcacacacatgcttaagaacaatccacaatcttcacaaattccagagtttttacaaggcaatgagttagaaactagcaaaaagactttttgtagtaacacactggagccttagcaataattcacagccaaactcagacattcaggaaagagaaaccattgcctagaatggcaaatccctgttctttaattagtaactctcataatgaaaggaagaagctcttgagtacagacaccttctcataatgaagaaataagacagttctttagccagccaatggttgttaaacagcaatgtacagctgtgtggtttgaacagaagcttagtaagcaacttctaaaaatagcaataataaagtactagaacacatattaccattttaccacacatcttatacatttccttactaacctcaatttaagtaactattttttcacattcactcaaaaagaaaaacaaaaacaaaaccttatttctattaaatagcagattcctcaaaaaggggtaagttttaagcacaataaatgcatagtacttctggcacaaacacagttcaagtccaaagcacaaacatacacacactactcaaaccccacaaacactaaatttctgatcttcgctctctaaattttcttacaatcacacaatcaatgaatcagtaacttatttaatggggatctaggaaatcatcaactctaaaaataattccccattattctgtttaattgagcagaggatgccaccaaatgcacaaccatcatgatgcagcttacgataatactaatttttttgtcctcaagaacagccttaccgagctggcatactacataccaaaaagaaaaagtacagtttagctatataccctgaatttaaaaaggaaagtaagaagaaagaaatcatttgtaaaaacagattgattttaatctttgtctcaaagtgctgctatctaacatcttcatgtgatctgagatacttacaactgccaaatgcttgaccttttcttctcctgcatggctggattttctcttgacgcactacatggaaagggaaaaggaaagagaaggagggagagagatgaaatgaatgtgtcatcagtgagacagtctagctttctatctaaacaaccagggacccaagaagctcatgaaatacatggagaatcaacaagtttaataaaaaattactttgatctatatgtgtcagtcagtctgttaaggccaacacaactaataatattgaaatttcatcccttcctcaagagctcagactattgatagagaaaaaatggctatctgtgcaggacagacaaccaacaagcctgaatgttaatgtttaagttttttatcgatgagatatcctccaactttcttttttattaggttggtacaaaagtaattgcagggttgcattgctgaaacttgctgtttgatattggaatacattcttaaataaatgtggtcacgttatacatcattttaatgtgcatttcttgctttatgcttttttgttattgactttttattgtttatcttatatttattttagactagggaaatgatgttagacaaaaagcaaatttgagtgattttttaattcgagttcaaaatgggtcataaagcagcggaaacaactcataacatcaacaacgtatttggcccaggaactgcttgctaatgaacacacagtgcagtggtggttcaagaagttttgcaaaggagacaagagctttgaagatgaggagcatagtggctggccatcggaagctgacaacgaccaactgagagcaatcactgagctgattctcttataagtacaagaagttgccgaagaactcaacgtcaaccattctacggtcatttggtatttgacacaaactggaaaggtgaaaaagctcagtcagtgggtgtaacattagctggccaaaaatcaaaaacatggtcattttgaagtgttgtcttctctcattctgtgcaacaacgatgaactatttctcgatgggattgacatgtgacgaaaagtagattttatatgacagctggcaacagaccagctcagtgactggactgagaagaagcttcaaatcacttcccaaaaccaaacttgcaccaaaagaaaaagtcacggtcactatttggtagtctgctgccagtgtgatccattacagctttctgaatcctggtgaaaccattacatctcaggagtatgctcagcaaatcagtgagacgcaccgaatactgcaacacctgcagccagtattggtcaacagaaagggcccaattcttctccatgacaacacctgaggcatgtcacacaaccaatgcctcaaaagttgaacaaactgaagtttagtaccatccgccatattcacctgacctctggcaaaccgactaccacttcatgcatcttgacaactttttgcaggaaaagtgcttccataaccagcaggatgcagaaaatgctttccaagagttcactgaatcccgaagtacagatttttacactactggaataaacaaacttatttttcattggcaaaaatgtgttgactgtaatggttcctattttgattaataaagacgtgtttgagcttagttataatgatttataagtcacagtctgaaactgtaattacatttgcatcaacctaatattaaaatattgcattgtaaatctctgtctctacataaagatattgtttgtcttatatttccagttctcaaaaactagcttgtaactttattgttctaatgggtcatttttcacaggactttttcatcgctgaaaagctgaccaggaaagaaaataaaatggattgattaggtaattaggcaaaaattttttttaaaaaaagggcactgcaaactgatttagtatggctgtaaggattttgccatcactgtcagagctccctttgctgtttttttttttttttttactaattttaaaacatcttttaattcaatggagaaagtcactattttttttcacttgttgactaccatttggctgtgaaaattaaaaatagtaataaaaagtggagcctgactatatgtctcacttgtttaactacttattatttattcaaaatctctttattaaaagcaggtgtttaagaacgtatttgttagtatattggtttcgtcgtccaataaataaagattaagatactaatcaggcttccctagtggctcagtggtaaagaatccacttgccaatgcaggagacgtgggttcgatccctgggttagggaagatcccctggagaaggaaatggcaacccactccagtgttcttgcctgggaaatgccatggacagaggagcctggtgggctacagcccattggactgcgaaagagtcaggtatgacttagtgacaaaaccaacaagacactacttatcttcttccttcttagcagttataagcaattacaacttttgaaacctgtaaatgtgctacataaaatgtttcattcagtactattaaggatataatcataaggaagtaaaagtggtggttagaaatactttcatgaagtttatgaacaatttgtcagtgtgtactgttacttggtaaatctgatgtaaccatccaaactgaaaaacatgggcaaattacagggcaattagattacaaacttttcatgaatgctttaaaattgaagtaacaaacactgttgctgaggatatgaccattagagggcagcgttaataagtaagatccaactgacaaagggtgtcaatggaaggctgcttttatacaagactagtcagaaaggagaaaaaaaatcaggactatttcacaggaaaacaccgagtaagaatgattttgtttcttatgttgaaaatgaaaattttatctcttcctgacattattgcaaaagtagtgtcggtttctatattcttttaaaaaacaactgatgaaagaaatgttcacatattgaggtatggagaagtattctggcttatacatcatttaattgaaatgttatgctaacttaaatgcctatttgtggactatcaaacatatattatacatatgctttaattattaaagaaaagggtgcactgaccagaagtaaagaatgtctatgttaaaaaaataaaagatgaaatgcctcccttcctgggacaccaatgctgatactcagtcttttgatgataagactccctttccaggtagcaaggccatactgcctcactgtgtacacgctgatctggtatttcagaagccctgaaggaatgtttccctgacttggttgattttgcttgttctgacaagatataaaactgagctgaacaccacacatctgtcagttatcagagaggctctctcccaggttacagtcctccatttggcaccaaaaaagttcttccatttcaattatagatcatttattgattattttcgccgagagactactcaactgcctttgagaggtttgtgggaatatcctccaagaggctctactggcccaaagggcacccacttccatcacattccgcttctaattgccagtgtttctctagacctttcctagtaaacagagcaagggcttggatccccaagggaagactccagttgtgaacaaataaatgaatattagtaaacaatcagaaacctagtaaacaataagtagaaaaacaccagaggtacttctcatacaaaccgaatcatctctgtccatcgaacagcttcctgaagctccatcaatctctctttatattggtttctctccattagaactcgggccatttctactctagtaaaccgcttcctttgggctgtgggaatatcactctataacaaaaagaagactgcagatcactctgggagcctttatctgttttggtcctatagctcagacttaggtaaaatttttaatttaactccttaattttaatatattaacttacagaaaactggtcttacaaaaataaaatcaataaagataaacagttacttatgactgaaaagtcgatgataaaatttctaaacaaatacaagtatttgaatatattataaaggaaataaacacaaagaatagtgcagattttgaaggaaactaaaaaaagctgttatctctatagatttaacatgctcacctggaaatgctgttatcacaacagtatcttaaattcatgttctatataacaaatgctagttattcagaaattagttacaagtaagttccaaaaggggtacatttatctcaaacaaccaatctctctatacacattctcaaagccaccgaaaagcataaaaacctgttggctagttatcaaggtacccaatgctgggagtcactaaaacaccaaaagaaataaaaagtcaaacaacaaatgattaaaggattgtgagtttgcaacacagcaacctcactactagctatatactctggaaaaattaggagactctcactgcaatgttcataacagcagtttgtagtactaaaaagctgaaaataaccaaaatattcatctacagaaaaacaaatacataaattatagtacatttatataatgggatattataaagcagtgaacatgaatgaattatataccactatacaactagggtaaatataaaaaacataatactgcaaaaagaagcaagtctccaagactaaatacatataaaacacaaaaacaacaaaaattaaaccatagcttataaagatacatacgtgtgtgatatgataaaattatttttctttcaagttaataaaatgataagtataggatagtagtatcatccagagggaaaagcatagcatagcttcaatgtttgataatgtcttagttcttaaacagtgggttcataatgttaatttattataatgttaatgttattactcgtaacctacatatacaacatatattttaaatgtatcaaatatcatataaaagcacaaataagagattgaaggggcagcaaataatcattctgatcaggacatccatatatctcaagtctgatacttaagcggcaaacacttattgtagggagtccattctaaaggagatcagtcctgggtgttctttggaaggaatgatgctaaagctgaaactccagtactttggccacctcatgcgaagagttgactcattggaaaagactctgatgttgggagggattggggggcaggaggaaaaggggacgacagaggatgagatggctggatggcatcactgactcgatggacatgagtttgagtgaactccgggagatggtgatggatagggaggcctggtgtgctgtgattcatggggtcgcaaagagtcagacacaactgagcaactgaactgaactgaacccagttaacaacagaataactagtatgctaacactggcaagaagttcatatttattcttttatatttatatgttgaaaacaatatgggctaattgcttataaagttgatagatatctttttatgtttaataccattaaattttttattactaaggcttttgtatatttctaagttaaaactggaaacaaaacaaacagcaaacaaaaaaaactccaaaattctccagctagctcttgagcttgaacatgcaaacacaaagccacaaaggaaaactgagaacatgcaaagagctagaaagcttaccatctggatagtacataggagcatgatctatcctattcatgaacctaaatgtgattttgactttttgacaccacacttatggcagaaaatgaagaagaactaaagagcctcttgatgaaagtgaaagaggagaatgacaaagttggcttaaaactcaacatttagaaaactaagatcatggtacctggtcccatcacttcatggcaaatagatggggaaacaatggaaacagagacagcctttattttgggggggctccaaaatcactgcagatggtgactgcagccttaaattaaaaagacgcttgctccttggaagaaaagttatgaccaatctagacagcatattaaaaagcagagacattattttgccaacaaaggtctgtctagtcacagctatagtttttccagtagttatgtatggatgttgagagttggactataaagaaagcttagtgccaaagaattgatggctttgaactgtggtgttggagaagactcgagagtcccttggactgcaaggagatccaaccagtccatcttaaaggaaatcagtcctgaatattcattggaaggactgatgcgcaagctgaaactccaatactttggccacctgatgtgaagaactgactcactggtagagaccctgatgctgggaaagactgaaggctggaagagaaggggacgacaggatgagatgttggatggcactactgactcaatagacatgagtttgagtaaactctgggagttggtgatggacaggcaggcctggcgtgctgcagtccatggggtagcaaagagttggacaaaactgagtgaccgaactgaactttcatctttaaagtgatatatccagagcttaattaacaagatttccccaaaataccagaatgtggcaaggtaagaaaaacaagttcaaaattataaacctacatcatcatcatcttttgctttttgctttgcatcttcaacttctgcacgagctctagtggggggagggaaaaacaaaacacgttattcaagttgacttcaactttttaaagaatagagaataggtcaaaaattttaactaccgtttaatgattattttttttcttccaaacagagtatttagctgctttcatttaagggaacattattatagcactgttgtcagaaaaccaggtattaaagaaaaataatgaatgtttacagtttcctgattagcaacatctgaacagactaacttctttcacgatcatgacatacacaaaaaattataatagtcaataaatgggcgggtctgttcagagtagacacaatcagccaggcacttaaccctatcccaggcagttctgtgccctttgtgacttaagaggactaaaggtagcagtcttgttataatcctggtggtacactggcaatgcttatttggtttagaacaacacggtaaacacttacttcctaagctcttcttccaattctttgttcttctcctccagcttcagcttggcttgtttcacagcctccagctccccctgcagcacatctttctcacaggtaagttcatctacttttgctatcaagtcattcttcactacattcaaggcatttctaagaagcacatatttaaaaaacaccattacaaataaatattctatctttaaccttatttctcttatagactaaagtaactacaatcaaaaagctaaataataattgaatgcttcaaagatactctatgctaaataataattgaatgcttcaaagatactctatctgatgttatctgtgggttttaaaaaaaaagcccacaaagtaatggcctgtttttacttttcccacttaccaaagaataaatagataaggcaaggcagaccaccaaattattaaaagtcagaattaagattaaatttatagcatccataagggtattattcttaacaacttctgaaacgatactacacaggacacattcagaagattaagagaaacgcatggatacttgtagggtaaaaggagatcagaatctgtttatggggaaaaaaaacaaaacccagagcaatgaaacctatctattagtgaaattagggcccattaactatctgcttgtgtacatgtgtatgcacaaggccatacacagggaaggggaggagatagggtagtaaatctgcatttgtactgtgttaaagatatgaccattgatatggatgagaagaaaattcagtatctcttgtttgctgttaaattctgtatatacttacttggtttccaacagttgtgtattttccaatataagattttcaacttcacgacccattcctatcaaagaaaaaagataaaaactttgaaaataaatttattaaaactatatatgtagacttaaaacaagctatagtcataaatttaaacattttatctgtccctcaataatcttattttgtctataatttcatttttatatgtttatttgcatacattataaaattataaataattatctaccagagaacaaagctaaaggttttcttaagtctgtattttgcttctcctagataatattccaaaacagtgaagacttttctgccaaatatttttaaaagtaacagtatttagtggggaaaaaagaatagcattaatatggatgaaaaatcatttctaaatcacacttaatattgtatgtaggcttttgcctaaaaattaggtcttattaatacagaacagacagaaacaagaaacagaaccccaacacagatgaaaccttaccaaagaaattatggtcttaaagcccatgcattccatgtaaagcaaaaacaaagaacaagagatgtttcatgtgagaaacagcatgaaaatatagatactaaatccaacaagttttatgcatgacatgaaagacatttgaaagcacagtgttatgatttaatgcataatgatgtggtaaagacagaaattaagacaatttccttcattcataaggatgctctgatatgttattaattctttcataaaataaacttaaaaaataaatataattagaatgaaaattccagatcaataatataaaggtttcttcaaagtgccctctttgaaataatgtttacttgtcaatttatagaaccttgcttaataacttaatgagtactgtaaggtgggtggtagaatattcaatgcaagatccaacgtagtgatcttcagggagaagaaagctattcagtttgtgacttgtaagaaactgaagaaattaaacaacacactagggaacatacctcaaaaagttacaaaaacaaagcaaaaaaaaccaccaaccattccatgtttcataagctaatattggaaaattacatacagtggaagaaataatattcataacccacctaaaaaaggaaatatttctaaagaaaacaacaaaaaattaaaagagctaacatgtctctttattttaaaaaagaggtaatatttcatgtaactaaaagataatttaaaacacaaccaacttgggaatgctagaagttctctgctcacttatggactcctatattgtctgtattataattatctcaggtattctcaaagaacaaagtacttccaccatgaagaataaataccagaaacagtagcttatttaatcatctacatattatccaaaagctgaaactaaatacaaactaaaacagtttccaaattccaatttaaaaatgaatttgacaagatatgttgaaatatttgctttaaacactaataaagctatagagtcaaaagaaatagggttgaggctgggtgaaaaagtgtttataatgactgtctgctaaattctcaagcacatagggagataagcataaaagctgaaaaatatatgtggggaaaatatagttgagcagaaaaaaatgagaaagcattaatgagaaaagcagccaagaccacctagcttaaaagctgtaacattaaaggatttaaaagcatacacaccagaatattcccctggggaagcagcccaagcaaaaaaatgaatgagaatctcaattagattgttttcagaaagcaagatccatatttatttcaaaatgagagaaaggagccaataaaatcgaaaagatgtagagaaatcaaacataataaagtataaatatcataaacaggaatatttttgaaatatgtgttctatggaaatcatcttatagtttctagagtttacacattttcagtgaagagttcttctaaaatctagcatataaatttaacacataatcaataccactgtccaaaattttcactttgaaatgtattgataaaaatgatgactataagaaaaatataacttgaagtggccatacttctataaatgtcttcaactaagcataaacttaggtgtaacatgtttggaaaacttaccctattaagacaagcaaaaaactacctgacagttttaaaaataaaacacatctcacttggattttagcactgatttgcaagttaggtttatagatgggattccagattatctgttgcttccttgaggaagtatgcacaattttatctatttctgtatgtgcatttttccaaaagtacactcctcttacaaattctcctgtaaaggagttttaatttcaaaagttaaataagtatagatttagaggtgaaaaaaaactgttagaactatttaacagtccactcactcagttgctgtgccataggccaaagactcaacagtgagcaaaagatataattgtctaggtcatactgagcttatagtctagtcagggaggcaggcacattgaaaaactacaataaagtattatgaagagttgcataataaatgtagtgctatgggaatgcttccagacaactgagctttaactaggagattaaggcagaattcatagaggagggtatgctagttagttagaggcaagaaggagatatacaaacagatacacagaccctttttttttttttttttttaaggaaggaggcaaaaaatcctcatgactggttttgagggaagcgagaaagattcaggatggagaactgagttgatggtgaggtcattcattgagttcatacatgttgatataagaacagccttgggggacataaagaaagatgttgataaactgagttttaactacaaagctctacaaatcatcttagaagtggtctagagtgctgtttggaagtaatagtctggtgctatagaaaaaaatcctagatggagagaaaaagtttggagcaatgagccatgaaaacccagaaaaaacaagagcaaataagacatcccaaacatggaagcaagcctggactaggaacatctgaaagctgggcagagaaaggatcctgcaaagactgaaaagacatcatcagaggcaggaaagaatacagagaactctgacaggacagaacctaaagcaaagactgtttaaagacaaatgctatttgagaagtcatgtgaaataactgagaagggactgctggagacagcaaacaaggctatttctgggaaggttagtgtgaggcacaatgacagactgcagtcacccgaggtgcaagtgaggctagggaagttctgcctgttaaaagtagacatactttcaagaagtctgttttgttcactggtatatcaatctagaatagtgccgggcacataacagatacctgcctcactgatattgatgcaaaaaaccatggctggaaatgggaggagagtcatctggtggaaaggtactaaagatatgcagtcagaagcgggcagtagttttattttaaaatggtaaagaccggaacatgtttaaatgataacaggaagaagttagttaaaatagtgaaattaaaaaattaaatttaatcaatagtaagaaaattaaagaaaatctcaaggataggatgaatgaatgtatgattcacaaattctagaatgtggccatggggggtaagtgacaaaagtcaacggagaaaacagtcactagaaataaagtcaaagaatgagataccaatcaagataaaggacaaactgtgggggattatcttttttaaactattaaaatttgaaaaaagtaatctaaacctgagtacatgcataatgattacaaagaccagggaagagttttacaataacacagtaattgtaaaacaaataatgagttctagaaatggatttatttatcaactgaagacaatttaaggaactttgggaaacaattttaccagttcaaccatgttccagctagtattacaatgcaattactattgctgaataaaacagaagagaagccaaggaacaactacgtgcgttggaggtttcgtttaatatttttgaccaaaagtattcatataggcttaaatcacttaaggtaatatatgaaaacttcaaatctggaacattttccaggtaaatatataaattctgcaaaagggaaaagagagtagtttacagtttattttatttttttcaaagtggaaaggaaatcaggattttgtttgaagctatttattatgcttaattttctgacttaaacaatggaagcttttggaaaaatatttgtttaaaagatgacaattatttctaagcattatgtagcttcttacatctttacaagaaagtaagtttagggccaccaacctcaataatgatattattcactactggattataaggaagcagagggtaaaaagtacgtttaaaaagtactttactctggtaaattacaaaggggaagcatgaaggaattttttgagaggtgatatattgttaattctggtggcggctatacaattctatgcattagtcaaaacaaaaaactgtgctttactatatataaatttgagaatgtgtttaaacattaaaaattattttttctaacatttttttgcatctgttcctcaattttggcagaaaatcagtttcttatatcaaatcttaaaaggaactttccatgcacaatttaatgttaacaaagagcataaatttaaatgtaaaaatggagtgcttcttaagaattaatccttaagatatccttgaaaaatgcaaattcattcaaagcttccaatgttttacttagtggtgggagtctatacctaactaagtttattaatgtactttccatctctcttactttaaataagcctatgggctctgtgtagacagcaactgtgtttccttcaaaaaatacttattgaggacacataactggtaatcaataaatgtgacataaatgaatgcaagcaacacttctctatatccacaagattgacaaacagcaccttttaagaacagtgtaacctatactgaattaccaagggatacaaaaaatgtttggagaccagaatccattccaaaggcacagatttttaatactataatgtattcaatttctataaggtcttaagttataaagaaaggcacatcaaagctaattgacaggagtcagattcatataaactttttttttttttttttaaactcatggtgcaacttgcaagatcttagtttactgactagggaccgaacctatgtcccctgcagtggaagtacagagtcttaaccactggaccctcagggaaatctcattcatgtaattattgttccaagaaactttaaagatcacttagaacaggtgaaaactttttgtgtaaaggcccagatggtgaatattttaggctttgtaaaccacataatccctgttagggacaacttaactctgctattgtggggcaaaagcaactactgtgtgtgggtgcctgtgtgtttgtgggcgtcatatgtgtgtgtgttctatcctgaccaactctttgagaccttatggactatagcccgccaggctgctctatccatgggattttccaggcaacaatactggagtgggttgccatttcctcctccaggggatcctactgaaccagggattgaacccgcatctcttgcatctcctgcattgccaggcagattctttaccactgtgccacctgggaagcccaaaaatcaaagataaaacattaaaaaaaaaaagtgtggctatgtcccaataaaactttatttgtacacaaaaataatccaggagtcacagcctatccaacccctgaattagagctcaagtctttctttttatacacaaagaacctaatgcccagagaggttaagatatttggcaaaagggtcactcactccctggtggctcagcggtaaagaatctgcttgccaatgcaggagaccagggttcaatccatgcgttaggaagattccctggagaaggaaatggcaatccactccaatattcttgcctgggaaatcccatggggtcacaaagagtcagacaagacttagcggctgaacaacaacaaaccagatcaacagtagaagagccaaatacagtatccttttcaaaccaaataatcttcaacaacacaaactctaacatatttctcaagaagctaaaacagaatgctctgtgaaatctcagaaaagtcaagtgaatttaatgaacactatttaagccaggaagtaaccatccatcaatccataaaatctatacgtctatatataaccacatgtatacatatatataaccacatgtatacatctatatataaccacatgtatacatatatcatgtttcttatatgtaatactgttctcagaacatagcaggaaggagttcaataaattgtgtatgtgaattcaaaatacaaactaaaaagcaattcaatcctaaatgcatccatatgtgaagacattttcatttaaaactttcatgacttcaaagaatatgttcctattaattacttaaaagcacaataactctgccccactggacagttagggactgtttttttttttttttttaagtttatttttggttgtgctgggtccttgatgtgcaggcttttctctagttgcgggcgagcaagggctaccctctagctgtgcacaagcttctcactgtgggggcttctcttgtggaggacgggctctaaggcacacggatttcagtagctgtggcatgggggctcaggagttgcggctcccaggctctagaacaggctcagtagttgtggtgcacaggctgagttgctttgtggcacgtgggctctccccagatcagggatcagaccagggtctcttgcattggcaggtggattctttaccactgagccaccagggaagcctcagttagggacatttttaggaaatgttccattatatcatttaaaaatctatttttaaacagtatgatactatttcagataaactatcatacctagtaaatctgctccttcatccacatctccaattagacctgaaccagctgaagacagttcttcaaagagagattctgtattgcgatcaaaagctttgttctctatgcctttggtgggagtgctaggcaacaaaaacaaaaccaaatcaacagatgtcaaagatgtttttaacagtgcaaaatgaatacaaaaggctaagttacacaagaatttttaacctgtaatatttaatataaaatataatttaaaagaatttctcacaggtttcctaagatattttcattatattgcacagagagaactagtgaagaaaatacagaatgtttttgtggtcagatcctagcagacacaaaacaaaaacagcagctaagagagagcactattctgcactgttcaggcggtggtctaagtcctttcacagattaccttgttaaaactacatctactctacaaaagagctgctgctcttatcccaactttacagaagaggaaactaaagaggttatggaatttgccaaaatcatccagcaaatgagtcagaggcagaactcaaacctaggcagccaggcttcagaatccatgatctttaccatgatctatgttatctgggtatggaacagccattttatttctcttttaagggcaaacttggcaagatctactaaaatttaaaatgcaaatacccagtgaccaaggacttgatgtctaaaatactcctacagggaactccctggtggtccactagttaggacttggcactttaactgtggtggcccaggttacggaactaagatcctgcaagcagtgtggtatgggcaaaaataataataataataataataataataataataaatcccatgaaagctccgtcacaagaaggcaattatgtatgtaaaaggatggtcagagcagcaaaagttgaaacaacccaagtgatcattaaaagggcacagatgaaataagttatgtgtacatctaaaagtttaaaattttaactttaaaaacattaaaatagagcttcaaaaatgaaagaaacccattatatagaggcgctttttaaaaagcaagttgcaatacagtgcatgtaagccctttttgaagtggtatgggagaatggggaaatgtgagtgtctaagcattaatgttacattaatagaaaaaagtctgcacaagatttccagttaaatatggtggagatagtaatctatcacacaataattcaaaaatgcaactaaaatgacagtaaaagaatctaaaaagtatctgcccacaaggacagagggaacagaaaaagaacctacagcagacacaacatgaacaaaactctgtaagatagaaaacatgtgggtaaacattagaaactgatttaactgaccagactaagctgaaactcaacccagcagtgtttagagagaaagtcagtatgaggccaaaattcatgaaaagcttaggaattgacataaccagcaatctgcagacagaagtatgcaagagaaacattaagatagagggatgggatgaaagtaagtacaagaagcagtataagaacctaaatccaaccctccagagcagtgagacctcccttttcctggcattactccctgaacaacagaagccaaggtcaaatgttataggcagaaaactgaagaatcaatatcatttacttgttcactcgctaaagtcatgtctaactcttggtgatccgaaggactatagccacgagactcctggacatgggattttccaggccagtataccagagtgggctgctatttcctactccagaggatctttccagctgaggtaaagaacctgcgtctattaggcttcctacattggcaggcagattctttacaacaaacaccaaaactttgttgttcagttgctcagttgtgtccaactctttgcaactccacagactgcaggacatgaggcttccctgtccttccctgtctctcagagtttgctcaaactcatatccattgagttgatgacaccatccaaccattttatcctctgctacctgcttctccttttgccttcaatcttttccagcatcaggatcttttccaatgagcagttctttgcatcaggtggccaaagtattggagcttcagcttcagcatcagtccttccaatgaatattcagggttgatttcctttaggattcacttctttgatcggctactagtccaagagactttcaagagtctactctagcaccaaaattcaaagacatcagttcttcggggctcagtcttctttatggtcgaactctcacatccatacatgactactggaaaaaccaaagctttgactatacagatctttgttggcaaagtgatgtctttgctttttcacctgctgtctaggtttctcatagctttccttccaaggaacaaaagtcttttaatttcatgactgcagtcaccatccacactaattttggagccccccaaaataaaacccatcactgcttccactttttccctttctgtttgccatcaagtgatgggactgcataccatgctcttagctgcatgttgagtttcaactcaactttttcactctcctctttcaccctcattaagaggctctttagttactcttcactttctgccattagagggatataatctgcatatctgctgttgatatttctcccagcaatcttgattgcagcttgtgattcatccagaccagcattttgcatgatgtactctgtatgtaagtcaaatagggtgacaatatatagcactgtagtactcctttcctaattttgaacctgtcagttgttccatttaaagctgtagctgttgcttcttgacccacttacaggtttctcaggagacaggtatggtggtctggcactctcctccctttaggattgccacagtttgttatgatccacacagtcaaaggctttagggtagtcagtgaagcaggagtacagatgttcttttgggattcccttgctttctgtatgatccagctaatgctggcaattcgatctctggttcctctgccttttctaaacccagtttgtacatctggaagttttcagttcagttcagtcgctcagttgtgttcaattccttgcgaacccgtggactgcagcatgccaggcctcccagtccataccaactgctggagtttactcaaactcacgtccatcgggttggtgatgccatccaaccatctcatcctctgtcgtctgcttctcctcctgccttcaatctttcccagcattaggttctttcccactgagtcagttcttcgcatcatgtaaccaaagtattggagtttcagcttcagcatcaatccttccaatgaatattcaggattgatttcctttagaatggactggttggatctgcttgatgtccaagggactctcatgagtcttctctaacaccacagttcaaaagcatcaattcttcagtgctcaggtttctttatcgtccaactctcacatccatatgtgactacttgggaaaccatagctttgactagatggacctttgttggcaaaataatgtctctgccttttaatacgctgtctaggttgatcctaacttttcttccagggagcaaacatctttttatttcatgactgcagtcaccatctgcagtgattctggagccccccaaaataaaggctgtcactgtttccccatctatttgccatgaagagatgggaccagatgccatgatcttagttttctgaatgttgagctttaagccaactttttcactctcctctttcattttcatcaagaggctctttagttcttcttcactttctgccattaaggtggtgtcatctgcatgtctaaggttattgatatttctcccagcaatctttattgcagcttgtgcttcatccagcctggagttttgcatgatgtaatctgcatataagttaaataagcagggtgacaatatacagccttgatgttggaaccagtctgttattctttgtccagttctaactgttgcttcctgacctgcatacagatttctcaagaggcagatcggtggtctggtattcccatctcttgaagaattttcaaaagtttgttgtgatccaaacaatcaaaggctttggcgtagtcaataaagcagatgtttttctggaactctcttgcttttttgatgatccaacggatgttggcaatttgatctctggttcctctgccttttctaaatccagcttgaacatctgaaagttcaaggctcatgtactattgaagcctggcttggagaattttgagcattactttactagcgtgtgagatgagtgcaattgtgtgatagtttgagcattctttggcattgcctttctttgggattggaatgaaagctggccttttccagtcttgtggccacaggtgagttttcaaaattgctggcatattgagtgcagtactttcacagcatcatcttttaggatttgaaatagctcaactggacttccatcaactccatagctttgttcatagtgatgcttcctaaggcccactttacttcacattccaggatgtcttgctctaggtgagtgatcatacaatcgtgattatctgggtcttgaagatcttttttgtacagttctgtgtattcttgccacctcttcttaatatcttctgcttctgttaggtccatatcatttctttgcccacctttgcatgaaaagttcccttggtatctctcattttcttgaagagatctctagtctttcccattctattgttttcttctatttctttgcattgatcactgagtaaggctttcctatgtctccttgctattctttggaactctgcattcaaataggtgtctgtttccttttctcctttgcattttgcctctcttcttttcacaactatttgtaaggcctcctcaggcagccattttgccattttgcatttctttttcttggggatggtcttgatccctgtctccggtacaacactgtgaaccttcgtccatagttcttcaggcactcggtctatcagatctaatcccttgaatctattcctcacttccactgtataatcataagggatttgatttaggtcatacctgaatggtctagtggttttccctactttcttcaatttaagtctgaatttggcaataaggagttcatgatctgagccacagtcagctcctggtcttgttctggctgactgtatagagcttctccatctttggctgcaaagaatataatcaatctgatttcaatatggaccatctggtgatgtccatgtgtagtgtcttctcttgtgttgttggaagagggtgtttgctctgaccagtgcattctcttggcaaaactctattggcctttgccctgcttcattctgtactccaagccaaatttgcctgttaccccaggtatttcttgacttcctatttttgcattccagtcccctataatgaaaaggtcatcgtttttggacgtgagttctagaaggtcttgtaggtcttcttacaactgttcaacttcagcttcttcagcattagtggttggggcatagacttggattactgtggtactgaatagtttgcctcggaaatgaacagagatcattttgtcgtttttgagattgtatccaagtactgcatttcggactcttgtttactatgatggctactccatttcttctaagggattcttgcccacagtagtagatataatggtcatctgagttaaattcacccattccagtccattttcattactgattcctaaaatgttgatgctcactcttgccatctcctgtctgaccactttcaatttgccttgattcatggacctaacattcctggttcctaggcaatattgctgtttacagcatcagactttacttctatcaccagtcacatccacaactgggtgttgtttatgctttgactccatctcttccatctttctggagttatttctccactgatctcccataacatactggggacttactgacctggggagttcatctttcattgtcctatctttttgccttttcatactgctcatggggttctccatataagaatactgcagtggtttgccattccccttctccagtggaccacgttttgtcagcattctccaccatgacctgtccgtcttggatggccctccatggcatggctcatagtttcattgagttaaagaagttttcagttcatgtatgacaaaacctagctggaaggattttgagcataacctcactgtcatgcaaaaggagcaccaatgcacggtatttgtccattctttggcactgtctttctttgggattataatgaaaactggcgttttccagtcctgtggccactgctgagtcttccagatttgctgatatattgagtatagaattttatcagcaccatcttttagcaattttaacagctcagctggaatttcatcacttccactagcattatttttagtaatgtttcctaaggcccacttgactttgcactccaggatgtcaggctctaggtgagtgaccacaccatcgcggttatctgggtcattaagaccttttctgtatataattcttctgtgtagtcatgccatctctttttaatcttttacttaagtatgagcagaacagccaaaaagcaccagacactcaaagaaagcctccattataaaatttaaagccccaaagtcatggactgtgatagggtactgagaataaaaggagacaatgaatgcaaacagcagcaaaaatttggaaaaaaaaaacaaacccacaataattttattttcataataaagctacatccacaagagaattgtaggatgttataaaaagtaaccatccaagaaaaagcttttaaggaaaaaaaatgatgagagttgagagataaagttggggaaatcatccagtaattacaacaaaaatagaagagatagaaaaaaagagggaaaagggatttatgagtgtcagttcagaatgttcagtatctacctaatagttccagaaagagagaagacaaagagaaataaagaaaaaagttctcaaccggaaataaaaatttgcagatgaaacacgttacctcagatacagaagaagactcctacatcatcatgaatttttagaaaggaaaaaacaaagcaacaacaaatagggacaaagatcctaaagcttacgaagaatatatataaaaaagcaagagtccacatagcaacactccaaactgaccatgataatgaattaatgtcttcacagttgtgaaggaaaacttacaaagattttccaatatagaattcgtattcaatcaaactatgaatcatccctttaaatgacatatatcatattcaagttctcaaaaatcttagttgcaaacagccttttccaggaaggctagtaggaatatgttctgccaaaacaaaggcataagtcaagaagcaagatgacatgaagcagaagaggtggcaagaatacacagaagatacacatacaataaagatacatattaaaaaaaaatacatacacatacaaaaaaaagatctcaatgacctggataaccgtgatggtgtgatcactcacctacagccagacatcctggagtgcaaaatcaagtgggccttaggaggcatcactaaaaacaaggctagtagagttaagaattccagctgagctatttcaagtcctaaaagataatgctgttaaagtgctgcactcgatatgccagaaaatttggaaactcagcaatggccacaggaccggaaaagttcagttttcattccaatcccaaaaaaggacaatgccaaagaatgctcaagctacatgctagcactcatttcacatgcaagcaaggtcatgctccaaatccttcaagctaggcttgaacagtatgtgaaccaagaacttccagatgtacaagctagatttagaaaaggcagagaggaaccagagatcaaattgccaacatctactggatcatcaaaaaagcaagagaattccagaaaaacatctacttctgcttcactgactaggctaaagcttttgactgtgtggatcacaacaaactatggaaaattcttcaagagatgggaataccagaccacctgacctgcctcctgagaaacctgtatgcaggtcaagaagcaacagttagaaccagacatgaacaaaagactggttccaaatgggaaaagagtatgttaaggctgtatattgtcaccctacttatttaacttatatgcagagtacatcatgcaaaatgccaggctggatgaaacatgaactagaatcaagattgctgggagaaatatcaataatctcagatatgctgatgacaatgcccttatggcagaaagcgaagaggactaaagagcctcttgatgaaagtgaaagagagtgaaaaagttggcttaaaaactcaacattcagaaaactaagatcaaggcatctggtcccatcacttcatggcaaatagacagggaaacaatggaaacagtaaaagactttattttccttcttgggctccaaaatcactgtgggatggtgactgcagccaggcatttgctccttggaagaaaagccatgacaaacctggagagtgtattaaaaagcagagacattactttgtggacaaaggtccatctagtcaaagctatggtttttccaggaatcatgtatggatgtgagagttggaccataaagaaggctgagcagagaactgatgctttcgaactgtcatgctaaagaagactcttgagaatcctgtgaactgtaaggagatcaaatcagtcaatcctaaaggaaatcaaccctgaatattcactggaagggactgatgctgaagctgaagctccaatatttggctacctaatgtgaagagccaattcactgaaaaagaccctgatgctgggaaagacagaaggcaggagaagagggggtgacaaaggatgagctggttggaggcatcaccgactcaatgcacatgagtttaagcaagctccaggagatggtgaaggacaggtccatggggttgcagtgtcagacgtgactaagcaactgaacaacaacaacaacaacaacaagatgacgtagtgcccaggaaacagaacagaggagagacatgaaaagaattcccagcaagaaaatgagagcaaattccaggaccagagcaaacacaataaagtctaccattggagaatggaaatagatgctgccaagaaactggttttatacttggccatttgagaatgtttacagttatgatttgttgggtatctgtcagtgaatagtgataggcatgtagaaacctaagcaaaagcaaaaaaaacaaaacaaaacaaaacaaccctgaggctttactaaaaattaaagaaaatcaaagttgtaaaagaaaggaaatataatcatagcataatctgtgagtaggctgttgttagtatttatataatcataatgatacaaacagtgaaccttaatttaaatgaaactgaaatataattatattgggagaatgaaaggaaagatgatggtttaaatagctatgtccttgtcatcattcactataaagtcaatagctaataatgcagccttttttaaacccgtggtcctaatgtgatccacagaattcagaaaatgatgagtgactatttgctctattttttcaaagaaaatacatagctagtactgttctagacacacaggagtatagttaattcactatacaagtggggtgctgtagggcattaggacttgattttctcacagaatcccaactgaaaaagagagagaccaaagaatagcacatgaagatgtgatttagatacctgaagataaatactcaaagtgacatgagcggtggtggtaagagatatcctcttgagaatggaaatgaaggggcagtaggggcaaggggctactactgcccttcatattttgtattaccatttgaccttaatactgcatacatacattgaaaaaaaaatgtgttagttgcttagtagtgtgcaattttttgcagtccaatggactatagcctgccgggctacgctgtccatggaattctccaggcaagaatactggaatgggtagccattcccttcccgaggggatcttccccacccagggtctgaacccaggtctcctgcactgcagaaagattatttaccatccgagcaaccagggaagtattttgttattaccatttaaccttaatactgtatacatgctttactctaataaaaatatgtttttgatttttaaaaagaggtccaaaatgataagtgggcacaagtgttaataagtaggtttaggagaggatggaaaagcaattttcactttttatacactgcatcgtttaatttcttaaataaacaataaagaaaaaaatatttcaatagggcacagcctttgaactcatagtcttaaactgaatgctagttctacctcttgttagtctggacaaaatagcatacaactctgagcttctttatatgtgaagggaaggacatctgtcttgtaaggttataattaagataaaattatatgatggtaacaataatgttcagttcagttcagttcagtcgctcagtcatgttcgactctctgctaacctttattgaactgggcactctgccaatgatttaacatatattgattcatttacaccttacaatcatctacggtattatcataattctctttcatggatatagaaacttacttcagattcaaatccaggtcaggattagaatgcatatagtcttatcctagggttttcctgatagctcagaaggtaaaaaaatctgcctgcaatgcaggagacctgggtttcatccctgggttgggaagatcccctggagaagggaacagctacccactctagtattctggcttggagaatttcaatacagatgacgttcattaagatgatacatatcattctcctttaatcactaaacagcctccccatgtaaaatgatactaaaatgagactaatttcttgcagtaatgaaaccattacagttttgaagggaatacattctcttcttcctgatttggaggaaggaataggttttttcaaattatactttccccacttttgcttttatgttttcccaagttccacaaaccatggaatatttctttatggaatactccttcactgtcttttttccccatccttctgcatgcttctagtccctgatgctacaaaggtaacagttcacagaacgtgtaaattatgtacaaggtctggcttcaaaaagagaaaacttaaatataacatcaacatttcttcagcaaaacatctgaatgcactttatctggtcagagaccggggaacagcaatgtgcttaggggagacgggaaaaggaaagaagtaagatgtcccaattagacctgaacagtaccttgagcctttatatccactgagatctttgtccatatccaactcaggagtggattcaatgattgcctgaacttcggacttctcttcattttcagcagaaccttagaaaaggacaagataacaaaaataatgcatataatacatacagcccctgacatgaaaattgtttctatggttataaatacatcatttgatcacaaaaatttttagagagctgagaaacacaaggttagacagacaataggtcatatattcaattaacagtcaatatggaaattaaaaaaaaatcaaccaaagttttcattaaaaaatcaacaaaagttttcatttgtgttactttggacacaatgcactgtacaccaggccagaactcagtattttcattttatttaaggggtgaaataaaaagagattaaggacagagactaatgacctatggcagggaacagataaagaatgtcctcctgcctttcaggctttccaaaccccagccactctctacccacgccatttttactctctaaaacttaacttaatcatcacaacttttaggctgatttacaactgagtacaattttatgaatctgcagcagcaacaacaccggagatgtcccttctcacagttgcgtcatttgcattcacggaagactctgccagtatagaaaaaactaaggttacttacctgttgatatgtttctagtttcttggactacttgtacttcaatatgcttgcttatctctgacgtatctggtgtatctgcaaccttcacaattccttcattctcctcatgtaagggagtatcgctaggtattgctgccacatctgaagcagttgttgacgctggagtggtagctttagatcctccctggctaacatcagaaagttcatcctacaaatataattagggaaaacattttgatgagtattttatttaaatggccttttaaataggttaagaaacttgagagaaaattctgttaaaaactggtaagtcacttattaccaaaggtaatcaacaaataatctctgtagcttgttttcaagtaactggatactagttaagtaataatatttttccagacatatgttgagattcttctaaatagaaaaagtatagataagggaggactggcagtattatcaataaaagtatatactaatgtcatcatcagagtttataatggcagttctaatttgcacaatcatttgataatgaagacttgtctcaaaacacttgaagatgtactatgtggttgttattactgttcggtagctcagccatgtccagctctttgtgacctcatggactgcaacactccaggcttccctgtccttcaccatctcccagagtttgctcaaatttatgtccattaagttggtgatactatctaaccttctcatcctctgtcgccctcttctcctcctgccctcaatctttcccagcatcagcgtcttttccaatgagtcagctcttagaatcaggaggctaaagtattgaagctccagcttcagcatcagtccttccaatgaatattcagggctcatttccttcagattgcctggtttgatctccttgcagtccaagggactctgaagagtcttctccagcaccccaattggaaagcatcaattcatattcatgctcagccttctttatggtccaactttaagggcacatccgtacatgactactagaaaaaccacagctttgactattcagacctttgttggcaaagtgatgtctctgctattcaatatgctgtctaggcttgtagagcaactgtcttttaatttcatggctacagtcaccatccacactgattccgaagcccaagaaaataaaatctgtgactgcttccacttcttccccttctatttgccatgaagtgatgggaccagatgccatgatcttagatttctgaatgctgagttttaagccagctttttcactcctcttttatcctcagcaagaggctctttagttcctcttcactttctgccattagagcggtatcatctgcatatctgaagttgtttatatttcttgattctagcttctgtttcctcctgcccagcatttcacatgatgtactctgcatgtaagttaaataagcagaatgacaatatttgaacagtcaattgttcccaattttgaagcagtcagttgttccgtatctggttctaactgtttcttcttgacccacatagtggtttctcaggaggcaggtaatatagcctggtactcctatcagtagaagaattttccacacctgtgatccacacagtcaaaagctttagcatagtcagtgaagcagtagatgtttttctggaactcccttgctttctccatgatccaacaaatattagcaatttgatctctggcacttctccctcttggaaatacactttgtacatttggaagttcttggttcaagtactgctgaagcctagctttaaagattttgagcataactgtgctattatgtgaaatgagcccaactgtgtggtagttatgcaggtgacaccaccctaatggcagaaaacaaagagcaattaaagagcctcttgatgaaggtgaaagaccagagtgaaaaagctggcttaaaacccaacattcaaaaaactaagttcatggcatccggtcccatcacttcatgacaaatagatggggaaaaaatggaaacagtgacagattttattttcttgggctcaaacaatcactgtgggactgagactgcagccatgaaattaaaagatgcttgctccttggaagaaaagttatgacaaacctagacagcatattaaaacacagtcatcactttgccaacaaaggtctgtatagtcaaagctatggtttttccagcagtcatgtatggatgtgagagttgaaccataaagaaggctgatgccaaagaactgacgctttcaaactgcggtgctggagaagactctggagagtcccttggactgcaaggaaatcaaatcagtcaatcctaaagaacatcaaccctgaatattcagtggaaggaaagatgaagaagctgaagtgccaatattttggccatgtgatgcaaagaaccgactcactggaaaagatcctgatgctgggaaagattgcgggcaggaagagaaaggggtatcagagtatgagatggctggatgccatcactgactgcacagacatgagtatgagcaaactcctagagatagggaaggacagggaagcgtggcatgctgtagtccatgaggtcacaaagtgtcagacatgactgagcgactgaacaataaacaaatggaatgaaaagtctctgctacagtgtttgactgaaagcacaatatttttttctcctatggaagaaattatgaaattttgtcactaacaatgcatccatctaaagatagaaggaagaaagacaatcctaaatattagcctgttgttaaatataaaatgtatacactggtcaacagtaagtccataagactccaggtacaaaatgaggaaaaatttttactaggacctaaatggaagctggaagcattgatatgaattatttactgtgaagttgtaggggagttgcatgctattattttatattcaatctgtgacagcaagagacctctaatccctattttatgttgctctatgtcaggctgtactgtttcagctaccaatttttactacaaatgctgctttatctatctgaagaccaccaacctaacaatttgaattacctgacgtcattaagatgtcctcttcaatgacacacgtagtggagacttactgggtggtcaagtctctttctaataaatgtatttgttttgtaaccccactcaaagtctctcaatctttaagaaactctattacaggctttcaagtcactaaacaatgcccacaaaactaaggaacctgacttggggttccagtgctgtaactacaagtgctgtgcaagataacaagtcctggtgagatgtgaagaaactaggacccctgtgtactgctggcggggtgatgtgatggtgcaactgctatggaaaacagtataacatttccttataaaattacaaatagagccaccacaggatccagcactacccctcctgcttataaaaccaaaagatctggagacagggattcaaagagatatttacacacgcacattcacagcacaactatgcatagtaatcaacaagtggaagtgacctgaatgtccaacaagggatgaaatgtataaacaaaatatggagtataaatatatatatatatatatatgcatgtatatatatatgtatacacacacacacacaacagaatattattcagctttaaaatggaaggaaatcctgtgatttccttgatacaacatggatgaatcttgaggacattatttcattaagtgaaataagccaatcacaaaaaaacaaatacaatgtgatttcaaaggttacattcatagaaacactaagcagagtggcagctgacagtgctgaggggagggaccgaaagaggagtttaatgggtctacagcttcagatgtgcaggagagaaaagctctagcaatctgtttcacaacaatatgaatattcttaacactactgtagtgtatagttaaaacggttacaatagtaaacttcgcttttttttttttaatcacacatacaaaaaaagagaatgggggaaaaaagagagaataggtggcattaattttagcttcacttgagataccatggtgaaaacgatctggtctttgtgctatttttctactggttttagatatcaggctagaaggctatacacctttacaaaatactttcaactgttccattcatcaatgccttgcatacccagtactgtagagaatatacatgtcacatattatctgccactgtcccattgctagttatattcagagagactgtaaagtaagttcacaactataaaaataaattagtcaattaaggacaatttagaaatgttctaattagtgttttcttaagtagcttgcctgatttcatctgaaataagctaaaaaagagggcaagtaactctgttatataaacctgtctttagtgtcaaagattttaagcctaatctaagtaaaagacaaacagaatcacaaaattctgtgtatacatgtattttctagagagcttcataactttaatctgattcctagaggaatccgtgacccaaagaaacactgagaatcactgagatgacataagtctagctctaagttatactataggttcaaaactgagatgacataagtctagctctaagttatactacaggttcaaaaaaatttagcttattaaaacagaggcacagatgacctacttctgaagatatttctgaaaatgatactggttccaccgttatgaaccaggagatggccttaccctggttaaccctgatctagggggtaggacacagtcttactttgtccttatatccccagtgcctagcacatcaagcctgacatgaagtaggctctcaaaagatgtttgctgaatggtgccccgacaggcgctaaacaaatctgtttaactagagaggcagcccatggtaaaatgacttactaggctgtctccaggatactttcaagttgtgtacattctgccccgaggatggtacttgtgcaaacatagaagtcttcttacccagagctgtataaagagaaataagctgaacttccataggatttacttattcttttctctcctttagagattacagtaaagccccagcaactaccgtagaagaaataattttttttcatttcagccggtttccttggtggctcagctggtaaaaaaaaaatccgcctgcaatgcaggagacctgggtttgatccctggggggtaagatcccctggaaaagggaaaggctacccactccagtattctggcctgaagaattccatagactgtatagtccatggggtcacaaagaatcagacatgactgagcgactttcactcactcagtgaataacatcagtagtcttccaaactgagcacttgatatcttgagagcagcagttgaggaagtaaccaaaagttaatcactttcatctactttttgcaaaatgttttgaaagcccattctcacctcctgttctatagccttcagaggttcagggctacttctgacctgggaatagggaaagattataaaagagaaaaaaaattcatatatttactaggtgtctgcatatgtctaagtatctttggcttatgctacctctcaggatgacaaggtccatctctattttctactttgttcaaatgagggtttgggggttttgttttgacttaatatcacctcctctaagtctctatcttaagccatatcatgactcaaaagccaccacctgggtcttatcttaccctatacttggtcaataagcagtttatcacttaaccgttttcctactcataaggccttccctggtggctcagcagtaaagaatctgcctgccaatgcaggagagactgatcggcaagatcccacatgccccagagaaaccaagcccaagccacagctactgaacctgtgcgctagagtccatgctctgcaacagaagaagccatcgcagcaagaagcccacacaacatgactagcccctgcttgctgcaactaaagcaagcccacatagcaacgaagacccagctgaactgaagcaaaagtcactcagttgtgctggactctttgtgaccccctggactacacagtccatggaattctcctggccataatagtggagtgggtgtaagttcccttctccaggggatctttccaactcaggaatagaacccaggtctcctgcactgcaggcggattctttaccagctgagccaccagggaagcccaagaatactggggtgggtagcctatcccttctccaggggatcgtcccaacccaggaatcgaaccagggtctcctgcacttcaggggattctttaccagctgagctaccagggaatccccccaaaagagaaatcttcctgaaatttatcctaatcatcttgagtgattaatgtagtaaatatcccaattttgcatccttggaaatgctaaacacactcttcttccccctgcctcaccccctatcatttctgaaactgacagagaacactaataattaaagggtgaccaagattcaaatcctttctcaaaaaacatttatttactgatattctctacttgtacatttgccctcgttgagacaacagtgtttctcttaaacaggaagcaacttcaagttttaaacattcttagtctggaaatccatcagtctttttgaaagtctaaaatatagctgtgctgcactctcttagttccacccaaaaaagtacagatgaacaagaaaagattcactttttttctaaatgaaacataattgacttgcaacattatattagtttcatgtgtataatacagtggtttggtatttttagacattagaaaatgaccaccaagtctaagtaccaactgttgccatacaaagttattgcaatattattgactgtattccctatgctatacattacatccctttgacttctttattctatgaatgtagctttgtacctccctcacctatttcactcatctcctcacaccccactcccttccggcaacttcaatttgtcctctgtacctgtgagtctgcttctgttttatgtttgttcattttgctttgtgtttttaggttccacatatgagagaaatcacgtggtatttgtctttcactgactgatttttttcacttggcgtaataccctctaggtccatccatgttatcaaaactggcaagatttttttataaggttggatgatattccatttaatataccacagcatgattcactttgtacaaaccagactgcatctcctttaatatctgtttacatgagctttgattttggattttcatctttaactcttctcaactaacatttcatcaaaagctaggtaaataattctctaaataaaaacgaaaagactgcaaatatgtatttcaaaatggaaaacaaaaagctgcaggaaatacttaaaagagtataaactcatttatcatacaaagacatatatgagtatgtattatctatgtgaaatatggacttccctcataggtcagttggtaaagaatccacctgcaatccagaagaccccagtttgattcctgggttgggaagatctcctggagaagggataggctcctcacgcccatatttttgggcttcccttgtgactcagctggtaaagaatctgaccgcaatgcgggagacctgggtttgatccctgggttgggaagatcccctggagaagggaaaggctatccactccagtataatccatggggtcacaaaaagtcggacatgactgagcaacttttactttcacttttcatgtacatatgtaaagaaaggagcatgaagaatataccaactgaggatataccaataactgaggtgaaggaatggaatttacagtttttactctagattctgtattatttgattgtgaaaccttattaacataacctttataaaatatgtgatctcagatcagctttacatttctagcatctggcattgtttatgacccagtaggtatcaaagttttttaatgtaaaaagcaaagtaatttttcttcaacagaaaatacttaaagctatttttcctaagagtttgtttaaacattaaatatcaacagtaataaatatgcatgtgccaactacttcaaaagaagtcacattagaaatataagctttaaatatcataatttttaagtgttatttttaaccaaccaagttttaccagttttcattctcaacatacacgagcatcttggtcaacatacaacataataaatatgccaaaaagagggggagaaaaatcttatttattaacacccaataaaaaaaaactaatctactgcatattttctaagcaagaatttaaaagagccttcccttttaagtatgaatcttataattttgtcagtatacctcaataaaaatgaatgaatgaatgggaaagtaccaaaatattaagaagagtaaatcttaactcagttttccctttaaacccccactgtcagctgtggatgattcctgaagttatcaaataaggatatacttgagtgagaaagctggtaaataacaagtaaagttattccctagtggtgcagtagttaagaatctgcctgccactgcaggggctacgggtttgatccctactctgggacgattccacatgccatggggaaactgagtccatgtaccacagctactgagcccacactctagagcccgcgttgcaactacggagcctccatgttctacagccactgatccgcaactagagaagccacggcaatgagaagcctgtgcgctaccatgcttgccacaactacagaaagccagggtagcaacaaagacctggtgcagttaaaagtaataaatttgtattattatttaatattattcaattattggtggatgtattaaataagtcttaatttgagaattattaaataacaattatttaatattaatatgaaataatattccttatgctctgtcccaagcaaaccataaaatattacaacatacagtccatttttttttttgcatcccaacatatattttgaaaacttttacactgatatcaaagacaggcaaagacactacaagaaaattacaaatatcctttacaactactgacatagaagtactgaacaaaacacgagcaaaccaaagcagtacattaaaaggtttatacactatgatcaaatgggatttaatcttggaattttaaaatgggtcaacagataaaaattaatcaatgtgatatgtcaccttaatagaatgaagggaaaaaataaacaaatcatctcaattgatgcaataatagaatgacaaatttcacatcttttcgcaataaaagcacttaatgaacgagaaacagaaactcactatgctgaaagccatatatgaaaaacccacggctaaaaacatactcagtggtgaaagactgtttccccttcgaattaggaaccatgtccacttttgccacttctagtaaatattatattagaggttgtaggcagagcaaatagacaagaagaaataggcgttcaaactagaaaagaagtaaaattatctctattcactgacaacatgatcttatatcgagaaaaccctaaagattacacacacaaagttaaagctaataaatgaattcagcaaagttccaagatagaaaatcaacacacaaaaatcagttgcaacgaacaatccaagaagataattaagaaaacaactccatttaccctagcataaaaagaataaaatacttaggaataaatataacccttaatcaaagtctcagtggtgatgaagctttgaaacgggagaggtggtgtttatacaacattgagaatgcactaaatgccacctgactgtgcactttaaaatggttaatcatgttctgtccaggcaatacccagcttgcttggtttctcttttcctcccaacattttacttttagaatttttcagtgaacacccacatactcatcacctggtttctacccactagcattttactattctattctttactactctttatcacataactacccatctttctaccagtccaagatgaatttcaaagaccctgtcatcatcaatacacttcacccctaaacattttagcacacatgtcatcaaccagagctcggtatctgttttacatatttttgagttaaacttacataaaatgcacaaattgtaagtgtattttgctgagtgttgacaaatgcacccatctgtctaacccaaccccctatcaagatacagtacattaccatcatcctagatatttccctcaggccctttcttagtcaatcccactcacatcccacctgagacaactactgttctaattttgtcctgaccatacattcattttccgttatataaaacttcattcatatagttggtaccacagaacatgtattcttttatctaagacttctgtcattcagcacgatgtctttgagaactgcttctcttttagacctccaattttgtaattcagagctaggaggatgctcccagaccaattaaaaaaaaaaaaaagcagaaattgagcaattcacaagacatataaagggaaagggaggaaaaaagtaaagtgaattgtgattcatatggtacttgtgggggaaaaaaagatgtaagcttttatatgcttaaaataactcaggaaggacacaagaaactggttacagaagttgcctcgagggaggggaaagacactaaaggagagatttttttggtaaaaaactgaagcataatacctgtacaaataagttcacatatcacaagtgtaaagctcaattttcacaaactgaatacatctgagtaacctgcacttagaacaagaatcagaatcttgtcagcaccctaaaaacaaaaaagataaccctctatcacaattctttgggggggctatgctgggtcttcaatgcagtgtgggctttctctagctgtggcatgtaggggccactctctagctgccatgctcagccctctcactgcagtggcctcccttgttgggggcacgggtttcagggcacacgggcttcagcagtcacatctcctgggctctagagcacaagcccaatggttgtgggcttagttgctccaaggcatgtgggatcttcctggctcagggattgaacctttgtctcttgcattggaaggcagatcctttaccactgcgccaccaggaagcccgcttctgttgtttatactctggtttttggccatgaggcatgtgggatcttctgacatcttaactgcggcttggcgtgggtctctttggggacatcttgtttgggactcactgctttctggacttggttggtttctttgccagattaagagacttattaaataagttttaataagcaataatttaataacattaaataagcctcagttattaataaatgtcttaatttgagtattaattattgctattaataataataaccccaagcaaaacataaaatattataacaaataatccatttttcttaaaactcaatttttattttactctactgtaaatactaatataaaaatccaaaggaagtaatgtataatataaaccaatggaaaaacccaacataaggatcaaaggaagaaagggcctagaagcaatcacattccaatccgtaagcacacttagtgcctagatcttggttcctaaatattttcttcaataaatagaaccagggtttctttgagaagcagtcaattgcacagcaggtacagggaaaatacaagagcctggagcatctgctggtgtcaggaaggaaggactcagaagagtatgggcataaagggtattaggatgactcctgaaagagctcctgatgtcctaagctgaaacaatttgagcaacaaaataaatacagtaagtaccctacacacaaaactgcaagtttcgaacttacggaaatgagaacgtgcattctatcaatgtcaagcgtgagtgaaattgtgagtctcctactgctgacggtctttcagctctaccatctcccatcttctctccctcctctagtcagcagctcttcttgcctgctgtactactatacttctaaaggtactgtactctaagattaaaaagttttctttattttctgtttgtttttatttgtgtgaaaagtattataaacctgttatagcacagtactatttgactggttgtgttaggtaactaggctaactttgtcacacttacaaattggactttaggaacgtgctctgaaaatggaacttgttcgtttgtacgggacttattataacagtgttggataacctacagaaaaaaataatatctgttagttcaaacaaggaaagaaagaagagagggaatgagtagctctcccttctcaaagaattccagttaataaatgcagaatgaaaaaatagaaaataagcattagaatacccaataatgattattgtagctaagattcactgatgggtactaaaatcagtgaacgaaagtttgagaaacaggatatcagcacagtctcaaaacacatccaccaagatatttattaatcaaattataaagagaaaaacagtaactttacagtggagaaatccaacatacactagatgaaccaagcagtcaaggttaacatcaccattacagcatgctgcttctgtagcaacgttattaaaaatatatagcctcaatctaaccatgagaaaccatcagagaagcccaaatttagagaccgtctacaaaataatcaatcagtattctttcagcttgaaggtcatgaaagacaagcaaagactgaaaagctcacatattacaagggactgaggcaacataactcagtgcaatgtgggatcctggactggatcctggaaccaaaaaagaacactggtgggaaaattggcaaaatctgaatagaagtctgtagttcagctaatagtattgtaccaatgttatttttttagttttaataatcttatcgtggttagttcatattggtggctggcaggtgatgggtatcgttccctctgtactgttgttgcaacttttctctaagtctaaaatgtctcaaaaagaaaagttaaaaaaacaaaaaacaaccaagagcattaactgttttgaaatgtaaaatcatacatgcattttacaacaggatctttaatcacagaagatacaagagtaaggtttaactactacaaagattcaaacttgggaaaactcaagaaataggaacgactaaacataaatggaggaggatggaaaattcttctaaacaagaatgctggctctgttcaggcatttttcgttttgcatgctaagcacatcctctgaagaatgcagcacgcattgaccactggctttatataccaaaccctgctaacaagaccttctcacagcagctccactgaagtatttcaagtcatgcagttttaaaagaactctttaaaactttcctaagtaggtaccaacccaattgcttttagctaaaattgttttttctcagttttaaaagttacattctactaataaccaacaacctaggagactcttaaaatgaaaaactaataacctttttggaatatatatacatatttgcaccttcacatgtctataggcatgtgcaggtgcatatatatacaccagctgtatatatacacatacatatgcatacatgtgaaactagatggaatctatgaaatcattgccaaagtgataccaaccaaggtctaaaaactgtgacaattttatgtatagcatattttaaatatttaaaacattttgttctctttctatatatgggcacaagggagagatatctgaactctaaacttgtaaagcaatgaagaactcacacaacacagcttgtgaaaacacaaatggctaccatccctttggcaggcaatctggtgctatctagcaaaatctgaaatatgggctttgattcagcaatcccacttatgggaactataaataccagcataatattatgtacaaggtttattcaactcagcattgcttgtaatggcaagagattaggacaaagtgaggtgtcctatcagtaaagtagattttaatggcagttggtatatgtgatccctttcccctggcccttcctctgcaattctgatgtatcattcatcttccttcattcccttgttttcaatttctttttacattggactcttcttctaagcacacaaataaccccgtctgtcccatttttgttgctgttggtttgtttctaattttataggactctagaggatgtgtagggaaatatctctgcaagtcatgcctcactaggaaaatgtccagtctaatttttctgggatagtttttggagcttttcctttttcttggagccaccattcttgcttccctgatagctcagttggtaaagaatctacctgcaaggcaggagaccctggttcaattcctgggtcaggaagatctactggagaagggataggctacccactccagtattcttgggcttcccttgtggctcagccggtaaagtatctgcctgcaatgcgggagagacctgggttcaggcccagggttgggaagatcccctggagaagggaaaggctatccactccagtattctggcctggagaattcgatggactgtatagtctgtggggtcgcaaagagtcggacgggactgagggactttcactttctgttattgctaacagaagcctcttaaagtccactgctgagtgggtccgccttgaaagagaatttcctctttttctttggggaccctcttgtttcctgactcttcggggtcattaactgattcctctttgggaaaacttggaaagacttctacagccagctgtctcttcaatactgccactaactagctcctccttggaaaaaaagatttctttttcttgggtttggaggtgataacatggatattctccattctcccaaggagcctcctcaggcttttgctttttcttcttttggggtcttttacttgtctcctcattgctccggggcactactgttttttgaagatgccagggcaatcacagccagccttttcttttccttattcaagtgtttcttctcatgtttctagcttcctagtaatctcagcagctacttcatctgcctgaaccactgcttccttcatgacatgcagatttcttttgtggaatctctccagtctaatacacagaaggacagtccctcctcaacttgttctcaaagtggtgggtacctcagagaagcaatcaatttgtgaggcaatactgcctttattttgccaggtattaggagaggtggcctctgttcttggcagctacttggccaatgaaggtagagtggaaaatgagtctggaaatctgatccctttgctggacccaggaaatcactcagacactaggactggccatcaaccctatagcaagaggcctgtttaagtgacagagccctgatcaaccatcaccatgaatgtcccattctaagagtacttttcctttaccctggcaactcaagatatccttttagtttcctccaaccacaactacttacttcttgagtaacctacatactatgtccttttttcatgaatataattcagttggaggaacaaccttaccctaacatatttgaccattttcagccttagctttttaacttttatttatttacttatgatttttgggctttgctgagtcttcacagctatccgggcttttctccagttgcagcaagcaagggctaccctctagtttcagtgagagcaggattctcattatggtggcgtctcttgttgcagagcacggactctaggggcaagggcatcagaagctgtggcacgtgggctcagcagtcatggttcctgggctctagagcacaggctcagcagttgtggcacacaggctcagacgctccacagcaagtgggatctccccagatcagggatcacacccgcgtcacctgcactggcaggcagattctttaccaccgagccaccagggaagtcccagttagggacattttaaagaaatgtttggttaagtcattttaaaaatcaatttttaaaacaatattatactacttcagataaactatcttacttagtatatctgctcctccatccacatctccaattaggcctgaaccacggagccactagggaagcccccagccttagcatttttataatacattttcaacagaaaatgtcatttaacataagaagtttctttttaccaattttaccagaagccccccaataaaaaatttctgttagtgatacagtataatactcttctgctttcagctttaaactgatctctaaactagatttgagaaccatcgaaaaggtgtcaggtgaagcttcaatgtaagctgtggcattcagattggccttgacagagtactactggtggttaatctaagcaggatacaaatgcgtatgtgggaaagctaaaaagaaaagcaactggatgcaaacatgtggagttcggaaacggccagagattaaaatttgtgaaagctgatgagtggatggtacttacagacatgaaacttgagttacctagattaagtagagcagagggctgagctttaagccctggagaacgccaacatttagaagtccaaaatcagcaaaggaaaaggacctgtgaagaataccagagactgggggttggggtgagtggagagggggtggggagaagtatcctggtgaaagtgaaagtgaaaaaaggcatttcaagaagcagagagagagtattcaaatgtatcaaatgctgctacaatgtggcaagggaatgggaagtttcatgtttagaaagatggatattttggataattgtaaaaaaaaaaaaaaggcacactggtgcagtaagcagaattaaagtctcagaggaataggatgaactgaaaaaaaaatcttcaaacatgctaaagtctgtccctaccttgaggtctttacagatgctattcgaccgtcctgaaacatattcctctggacctttccatgcacccgaacatcttcttttcagggcacaagtcaccacttccaagagaaattccttaactatcccttcttactactattctctagccccttacttagttttataaaaaaaagtacgtaacagtacttgaaattccatgctttcatttatttgtttctgtgttgattttcccaacaaaaatacaataaaaggaataaatatgtacaaatacttttaagttttttaagaacatgtgtatttttctaggtgtaccggtcttggcagatattccattacagttatctcttgttatctgcaggggattgttacagaactccctgtggataccaaaatctacagatgctcaagttccttatattaaatggtatagtatacctgaagatataaccttgttgactacaactctctcacagtgagaaatctgcaataaagcaacaaaaaaggtccataaatttataatcatgggcaaatttcctttcctgtcattcttctgccatagtttccctggttttctcacacaacattttcaccttaaccttatttcacacacaaaaaaatgaactagtaaaattaatattacgagcatactcttaatagagctaggtcatcctcaaagttcttagacaaatgaaagttgaaaaacacattacaatagagatggtctagtcccactgctgtcagacatggaaaccaagactaatgtgtttgttcaatgcaatccacatgtgaactccaaacccaggcttttacaaagttagagacagacatctgactaataacaaagacttaagtaaatagtaaaatatgtcctgattatgagacatatttcacaaacttatcccttttggggtgaggggagaggccgcattgggtctctgttgctacacatgggctttctccagttgcagcgagcaggggctactctctaattgcagtgtgcaggtgtctcgtggtggtggcttctcttgttgtagagcacggactctagagcgcacaagcttcagtagttgtggcgcatgacctccaggcttagccgccccacagcatgtggaatcttcccaaaccaggagtctaatccatttcccctgcattgtttggtggattcttaaccactggaccaccaggggaagtcttgttaagcctttatctcatttactggctccatgtccacagtagaaacaaactggattttattctaaaaacctctcttgggaacacctaccttagtatccctagggaggacacaactcccctgttcaaatccatctgttaatcagtttataactagtcagagaatggaaaaaatgtaggcctactgttaaaaatactttgcagtgggagcaaagctatgaaatatttatttacttcttactgttttgagcacatttcaaagatcaatgaaatgattctaaatgcctctacctactagagctgagaaacagaccatttacattatgccaaaagaatctatctaacatctaaaacaaataattcatttgacaaacatgttctgagagaccactatgtgctaggcaccttttctaagtgctaggggcacggcagtaaataaactgcatggattttacattcttagtggagagaaacaaaataaataagtaagcgacttcatgttttagaggtatcataagagctatctaggggacttccctgatgctccagtggctaagagtctgagcttccagtgcaggggcctgggcttactcttagcgaactagacccgcatgccacagctaaataccctgtgtgtcacaactgagactcagtgcagccacataaactaaaaacaaatctttttaaaaaaagagttatctgagtatttaaaccatgaaaagtaatttggagaaagagaccagaaaaaaagagataaagatgtaaataactcaactgtattcatttaggtggtctgtttgttttatgacagagtagattttctaatgtaacaaggttcctttataatcagttccctttataaatattccactttataagatatagactataacttcaaatatttttaattattagtatatctccactcttagaatatattattatttatatttacaacttattttgtaacaagttcttggtcaagaatataatttataatgaactaacaccaggcctttttagctaaacacacatcacttttggattttgctttatgaaggttttgaggaagttgttatgctgttgctcagccgtgtccgactctttgctactgaccccatggactgcagcctgccagcctcctctatccatggaattttccaggcaagaatactgaagtgggttgccacttcctttttttttttttttttaaagtaaagccctattaaattgtgaagcttcccagcagtgaactaaggatttcaggtggcaatgattttcaattcttaaaaacatagttaggttcattgatcaccccatcctaaattcatataatgtaaatcaaatagaaacagcctaaatgaaattgaaatgttggtcattagtatgacaatcaagatgtaacaacgcttgactctgttttcctataaaacttgaaaaatgagtaatacaaaacgaactctttggtaagagctcatttccaatttaaaaaaagcattagttttaccaaaaaaaatgtacacatactatttcattttattctcttctggttgttagcacttcaatttggataagaaagcttataaaacaaactgaagattttcacaggataaagcttaccttcagactggtatgagaacgtggttgacttaattcctgaaatttccattgttctgatccaggggtctcaccacctttctgagtgtcaggtgtaagcaatccgtctccagaaggtaaagggaaaatccctaatgatataggacgttcttttctatttggaaagggcagaagaataagcattaattcatttttaagttttattcatcatgactgtaagtaataagcctgggctgtcactgctttagagtcatcactcttaaataatattgtgtgcctatctaaacaagtagacttaccaaagagaaaggacaaagtctcagaacttaaattaagccccaagaaatcaattaagaaaggtagtaagaacaatagtttacaaaatcttaagttactgctgagttccttgctcaggaagcagtctgtgctgtggtttcacagcaaggggagctgctacagtttcactcatgcttaggtcagccctagggaactgcaaatgacccccactcctgcttctctaggctttccaatttctcatattaatccctacatacttacccaagtctctttagggtgtgttttttctgccttgaggaaaatgaatacatggtttaaatcagcctactgattaaatagtcaaaagaacacgtacaaaaaaatgttgcctgccatttcaatcaagaaagaatagaatgctgtctgccattcagccatcagccactgtagccagtctggatggagagccctgagaggaattcaggatggagaaaaacgggatactgaccctaggtagttaagctgcatatcaaagaaataatttcagtgagcccagactcctccatcttcccaagcatagaaaagcactaaaatcattaacttgagatgtctgtcttttgtaattagcaaaaactcctgagtatccaaggtcctcccttgcctgtttggaacagttcttcagagctatccgagagactgccctgacggactatggtccttagaaacgtccctgagtaaagcataattctcaacttttaggttgggctttttttgcctccagagttttatcccctaaagtaggaaaactgtatttttctacaggaactcatatttttctgtatgagctccttttcatcacagtatgtatgacaatccaactgtcagtttttccaaacaaggatgcccaaagattctatcaaaaactgtagagtttcaatgctttgtgtgaaatttcagtgaataagggtttcaattttaataatagaacttgaacaagaaatacatcctttgttaatacaaagggtatttaaagagtggaaacaagcctggttcttcctaggtcattaactcaaacagaaatttgctagaaaccagacactaaaggtttggagcttctagcaaaactgtaagaacaggaacactgaggttatacataaaagttggaaaatattcagttttgctgaataaatctttattctgtaagcttatctttataccaagtaactttaagccacttttgaaatgtgccctcattgaacacaaagggtacattgctttcattcctaataacaatcaggaagaattagtacaactgtcaaacaccttaaagattaggtgaagcaaaagggttgagagattgtattctattaaagttgtatgcacaaagaaacagacaggacttttctctatcagagttaactactcatcacttcttcacacttagggtacttttcctatttgatttgggagaaaaattcaaacacacataggcagcacaataaaaggttagatcttaaaaccacgtaagcttgttatgacaagcttaggttatttgccagaaccaccaaattacaaagcagtcagctattctgtttaattcccaactgctggttcagcgaaaaagctttcataagtccagagcaaaaagaggcattatttattatatccttactggataatacagaacacattaaacacatacatgtttccacttattgtagaacctgttctttcttgagaatgactcacccctttcccccatcttttctgcttgattttaaaatgccctttatttcatcaaacgatggtgacaatgaccggaaatttgggacaggcaacatattttgggaactgaaaatctaaggatcttagacttactagattacttcttctttttaacatatcttgatgacttaagcaaaaaagtgaccaagaatttaatcagatggaatttaatggaacgctctctgaccccaaatgcaaagaaaagtaatacaaacttcattcgaatttatcacactgccaacagaaataaaaacacaggccagtcatgagagttatattcctttatgaatgagaacacaatcatttttcacacgtcaaacgctggaaaagtgtaaaactactgggggaaggagtcagcttggagtctaagctttactttcccatttctgttaactacaaaatctacagttcaaaatacgagtagaattcaaatctttacattgcttttattttcctccagaaactgctctacagaaggggaacttttcttcagaaactgatagttgtcaagagggtcaatgatgctctaggttatactgtttcaactctggaaaaatagtattactacataccactcttccctcttttttttactgacttggagggagggaggacatataataatgcatgttagtttgagtcctattttcaaaaggaaaccctgaaaagacaacattaggtcctgtatgtatactggtatgtatatttgatactctctatattaaacatatattatatatttatataaattaactatatatttaactatgtattaaatgcttcagtaaaactcacagaagaaaccaaagaatgaaaatacatgtgggaaaatatcaagtggcagatttaaacaccaggtgttttaataatgatactactgtcaagaaacgaagtatcagaatcagccatcagaatccttattacatctattttttaaactgccatacatccatttttaaattggttatttaaatgttacctacttgcataaataacttcataaatatgtctttaaatatttctatttccatttaaaacaaataatcattaataaaatctactatacatatgtataaagaacagtaaaaagattacatttgttcaacacccaccaatatgacaagcactgaaatggatgatttatttacatattctcatttaatcctcacaaggaaataagaattattttccctgttttcagattaggaaaagtgatgctcagagactttggggactagtaattggaagaaatgggattcaaagtcaggcctgttttgactccaagacccatgtacatttcctggaactattacttcttgacaactgcgcttcagtcatgtttgagtctttgcaaccctatggactgtagcctatcagtttcctgtccatgggacttccccagccaaaatactggaaatctggattgccaaaccctcctccaggggatatttccgacccagggatcgaactcctctctcttaagtctcctgcactgacaggtgggtgctttaccactagcaccacctgggaagccaatcttaatattaaagactttgatatctttcttcagtcagatcaacagcgacttttatgtcaagaaactctttgagtttaatcataagttattttatgaataaaatagctagagctgatatagttttactaaaaatggagtaaatataaatgattatgaaaattatttacttgtttaatttacaatatatctttaactgattaaatacaagataatcatctcacgaatttttaaaatgactcaatggggtaagaagctcaaaggaggaaactcgggtacagagattaagtaatttgccaaaagtcccataactcatgtgtggcagagcatttgtagcctggtagtccaactctgcacctcttatccactgcatattactgccttcataattggaactgaaacctaggacagccctttaaaattaatcttactttaatagtctatatgttcttgagtttcagtttcctaaaagcctatatatacatacacacaaatcctttatgtactaaaatgcacacaaagcaaaaagattgctcccagtttttataaaatcggggaaaaaataaataaatgaccaagttttaagaccacagatgaaattaaattctggaccttaaactaatgttgaacatgagggtgagggaacttactactttaatttctctttaagtccacaattaggagttgagttttaagtaaacatttacataataaaagttatacatttagaaccttcatttaaaaaccacacacaaagcagaaatctcaacaaatcaaatttttatcttagtgagttagaaaacaaaagaaaccacaacattaaaactctaaaatatagaaaatggttcttagagcatgcaagtacagtgaccagcagaaacgctacagagattaatgatatccccacaagcaggcatggatatctgttatccaagtctacaaagaaaaggcaacatctgacaaaacaatagtgaataggctttgtaaagctttccaactttgatgcataaataattgggagaaaaaatgaattccttgccctaaaaggtttaaatcctttcacttcaaatatattttgctgtaggaggaaaatatttaaattgtcagttcccatgaacttctatcaaaaactgcaaaaaggatgcctgaacctccaacagtctaaggatcactggaacaaaataaacacctatggcctgtgtctaatcaactacaagtcccaccataaagatatttgcttctaaatgctcagatgctctcatgcagaggttgtgtaaatttggacccaatgctctactcctattttccctttactggttgaaccctctgcttaaaacaagaccactctgaccttgtatttgcatataagtacaatctaaaaatccttttcttaagtgggtggtttccaaacacaaagcatatccctaagcgatagcctataaattactatatataagaatagaagtcttagcttcaggccattttccattgtttcaatctgcaacatgaatggttacaaagaagacccataaagctaaaaataaaagaaaaaccaactaaaaaaggacttctaagagagactgaagtacctgagtatccttggtaggttctgcgtcaaagctggcactccggtagaaatagaaaagtgcacaagcagcaaaacggagagagatactaagatagcagaattaatgaccaccgccccgccaacaaagccaaacacaaacagcagcatgcatccaggactcatggcgctgtgctggcatggtgaaacacccgaaccaggaggcctacacgggggccaaaggggtatctttgtaatgaggatctgtcattcagctgctgccacaaaaacaatgccatcagcagcagctttccactccatcctgctgcagctccgaagcgctgacgtcatcctgctctcacagcctcataaccatagagctgctgctcctagcatttatgcagcaatccagagcagaggccagcctattaactattttcctccccactaacgggcctggcttagctcattggctacaatgcttggagatctacataatttattcacactcctacatcgaacagaagtctagctaacccttttaaacatgcctctctatagcaaaaatgacttttaaaccaattatacaggagaaatgaaaaatttacagcattctgacaaatgacaattttaaacctactacaatctttgttaagtatcagaaaacaatggctatcaatttaccttttcattagtgaaagttgttttgtttttctatgctgccccctcccatagcattccaactacagcagggagagagctaactattgtttgaggattaaagaacagagagaaacagaaacagattattttattttcctttttcccaaggcaaaaatgtattaaaaaagcttacctaattctactatgagctgtggattctagttgatcactccctgagatctgatgaagttttgttctttctaagtgttccatataattatggatcatctattttgaagaaacaaaagaatacacaaaattttaagactaatacctggaaaaaagttaacattttaacaagggaaaccttttcatataaatttcttatttataggactacccatgttccatagatgaaattttattttattctcaaagggatatgcaaatgcttacgtttaaggatgctggagtccagaaaagtagccaacattttgcttaacatagcaaaaattttttacaatacgtaatgctattaaataagtctgacataaataacacaaattagatatagacattgggaaggaagtgacaagcgataactgattaaaggggacagatgacacttgagaaatccattgctgaagtgggaaacaacaaagaaattaacttgaaacttaagtaaagataattttcaatttaataccaagatatttatttatttttgctatagatttagttcaaagaatgctaaaatattctctcctatgttagactgctaacttactggaatcattacgtaatataatcatataaaaatggcagcaaacttaaatgaaaaaaacacattaactctttaataaggaaccataggacacaagctgaatatggcagtgaaaacttcaagaatatcaagtgtaaaacctgtcaagaaattctacagtctgatctgattccttttttttttttttttttttggctgcactgggtcttagttttagcatgtggggtttagttccctgaccagagatcgaattcaggcccactgcattgggagcatggactcttagtcattggaccaacagcgaagtccctcgtttgattctcgatatagttccacttttaagagacccaaaactggtattaaagcatgtaaaatgcaacaatttccatcataaaatcaaaaaggctttgctagatattgatgtgatctgaataagaaaaaaatgaatacgaaaagttatgttagcaatttcagttcagttcagttgctcagtcctgtctgactctttgcaaccccatggattgaaacacatcaggcttccctgtccatcaccaactcccagagcctgctcaaactcatgtccatcgagttggtgatgccatccaaccatctcatcctctgtcatccccttctcctcctgccttcaatctttcccagcatcagggtcttttccaatgagtcagttctttgcatcacgtggccaaagtattggcgcttcagcttcagcagcagtctttccagtgactattcaggactgatttcctttaggatggagtggtttgatctccctgctattcaagggactctcaagagtcttctccaacaccacagttcaaaagccatcaattcttcagcgttcagctttctctatggtccaaccctcacatccatacatgaatactggaaaaaacttagctttgactggacggacctttgctggaaaaggaatgtctctgctttttcatatactgtctaagtttgtcattgcttttttcccaaggagcaagtgtcttttattttcatggctgcagttaacatccacaatgagtttggagaccaagaaaacaaagtctgccactgtttccattgtatctctatttgccatgacatgctggacccagatgccatgatcttagtttttagaatgctggttttaaggcagcattttcactcattctcctctttcactttcatcagttcctcttcactttctgccataagggtggtgtcatctccttaactgaggttgttgatatttctcccagaaatcttgactccaacctgtgcttcatccagtccggcatttctcatgatgtactctgcatataagtcaaataagcagggtgacaatatacagccctgatgaactcttttccaaatttggaaccagtctgttgttccatgtccggttctaactgctgcttcttgatctgcatacaggtttctcaggaggcaggtaaggtggtctgatattcccatctcttgaagaattttccatagtttgttgtgatcaaaacactcaaaagactttagcatagtcaatgaagcagaagtagatccttttctggaattctcttgctattctatgatccaatggatgctggcaatttgatatctggttcctctgccttttctagacacagcttaaacatttggaagttctcagatcacatagtgtagaagcttagcttggagaattttgagcagtactttgctagcatgtgagatgaatgcaattgtgtggtagcttgaacattttgaacatttagtttgaacattgcctttctttaggaatggaatgaaaactgagcttttctagtggtggccactgctgagttttctgaatttgctggcataccgagtgtggtacttttacagcatcatcttttaggatttgaaatagctcaattggaattccatcacctccaccagctttgttcgcagtgatgcttcctaaggtccacttgacttcacactctaggatgtctggctctaggtgagggatcacaccattgtggttatcagggtcataaagatcttttttgtacagttcttgtgaattcttttttgtatagttcttgtgtattcttgccacgtcatcttaatatcttctgcttctgttaggtccataccatttctgtcctttattgtgcccatctttgcatgaaatgttcccttagtatctctaattttcttgaagagatctctagtctttcccattctattgttttcctctatttctttgcattgatcacttaggaaagctttcttacctctcctttctattctttggaactctgcattcaaatgggtatatctttccttttctcctttgcctttagtttctcttcttttctcagctgtttataaggcctcctcagacaaccattttgcctttttcttggggatgctcttgatcactgcttcctgtacaatgttataaacatccatccatagttcttcacgtactctgtcaaatctaatcccttgaatctatttgtcacttccactgtataatcataagggatctgattcaggtcatacctgaaaggtctaatggttttccctactttcttcaatttaggtctgaattttacaataaggagtttatgatctgagccacagtcagctcctggtcttgtttttgctgaatgtaaaaagcttctccatctttggctgcaaagaatataattaatctgatttcagtactgaccatctggtaatgtctatgtgtagagtcatcttttgtattgttccaagagggtatttgcaatgaccagtgcgttctcttggcaaaactctgtgttagcctttgccctgcttcattttgtactccaaggccaaacttgcctgttactccaggtatctctcctacttctacattccagtccccagtgatgaaaaggacatcttttttttggtgttagttctagaaggtcttgtaggtcttcatagaaccgttcagcttctttgacattagtggttggggcaaagacttggattactgtgatatagaatggtttgccttggaaacaaacagaatattctgtcatttctgagactgcacccaagtactgtattttggactcttttgttgactatgagagctactccatttcttctaagggattcttgccgacagtagtagatataaggtcatctgaatgaaattcacccattccagcccattttagttcactgattcctaaaatgtcgatgttcactcttgccatctcttgtttgaccacttccaatttaccttgattcatggacctaacattccaggttcctatgcaatattgttctctacagcatcagattttacttccatcaccagtcatatccacaactggatttgtttttgctttggctcagactcttcaatatttctggagctatttctttctctactcttcttcagtagcatagtaagcacctaccaacctggggaatacatcttccagtgtcatatctgtttgccttttcatgttcatactgtggctatcatgactagtgctgctataaacataggagtgcatgtatctttttgaattacagctttgtctgaatatattcccagaagtgggattgctggatcatatgataattctatttttagtttttggggaacctccatactgttttccacagtggctacaccaacttacattcccacaatttaagaaatgtaaatatcaagagtaggcaagaaaaggagaatattcctagaattcttaaaattacagcatggaatagctttgtaagttgctaaactttagctgcatgaagataggtttcaacctcaaataacttaaaatatgcattgtagcaatattaaaaggatagctactgaaaaaatttaaacaagttttaaaaatttatttttaagaagtatgcttttgtcaggagttccctggtggtctcgtcgttaggattccatgttttcactgctgtggcccggattcaatccctggttgaggaactaagtgagatcccacaagctgcacagtgtagccaaataaataataagtatgttgtgaaatttatactcggcatggaagcatatacaaaaattaagacgtatataaatcaatttgaaagtgttatttacttcagataaacaagaagtctgaggcatggattaagatgggtaattccatcaaatcaaatataaaagaatcaactaggctgttcccaaagttaaaattagtacaaataagaagtgtatcaggcaaaaaaagatgaatatatcatcacacagatatgtatatgaaagcattttaaaaagcttttgaatttacataattttaagtttaaatattttctcttttccaacagttctgcagaaatacaatttttgtgtttgtgtcagtgaggcagaaatgctgagttgcttccttctagtatcaagaaaaacttcaagtgaggaagaaatttaaatgagactagcataacaaagtgatggttggaccaaatatatcaatttaaattttcaaaagattttagaaaatctacgttgaattcttttataatggaaagtaatcatatgaatttgatttattcaaatgaagactctaagttcctttacagattgaaatgaatagaaatctctcctaaattgagtctatataatctatttattcaatatagaaaaataaaaagattaaaaaaaatgcaaagatacagaattggttctaccccagtctgttctacatactgactactgtcttaataaattgaaaaatttttaatttagatgttgaatttcaaaccaattcccaatcaaaaaagtgatcccaagtaactagagatacagtattctaacattccaaaatggcctatacaatgaaactggttttaacccagttaaactagcacttaataggacaaaagaacagcaacaaaatggctgctaatatttactgatcaccatttacaagtcagctgatgcatgcagagctatcgtttcagttaatcctcacaacaacagtatgactttctagataaactctattttaagaggttaaaataacgtccaatctgaccagctagttaatgattacctgttttctaactgtcagtagctagttggctttgcggccagaactcagatccatctgactcagtcatcagagcagttaagcattataagacttctggtatatctaggtgccgtttcagtcaattctggaggcaagcaataagctcattgtccttttttcctcacacccacaagaaaaccccacattctaagacatttcctgatgtctgaagtatattctatataagcactatattctatataaacacaaaaaagtagataaaataaattatacataagaatgtaaattttaattacaggccttcacagagtagctctggtttttttattaaaacagaaacaaaacaaaaccaactgagtattgggcaatgaatgctgcaaggtagcaaagagaggcaggaaagtaaaatagaatatattttagataaatcgttttgggtccaccagacccatgcctcctgatctcagaactgcaactctcaactgtcacaggtatgcatattaattcacataaattcaggagtcaattcagcaacaagcagctggagtcatggagaaggatcccaagcatattgtttggaacatcccaaatcccctcccacctagagaaatcttcaggcagaggttgatttagctttggctaaaactgaaatgcaagacaatagttattagaaaaacaaggcaaaaaagagagattttggagacaaacagcataatccttttaattctgttggcctttaatctttccatatgcagctcaaagtatatccacaaggccacaattcttaaaatggttgagacaccatgaaacaaagagacagaaaatcttctagtgcatttaacatccatgtgttgcataacttaaaagcaccaaaaattcaggaaaagggaatcagagtgacctagattcaaatccagtcacatactagcatagcatttgggacaaatcactccatattctcttttaagcttcagtttgtaaaataaggtgagtgataaagagtttgctcagaggataagatgagaatgcatttaaacactccctagagtaagacaagggttcaagttttcggtgactaatgagtatgtaaattttctccaccgtccttttaagcaaattcaataacgtgcataaaattttgaatttgattcagtcagttcagttcagtcgctcagtcatgtccgactcttcacgaccccatgaatcgcagcacaccaagcctccttgtccatcaccaactcccggaatttacccaaactcctgtccatcgagtcggtgatgccatccagccatctcatcctcggtcgtccccttctcctcctgcccccaatccctcccagcatcagagtcttttccaatgactcaactcttcgcaggaggtggccaaagtattggagtttcagctgtagcatcagtccttccaaagaacacccaggactcatctcctttagaatggactggttggatctccttgcagtccaagggactctcaagagtcttctccaacaccacagttcaaaagcatcaattcttcggcactcagctttcttcacagtccaactctcacatccctacatgaccacaggaaaaaccatagccttgactagacggaccttagtcggcaagtaatgtctctgcttttgaatatgttatctacattggtcatagcttttcttccaaggagtcagcgtcttttaatttcatggttgcaaccaccatctgcagcgattttggagcccctaaaaataaagtctgacactgtttccactgtttccccatctatttcccatgaagtgatgggaccagatgccatgatcttcgttttctgaacgttgagctttaagccaactttttcactctcctctttcactttcatcaagaggctttttagctcctcttcactttctgccataagggtggtgtcatctgcatatctgaggttattgatatttctcctggcaatcttgattccagcgtgtgcttcttccagcccagcatttctcacgatgtactctgcatataagttaaataagcagggtgacaatatacagccttgacgtacagacagaaccagtctgttgttccatgtccagttctaactgttgcttcctgacctgcatacagatttctcaagaggcaggttaggtggtctgatattcccatctctttcagaattctccacagtttattgtgatccacacagtcaaaggctttagtgtagtcaataaagaaaagtaaatgtttttctggaactctcttgttttttccatgatccagcagatgttggcaatttgatctctggttcctctgccttttctaaatccagcttgaacatctggaagttcacagttcacgtattgctgaagcctggcttggagaattttgagcattactttaccagtgtgtgagatgagtgcaattgtgccatagtttgagcattctttggcattgcctttctttgacattggaatgaaaactgaccatttacagtcctgtggccactgctgagttttccaaatttgctggcatattgagtgcagcagtttcgcagcatcatctttcaggatttgaaagagctcaactggaattccatcacctccactagctttgttcgtagtgatgctttctaaggcccacttgacttcacattccagaatgtctggctctaggtgagtgaccacaccatcatgattattttggtcatgaagatctttgttgtacagttcttctgtgtattcttgccacctcttcttaatatcttctgcttctgttaggtccataccatttctgtcctttatcgagcccatctttgcatgaaatgttcccttggtatctctaattttcttgaaaagctctctagtcgttcccattctgttgttttcctctatttctttggactgatcactgaggaaggctttcttatctctccttgctattctttagaactctgcattcagatgcttatagctttccttttctcctttgcttttcccttctcttcttttcacagctatttgtaaggtctccccagacagccattttgcttttttgcatttctttttcttggggatggtcttgatccctgtctcctgtacaatgtcacgaacctctgtccataattcatcaggcactctatcagatctaggcccttaaatctatttttcacttccactgtataatcgtaagggaattgatttaggtcatacctgaatggtctagtggttttccctactttcttcaatttaagtctgaatttggcaataaggagttcatgatctgagccacagtcagctcccagtcttgtttttgctgactgtatagagcttttccatctttggctgcaaagaatataatcaatctgatttcagtgttgaccatctggtgacgttcatgtgtagagtcctctcttgtgttgttggaaaagggtgtttgttatgcccagtgcgttctcttggcaaaacactattagcctttgccctgcttctttccatattccaagcccaaatttgcctgttaccccaggtgtttcttgacttcctacatttgcattccagtcccctataatgaaaaggacatcttttgggggtgttagttctaaaaggtcttgtaggtcttcatagaaccgttcaacttcagcttcttcagcattattggttgtggcataggcttggattactgtgatactgaatggtttgccttggaaacgaacagagatcattctgtcgtttttgagactgcatccaagtactgcatttcggactcttttgttgaccatgatggctactccatttcttctgtgggattcttgcccacagtagtagatataatggtcatctgagttaaagccacccattccagtccattttagttcactgattcctacaatgtcgacgttcactcttgccatctcctgtttgaccacttccaatttgccttgattcatggacctaacattccaggttcctatgcaatattgctctttatagcattggaccttgcttcagtcaccagtcacatccacaactgggtattgtttttgctttggctccatcccttcattctttctggagttatttctccactgatttccagtagcatattgggcacctactgacctggggagttcctctttcagtatcctatcattttgccttttcatactgttcatggagttctcaaggcaagaatactgaagtggtttgccattcccttctccagtggaccacattctgtcaaaatttgattagagaacagttattcatattacgaaatgagcccgagatttccattatgcagcaaacaacgtgtttgatagaaaatgctgtctaaacaactattctatgtacgtataaaaaggttactgagttagaagtaacagtggaaagattaaacccttcagacttcctttctctgaaggttttcaaaatttacctttaaacgacctagttctttagcattggatagcaatttatacggagaagccaatggcaacccactccagtactcttgcctagagaatcccagggacagaggagcctggtgggctgctgtctatggggttgcacagagtcggacacaactgaagtgatttagcagcagcagcagcagcaatttataattgctaattgaatggtatttctagtacagatgtataaacacataaacacattttaaagaagccatatctatgtcttataaacatttgctgaggcagagcaaaatacagagagcctatcagaggacagaagctgcttatgtctaaaggaggggatcttgtgaaaatgctacatgtaagatctgtcacagttattagacaggcccaactctctgcctttggtatttaagattttcctgagatccttctttttttcttttagaccattcttctctgaaggaatagaaatataaaaactatgtacatatatgagagaaaatatgttatttcactttacaatgactttttcaagacagcatatgttttagacatatttcaatttaacaatcctcaattattacaatgattaattaaaaccttcaattaagaaaaacacaattcattatttatcactaccaattatttatggcatataaacctattcccccaaacatgtttgtaattatcagcatcgaaaagaactaccagtacagggcattgttggggcatgaaatgaatggtgtgaaaagaacaaacaataaacgtttaacaaccaattgtttttcaacagtcttaatatgtaccaaataccatcttactaaaatgtggttatcttttcatactgaaaggctgctgtgtaagctgtttctgttttcccagagctctatggttccagccctctgtggccaatctttttcctttaccactcaatatcagttccgtgacacttcatgcttggtacatggctatgtgagctaaaacagtaacaaacctcacatgccaggaagaaattccaacaagctgtggaaggtgttaaaagcacattactctcaaaaacaaatgaaactgactgcagtggggttttataccacttaaaagcaacaatataggtccctaccaggggtgggataagagatcacccccaatactgaaaggaaaatggaagctgaagactgtaaccatctgtatcatgggaaagactggactagaaagagaaagagcaattatttttttcatgtaacagtgcatgtgtctatgaaaattctatttaagtatgtgaaccctagttcacaattttcacatggaggagacagaaacaaacgcaacacagaaaaggctgacagagaatcataaaaaggagtttaaaaagaccctcaagtacattttctaacttgaagagattatgtgctagagttactaactaaaacactgaaacttcatgcagaaagcctgttttagagtcattttaagacattataatgtgtttgccatttgttatgagcttaatacaaattaagtactttatactgtattaaaaatggagagactctgaccaacaatttagcaatccatcatttcccaacaggtatcacaataagttatatcaattctctctattagtatcacgtatattttttaatatgtacaagttaggtttttactcaaccagtcaaaaacataactattggaaatgccttaataattacatttttcataacatgaaaagttaactccagataaaagacattaaagtcagcatttggtaactaaataaatgctacatgaaatttaaagtcttcgtgaataataacccccaaggacaacactggctgattttcaaagaaaaattgaaacatattttctagggttaatttctttatcttaatgttagtatggcaagaaccaacctagaaacccacctcagtgtgtctctgatgcaaggcattatattctttcttcagttctgcttctctttcttcaagtctgctaactgaaattaagatacatacacttaatcaaaaccaaataaaaaatttacttgaaaattctatcttttaaacttggactggtttatccataacccttggtaacttcaagcctcgttactccatatgaaattcttcataaggctagtgaccttgcttcatgtccttaataaaatttatggagagggaataaacagaatatttttaaaaagactaaacatcttactgcttctcccaatatgcttatataataaacatccttatctaagtaggtttttaacatgatagagaattacctctttgaaaaagattatacaaatctcctcacagagcctaaccccaagagttgagcctaaccccaagagttgactcattggaaaagactctgatgctgggagggattgggggcaggaggagaaggggatgacagaggatgagatggctggatggcatcaccgactcgatggacatgagtctgggtaaactccgaaagttggtgatggacagcgaggcctggcgtgctgcaattcatggggttacaaagagtcagacacgactgagcgactgaactgaactgaaccccaaaccactgatttctaatagtattccacctctttttcattattgagcagtatgtgaacatgttactgtttttataagcactttctttaacttcaggtcttaatttcagggactcatcttcttgtatttagctccctctgctgatggagtttgtgagtggctctgagctgagatagagcactacttcagtattttaaaaataaattttagaccctaacatacacagtgtcaggacaggatttcagagaaaaagatggtatcagagaggaatgattttgagagaaaatggaatccaagcaggaccaggaagaaattacagtgctcaagttagatagtaatggggctatagcaggcaggtactgctactacagagaagggaacagaaaaccatggagctggcgaggcacaggagagactggccagtctggaggagctcacgctgatttttaaggagcagtggcagacagtcggctggtgcgaagtaaagctggtgctaaaggagtttgtcaagatactcacgttcgtctgtttgaaagcatgagcatagttggaaacgttctcttggtataatggtcagacagctacaaacatgcaaaattgtttataagagccagctggtgactgcgtcagctggctctaagacttaactactatgaactataacagcacatacatgaatgtttttatatgcctaacattaacatgccagacaccacataacacttaacttgtgctgactggtaaactcatgttttttatttgtgtagctctacacctttatttgagtaccttgaaaatatgccatgaattaggaaaagtgtagctctttcagtgtgtttttaatcaagcctatgtgttggctcattaaatttgcaacaataagtacatacactatagtagctatagagtcacactttatcggaccatggaaggcctgaggacatgggctgctcatctcattttgtggctgaaagcaataaaaagcaaatctgtaaggcagctgttctgtcataacacaatagatactgaagcctctgtgatttttatttaaaaacaagaaatccaaccaaatgtagatattatatttagtaacaatttcaatataaacattttctactattttttgtcaattaaattgttctaaaagcacaatcctaaaattactgggtgaaccttaagtgtttttaattgctcatatatatgaatcaaaattttcctcaaattgtgcaaccaaaacaaaaaactgataagaaagataagaaagccttcctcagcgatcaatgtaaaaagacagagggaaacagtagaaggggaaagactagacatctcttcaagaaaatcagagataccaagggaacatttcatgcaaagatgagcacagtaaaggatagaaatggtatggacttgacagaaacaaaaaaaagatcttcatggcccagataaccacaatcatgtgatcactcacctagagccagaaatcctagaaggcgaagtcaagtgggcattaggaagcatcaccacaacaaagctagtggaggtgatggagctccagttgagctatttcaaatcctaaaagatgatgctgtgaaactgctgcactcaatatgcaagcaaatttgaaaaactcagcagtagtcacaggactggaaaaggtcagttttcattccaatctcagagaaagacaatgtcaaagaaggttcaaactatagcacaattgcactcttctcacatactagcaaagtaatgctcaaaatactccaagcgaggcttcaacagtatgtgaactgtgaactttcatatgttcaagcaggatttagaaaaggcagatgaaccagagatcaaattgccagcatctgctggatcactgaaaaagcaagagagttccagaaaaacatttacttttgctttattgactacactaaagcctttgactgtgtggatcacaacaaatcgtggaaaattcttgaagagatgggaataccagaccacctgacctgcctcctgaggtacctgtatgcaggtcaagaagcaacagttagaactggacatggaacaacagactggttccgaacagggagaagagtatgtcaagactgtatattgtcaccctgcttatttaacttatatgcagagtacatcatgagaaatgccgggccagatgaagcacaacctggaatcaagactgcagggaaaagaaaagaaagtgaagtcgctcagtcgtgtccaaatctttgcaactctatggactgtaacctaccgggcttctttgtccatgggattttccaggcaagagtactagagtgggttgccatttccttctccaggggatcttcccgacctagggattaaacccaggtctcccacactgtaggcagacactttaccatctgagccaccaggtaagtccaagattgccaggagaaatatcaataacctcagatacgcagatgacaccacccttatggcagaaagcaaagaagaactgaagagcctcttgatgaaagtgaaagaggagagtgaaacagttggcttacaactcaacgttcagaaaactaagatcatggcatccagtcccatcacttcatggcaaatagatagggaaacagcagaaagagtgacagactttacttttttgggctccaaaatcactgcagatggtgactgcagccatgaaattaaaagatgcttgctccttggaagaaaaaaaaaaaaaaacgacaaacttagacagcatattaaaaagcagagacattactttaccaacaaaggtccatctagtcaaagctatagtttttccaggagtcatgtatggatgtgagagttggactataaagaaagctgagtgccaaagaattgatgctttcgaactgtggtgttggagaagactcttgagagtcccttggacatcaaggagattcaaccagtccatcctaaaggaaatcagtcctgaatattcattggaaggactgatgctgaaactgaaactccaatactttggccacctgatgcaaagaactgattcattggaaaagaccctgacactgggaaagactgaagacaggagaaggggacaacagaggatgagatggttgaatggcatcactgatgcgatggacatgagtttgagtaggctctgggagttggtgatagacagggaagcctggcgtgtttcagtccatggggtcacaaagaattggacatgactaagcgactgaactgaactgatcatccataaccctcatttcaaatttgtgcacaacagtagagcctcattctcaactaactttgtataagttcataaataaatttatattcatctccaccactaacagccagaattacacagtacttgtcaagtaccatgcactgtcctaggtactttatattaaaaacctaacttgaccctgacattaactttatgatgaaacttcattacatttcattttaaggataagaaaactgaagtaaataggggttaagtaacttgcccaaattcacgaaactagtaaatggcagaattacaactcctaatggatgagactaggcccagaatctgcttttatttatcatggcattctgcctctcaagaagtacttcttttaatttgttttatatattggaatctactttaaattttcattttgggggaaaaaagtatagagagtgctcctttattacttgaaacaaaaacccctctcttctggaaagaacctaatcacaggtactacaattcaaaagtatcaaactgccacataaaatatgtaaccaacttaattaatcatgatgaaatacatataaaaactaaaatgtggtagtcctggtaatccagtggttaggactgtgcaatctcactgtcaagcgcctgagtctgaaccctggtcagggaacaaagatcccacaagccatgcaaaaatccactatataccttcagaagagctaaaataaaaagtgttggtagggaacaagttctggtaaggagctttcatactcagacttccctggtggtccggtggttgggatttcaccttccagaggggtgggttgcggggcgctgcgcgtgggagggtttctaaccccagtcagggagctaagatcccacatacctcctggccaaaaaccaaaatcagaaagcaggagcaatattgtaatgaattcaataaagacttttttaaaaagtacaactttcatacactggtggtgggagtataaactggtataccaattcgaaaactgtttggcaagatttaataaagttgaattatatgccactcctatgacaaaacaagctcattactatgatatatgtctatgtgtccagcaaaaggcattttaaaacaatgctcagagcagcactatttgtgttccaacatggaatcaacccaaatatccatcaactgcaaaatgtataaatattcatgtactagaatactatacaataatgagaatgaagaaattattgctgtgcacctcatggaggaatctcacaaacaggatactgaggaaaacaaagagaagcaaaagaatacaaacttcaaatgaacacataaactaatccaaaactaatctaatatgttaattcagttcagttcagtcattcagccatgtctgactctttgcgaccccatggactacagcaccccaggcctccctgtccatcaccaactctcggagttcactcagactcatgccaattgagttcgtgatgccatccaaccatctcatcctctgttgtccccttctcctcctaccttcaatttttcccagcatgagggtcgtttccaatgagtcagtttgtgtcaggtggccaaagtattggagtctcagtttcagcatcagtccttccaatgaatattcaggactgatttcctttaggatggactggttgaatctccttgatgtccaagggactctcaagaatcttttccaacaccacagttcaaaagcatcaattctttggcactcagctttctttatactccaactctcacatccatacataactactggaaaaaccatagctttgtctagacagaactttgttggcaaagtaaggtctctgctttttaatatgctgtctaggtttgtcacagtttttcctccaaggagcaagcatcttttaatttcatggctacagtcaccatctgcagtgattttagagccccccaaaataaaatctgtcaccgtttccactgtttcccaatctatttgccatgaagtgttgggaccggatgccatgatcttagttttctgaatgttgagttttaagccaactgtttcactctcctctttcactttcatcaagaggctctttagttcttctttgttttctgccataagggtggtgtcatctgcatatctgaggttattgatatttttccagcaatcttgattccagcttgtgcttcatccagcctggcatttcaaataatgtactctgcatataaattaaacaagcagggtgacaatatacagccttgacgtgctactttcccaatcttgaaccagttttttgttccatgtccagttctaactattgcttcttgacctgcaaacagatttctcaggaggcaggtcaggtggtctggtattcccacctctttcagaattttccagtttgttgtgatccacacagtcagaggttttgtatagtaaataaagcagaagtagatgtttttctggaactctcttgatttttcaatgatccaacggatgttggcaatttgctctctggttcctctgccttttctaaatccagcttgagcatctggaaattcacggttcacatactcttaaagcctggcttggaggattttgatggagtagctatcatagtcaactgaagagtctgaatgcattacttggatgcaatctcaaaaacaacagaatgatctctcttcgtttccaaggcaaatcattcaatatcacagcaatccaagtctatgccccaacaactaatgctgaagaagctgaagttgaacagttctaagaagacctacatgaccttctagaactaacaccaaaaaaaagatgtccttttcatcataggggactggaatgaaaaagtaggaagtcaagagatatctggagtaacaggcaaatttggccttggagtacagaatgaagcaggacaaaagctaacagagttttgccaagagaatgcactggtcagagcaaacaccctcttccaacaacacaagagaggactctatacatggacatcaccagatggtcaatactgaaatcagactgattatattctttgcagccaaagatggagaagctctatacagtcagcaaaaacaagactgggagctgcctgtggctcagatcatgaactccttattgccaaattcagacttcaactgaagaaagttgggaaaaccactagatcattcaggtatgaccaaaatcaaatcccttatgattatactgaggaagtgacaaatagattcacggtattagatctgatagacagagtgcctgaagaactatggacggagattcgtgacattgtacaggggggcagggatcaagactatctccaagaaaaagaaatgcaaaaaagcgtaatagctgtctgaggaggccttataaatagctgagaaaagaagagaaactcaaggcaaaggagaaaaggaaagatatacctatttgaatgcagagttcaaaagaatagcaaggagagattttaaaaatgccttcctagtgatcaatgcaaagaaatagaggaaaacaatagaatgggaaagactagagatctcttcaagaaaattagagataccaagggaacttttcatgcaaagaaaggacagagatggtatgaacctaacagaagcagaagatattaagaagatgtggcaagaatacacagaagaactatacaaaaaagatcttcatgactcagataaccacaatggtgtggtcactcacctagaaccagacatcctggaatgcgaagtcaagtaggccttaggaagcatcactacaaacaaagctattagaggtgatagaattccagttgagctattttaaatcctaaaagatgatgctgtgaaagtgctgcactcaatatgcaagcaaatttggaaaactcatctgtggccaaaagactggaaaaggtcagtttacattccaatcccaaagaaaggcaatgccaaagaatgctcaaactaccacacaattgcacttatctcacatgctagcaaagcaatgtgcttgaagttaggataaatgtaaattaactgttttacataagtctattagtctgatgcattcactcttttgtcctgattgtgtccttcatctataactatgctttttaagaagattccatccaaaatctgcaaacactgtgcagtcccctttggggaggagttattatctaatgaatttactgtgtaaacagctccatcccatctgattccaaacataacatgtacctccttcacacaagcactttccttggctaaatactcaagcattatgttctccaacaactcctataaattctatatatagcacaggatttaaacagactactcagaaccataacaaataaactgtgctaattcatcattaaaatgtacagggagataagcagaaatattaccagattggggaaatataaaaagaaataaaaaatgattgccatcattggaaaataaattggaattacacttttgaacatcatgttggtgataggtattaaaataagcaacgtgtataatctgaccccattactactcttatttatgctatggaaatacacttgatgcccaaaggtatgaaaatgaatattctatatgcttttgtccacagtgcttttcaggtctactatatccttctacttttctgtctattcattctattaatttttgagagtttgacattgaagctccaagtaaaattcttagtttacctaattaatttggaattcccttcccaaatgtcatcaattggttggaaaagtaaattatgacagtcatacgatagactacaatgtagtaactaagctacttccaagttatgttgtatcaggtatattaacctccctggacctctattccttattcatagttgaggaataataataatttatcagagttggttatcaggattaaggaagatctaatatttgaaaatggcatagaacagaacctggcacgtgtgctttttcttttccttttctattttttaaattatgaaagtataacacatttacaggagacttaaaacttacagaacaagaaaaagaattacagaacaaagttacacatagttacattatatattagaattatttttaagtaaataaattaagattttaaattggatcttcaatgtcaaaccttcaaaaattaatagaatgaatagatagaaaaataaaaggatacagtagacctgaaaagcactatgggccaattcaacataattaaaatttatacaattttcacacaaaagtaggacacaaattctattcaagttcccaaagactataaagcagcagacactggaacatatgcagggacataaaacaaggtgcaaaagtttcacagtccaaaggtactgaagtcagacagagtgttcccttatcactgcagtattctggcatatgtgtttttaatacaacaattaaaggtactgttaaaatgaatgtagtattattcataagcactggctcttctgttcatggaattttccaggaaggaatattggagcaggttgccacttcctactccagtgaatcttccctccacccacggatcaaaccctcttctcttgtgtctcctgcattggcaagcagattttttaccactagtggcacctggagaaggcagtggcaccccgctccagtgctcttgcctggagaatcccatggacggaggagcctgtgggctgcagtccatggggtcgctaagagtcagacatgacttcactttcgcttttctctttcatgcaccggagaaggaaatggcaacccactccagtgttcttgcctggagaatcccagggatgggggagcctggtgggctgccgtctatggggtcgcacagagtcagacacgactgaagcaacttagcagcagcagcagcgacacctgggaagccactgttaaaatgaatgcatcattatccataagcactgacgtggaatagtgcctagaacttaaaagaaggatgttgaatattattgctatatctgaaattttgaaacaaaaaattatgtatagtatgatgtctacaaagtaaaaacgtactgatttctctctcccaaacctgctctttcccataattttcttaggcaaaaatcttgcagctgtacttttattcttttcttttctcacattacattccatcagcaaattctgtccattttgcctttagaacaaatcgtgaatctgacaactttttaccatttctattacccccaccttgatctaagacatcatctcacgcctggattattactactatcttctgactagtgtctctgctctagtcttttctcctctgtattcttaaatttgtagcctggagtcagatagtgactgctcaaaacccttcaacaacttcctgtgacagaacaaaagaaagtaaagaagagggagggagcctgtattatggcccacaagacccttcagcatcagatatatcaagccataccacttttgctcccatggagaattattgtctcctgacccaactgttagagactgattgtgtcctgcccaaattcatatgctgaacccgtaatcaatgtaattatgcctgtagacaggacttaaaaaggcaattaaggagaattcactggtggttcagtggctaggactcagcactttcactgctggggcttgggttcagttcctggtagaactaagatcctgcaagccacacagtgtggacaaacaaataaaaataaaataaaaaggtaattaaggttaaatgaaatcataaagatggggtcctaattgcattggactgatgtcctttcttaagaagaggcagagccaacagagctctttctccctacacacgcacagagaaaaggtcacacacagagcaagagatagcggtctcaggagaaaccaaacctgtcagcactttccagcctttagaactgtcagaggggacttccttagtggtccagtggctaagactttgtgcttccaacacagggggcccaggttcgatccctggtcagagaactggatcccacacgccgcaaccaagagctcttgtgcctcagctaaacatcctgcatgccacaactatctcacacgatgcagtgaagactgaaggtcttgtgtgccacacccgagactgacacagtcaagacaaagaaaggaagaaagaaaactcctaagaagggtgcaaaaattctgcaatttaagccacctagtctgtggtattttgttatgacagccctagctgattataatacaagaactaaatatcattaagataaccatggagaggaactttcatacaagatgtttatcaagtgacctgggacagagagctgggcttgcagcttatagaagaaacgagtcctgtttatagcagcttgctaactgatactggtttgggttgctttgtactacttaatagcaagaatgtggaaatggaaacataaaaccccaaaataccactaatcgccagaaatttcctatacttacctaaatgagcgtgatcattattcaaaatggctgaggcttatttacaaaaatttcttaaactcctattaatcactctgtcccattaaagcattttggattgtttctattgataattacttaaccttccactcatggcttcttaagtcattaaacttacatttcacttattttcatttagcatcatattcttacttttgactcaaaaataaatttcataaactatcaacccattctctcaccaaccctttcacattatctttactaatctcatagaaatttctatctatatattatttttagcaaccctatatgacactaaacaaggcattcggtacatacaaactacacacagcttatatgtgacttgcttcctgaagtgaagtgacgtgaaagtcgctcagtcatgtccaactctttgaaaccccatggactgtacagtccatggaattctccaggccaaaatactggcataggtagcctttcccttctccaggggatcttcccaaccaagggattgaacccaggtctcctgcattgcaggcagattctttccagctgagccacaagggaagcccaagaattctggagcctatcccttcttcagcagatcttcccaatccaggaattgatccggggtctcctgcattgtaggcagattctttaccaactgagctatcagggacttgcctcttactctgttatttttttaatagattctattttttagagcagttttaggctcatagcaaaccaagagaaaagtacagttttccacatatccctaccgccatacacccagagcttcctctactatctccatcccacaccagtgtggtacatatatgacagtcaatgaacctgcctgacacatcataattacccaaaccaaagcctaccaaaaccccaaagtttaccttaggattaagtcttggtactgaatagtctacaaatttggacaaatatataatgacatgtatccaccattatggggcttcccaggtggctcagtggtaatgaatccacctgccaatgcaggagacataagagatgcaggtttgatccctggcttgggaagatcccctggaggaagaaatggcaacccactccagcattcttctctgtaaaatcccatggacaaaggaacctggcgggctgcagcccatggggtcacaaagattcagacatgactgagcaactgagagtgcacacatgcacgtccaccattattaaagtttcatacagagtagtttcactgccttaaaaatcctcgattcatctctgccttcctccctcccaccatccacttcgtccatcaaaacttttaatgtatgtagccttttaaaactggcttttttactctgcagtatctattagtggttcctccatgtgttttcatggcttaatatatcacagcttttcagcactgaataatattccactgtatggatgcaccacagtatattcctattattttcataagtctacaatcttaaagctataagccttaaatactcatcatctcacctaagtacaaaagttaattttcttaaaatacaaagatattttcagttagtactgctgcatattacagacttttatgctgacagatgattttcatattttcactgtttttaatacaaaataaatcacaagtacacttaaacaaacctctcactcagctttttgtacagatctattttacctgttacactatttaacacaactaattttatttcttaaggcagaaaaaagatccagggtaaaagtagaacatattcacctaaaaatgtaaattgactgtattttatatcagccaattagtctgacacattcactattgtatcctgattttgtctctcatctataactatgctttttaagaacattccatccaaaagctgcaaacactgtgcagtcctctttgggggaggggttatgatccatttcaaatgcatgtgaaacatcctccaaaacagatcacatgctaggccacaaaacaagtctcagtaaatttaagaatactgaaatcatatcaagcaccttttcaaaccacaacactatgagacttgaaatcaaccacatgaaaaaactacaaaaaatagacatatagaaagtaaacatgctaccaagcaaccaatgggtcaaatgaagaaatcaaagaggaagtaaaaaaataccttgcaacaaatgaaaatggaaacataatgttctaaaatctatggaacacatcaaaagcagttctaagagggaaattaaagaaacaagaaaaatgtcaaataaaccatctaaccttacacctaaagaaagaaaaacaaaacccaatgttaacagaaagaaggaaataaccaagattagagtggcaataagtgaaatagattcttaacaaaatagaaaaaaaagataaacttaataaatctttagtcaaactcctcaagaaaaaaaagagggtccaaataaaataagaaatgaaagagaagtttcaacagtttccacagaaaggcaaacagtccaaagtgactactacaaacaattatacaccaacaaatcaggcaatttataagaaacagataaactcctagaaacatacaatcttccaagactaaatcaggaaaagttaggaaatctgaacagattagtcatagagaaattgaatcaataataaataaataaatacaacttccaacaaacgaaaggtcagaagcagaagactaccagggggaatttcaccaaacatttaaagaagagttaatacctatccttctcaaactactgtaaaaaattaaagagaaaggaatgtgtctaaacccatgaggccagggttactctgataccaaaacaagacaaagacacgacacacaaaatattaaaattacaggccaatatccctgatgaacaatagacgcaaaaatccccaataaaatattagtgaacaaaattctacaagacaacaaaagaatgatgcacaatgctcaagtgggatttttcccagggatacaaggatggttcaatatgagcaaatgttgtatatcattcaacagaccatgtgaacaaaaatcaagaataaaaacacatgatctcacaattcaaaagatgcaggaaaagcatgacaaaattcatccagttatgataaaaagaaaacctctcaacagaatgggaacagaggaaatgtacctcaacaaaacaaatgatacatacgacaaagtcacagctaacatcatcagttcagttcagctgctcagtcgtgtgcgactctctgaccccatggactgcagcacaccagacttccctgtccattaccaactcccggagcttactcaaactcatgtccattcagtcggtgatgccatccaaccatctcatcctctctcgtccccttcttctcccaccttcaatctttcctagcatcagggtcttttccaatgagtcagttcttcacatcaggaggccaaagtattggagtttcagcttcagtccttccaatgaatattcaggactgatttcctttaatattgactggttggatctccttgctaacatcatacttgacagtaaaaatctaaaagcttttcctacaagaacatccattctcaccacttttgggggggtgtgggggtgtggaggggcctgtgctgtgcaacatgcaggatcctagtttcctgatcagggatcaaacctgtgccccctgcagtggaagcacagagtcttaaacactggactgccaggaagtccctactttcaccatttttattcaacatagtactggaagtcctggtcacaaatcagacaagaaataaaaggcattcaaactggaaaagaagtaaaactatagctatttgcagatagcacaatatgacacatagaagaaagactctaccacaaaactatgagagtaaatgaattcagtaaagttgcatgacacaaaattaatatacaggaatttgttgcatttctatacactaacaatgaactattagaaggagaaattcaggaaacaatcctaccaaaaagaataaaatatctagggataaacataaccaaggaagtgaaagactggtactctaaacactatcatgggctagaagaattagtatggttaaaattccacaccatccaaagcagtctacagattcaattcaatctctatcaaaatacccatagggtttttcacatgcatgcatgctcagtcatgtccaactctttgtgaccccatggactgtagcctgccaggttcctctgtccatgggattttccaggcaagaatacttatgtgagttgccatttcctactctccaggagatcttcccaacccaggaattgaacccaagtctcctgtgtctcctgcactgcaggcagattctttacctgttgagcagtctaggacaaataatcctaaagtttttatggaaccacagaaaatctcaaagaaccaaagcaatcttgacaaagaacaccactaaggtaaaatggtccctgatttcaaactatataacaaagctacagtaatcaaaacagtatggtactgacacaaaaacaaacacatacatcaatggaacagaataagagcccagaaatgaatcaatacttatatggttaatctatgataaaggaggcaagaatatacactgcgagaaagtctcttcaataaataacactgggaaaactggacagctacatgtaaaagaattaaactggaccattttcttacctcatatacaaaaataaactcaaaatggactaaagactaaaacgtaaaacctgaaaccagagaagtcctagaggaaaacacaggtagtacgcactctgacagtggtcttagtaatttttttttttttgatctatctcttcaggcaaaggcaataaaagcacaaataaaggagtagggatatatccaactaaaaaacttatgtagcgcaaacgaagccatcaacaaaacaaaaaggtaagctactagatggaagaagatatttgcaaatgatatgttggataggggttaatatccaaaacacataaagaactcatataacacaattattaaaaaaaaatctgattaaaaaatgagcagaagacctgaacatttttccaaagaagacacactgatggccagcaagcatatgaaaagatgctcatcttcactaattatcacagaaatgcaagtctaaaccacaatgagacatcatctcatacctgtgagaatgactattatccaaaagacaagaaataacaagtattggaaagaatgtggagaaaagagaacacttctacactactggtgggaatgttaaattgctacagctgctacagaaaacagtatagagattccttaaaaaataaaaaacagaaccaccatacgatccaggaattcacttctgggtatgtatccaaagaaaataaaaacactaattcaaaaatatatacgtaccatagcaacattatatacaatagctaagatacagaagcaacctaagcgtccatcgacagatgagtagataaagaagatatggaggcttccctgggggctcaatcgtaaagaatctgcctgccaatgcaagagacacagatttgattcttggtccagaaagatctcacacaccgaagaacaactaagcccacacaccacaactcctgagcctgtgctccagagcctgtgctcaggagctgtaactgctgagccaatgcgctacgactactgaagcccacacaccctcgggcccatgctccacaacaagagaagtcaccagggaaaggagcctgtgcgccagaactagagaacaacctccactctccacaagtagaaaaaagcccacacagcaataaggacacagcacagccataaacaaacaaaaccttttttaaaaagatgtgattttatacacacacacacacacacacacacagtggaatattgtccagacatagaaaaaatgaaatcttgccctttcagacaacatgcatgaacctgagagaatattacctagtgaaatagacaaagacaagtatctgatgatctcacctatttgtgagattaaaaaaagaaatataacaaaatatatagactcagagaacaaactactgcttgccagagggaagagatttttgtgatatataacaattatcaaatcattcattatgttgtaactaatgtaatattttaagtcaattatacttcaaaataaatataattaatgaaatggtaatcagtttctctagcattaagtatcatcctcctctccactccagtacaactacttaagagtctacttatttgaggcacttaaattgtttctctagcccattaaaattaaatatgttttttcttttgtatagttacaaccagatgtattatacaaatcaaaacaagaacactaatttattacctgctaccttagacaaccatattcaaaagaatatgattcaaagacagtgcaaatattaagatacctactttgccatttatgaactagtaactaaacaagtcagaatgccaatgagaatctcaaggaatatcttctttcaactctacaaagctaggtagaacttcagacagccaaggaagacttttgattgcttctagttctgagactgagaaccaactgcctgtttagcatgataaacagacaataaaagctgggaggctagtcataaaatgtattatatccatataggaatattattcacccttaaaaaggaattaaataacaataacactacaacgtggatgaattttatgctaagtgaaagaaattcataaaagaccatatattgtatgatttcatttacatgaaatgtacagaataggcaacttcatagagatcacagtacattactacaggctagggaaagccagaaataatgagtactatcaggtatggtgttcctttcggaatgatgaaaatgttctggggaattacatatgacgatgattgtacaatttatgattatactaaaaccattgaattcttatactctaaaacggtggattttatgctacacaaattacatttttttaaaggggcaaggagtgtcattcaaagtttatcctttaccataggtatcaaaaaagtgtatctcaatttaatagtaacttattttttaaaaaaggaagagttagcgaacaaaaaagaaaatctcaacacttagtgtttgttgaataaatgaatgtccagcaaagttttaaagtgataataaaaattaaaccagagcaaccctaaagttattaaaaaatcagatgagagtacaaatcataaatgctctattttaattaaagtttgttcaccttctcttcctcagattacttactcacagtagaaagaataggcaggcagatggttgcttagcttttaagtacatcccctcccttgcctcaatacttaagcaaaatcatgttccatctactaaggcttttaggctaaaggaaagattagccagatactattacccaaagcagtttctctcttttcgtggggtacaggcggcctctgcaagtgagcttctgactgagttatacagccggtagcaaaagctatgtgtgctgctcctgggcctggtccaataaaagccttccacatacaatcctccatgctctttccctcttcctccaactcagtgtaagtacgacaaacttggagcaaaattggaaagggtctgtgtctccaaaggagccacccatgtattagaaacaatcaatttaaatttcacatggggaaagaattccttggcagtctaagagttaggactcaacacttccagtaccatggcccgagtttaacccttggtttgggtaatatggcacagcaaataaataagtttcacatgaacaaaaaataacatgatatctgagtcattatatatgtcttttgtggcttatttgctacagcaactaactagaattgccttaattcatacattagctcacaaacatgcgttaaaaatctcttaaaagacattctaaattatcaaaggtgtatcaccccatggtgctaaagaatagtttatatctttgttattctggatgattttatgaatattattttggccattattttctccaacctaacatttccagcaagtatcctgacagaaactatctatggcttcctgcatttcatgttttatctgtattatgattgtgaaaatcaacattatatttttagatatatgagttaaccaccaagatcatatacaaattaagaatctttcactcttttctcaacatactatttagatcaacacaacagcatagtcaatggactcggttttctcaaggcctaaatcacatgagatggtacagtgtttaaatgacaagtacatttaaatgttgggaagagccatatcttcacagtcctgaatgccattaagtaatcagtaaggaaatgaaaagaaaagtagaagggatgggaaagtgggaaagaaaggcccatctgggcaaagatggtagacaaccctcaaaatctcaagtatcataaagctaacctatacctatattgttgtatcatatctgaagatatgaagaacaatcttaaacaagaaaagattgtttctagtctaatagttatcatgtgaatccaaacttcaaaataatctcaggataaatcctaaaatcatatcattttactcaaactagccacaagctgagattaacttgaaataaacaagattctgttcatccttcctattccaaaacaacatataactaatctgccaatttttaaactgttattattcaatgggaggataaaataaatcaaggcatcaaaaaaatcaaaaaacaaaaaggagtaaggggggaaagataagagaagaatcaaaagactaattcaaaatgtttcccttagaatagctaatgaagatactttagccttgttttaattgctctttctttccattcatctttccaaagagcaagaggatatgattaaggcaggaagagccacctgctctacctgctcaaaatcagagcttacctccttagattggtggcctttgccaagtttggaacaccttttccatctgttgtcttctgccccatcagactgctgataggcctatggggggaagaaagagaaacagacctgctagaactccatatccaactcattatttgccttctcaaaaggaatcatcaattcttactattcaaggaaggcagataatccaactgttacttggcctcagaagatggacattggtctttcagaagctttccttgaacaatttagcattaaatgtctcaacaggtaagcaagaatcaaatgctcacttgagagcaaacaaatcagacacaaccacatcaaaacagcaattaaaacctctgctctgccaattaagtccttcaccatgtccctaaccttcagcaaaagatttttcaaacagatattatataccacctaaagtctctttgtagggagaatccatttttccctcagcacatattcctatgtatcatcttcatgatcaagaactacttcctcatgatcaaccaaaaacagcaaattcattttctctgatttaatcttccaaatttatagaaaaacaacttggtatcttccttattcatttctttagtaaagaagaaccaaaccattcatgtttattctgttctcttaagctaaatcaccatcaattctttaattcttactcataaaattaattttccatgaaactttattctagatattaattatgaacttcaaccttaagtttctcaatcaacaacacgtctacagaaatcaaacactccaaatacagataaaaaaacataaagcagatctgcaggtcacataggtattacctaatgaagcagaagcaataaaatgttagtatttatataaatactatcttgcatatcttgtgccaaattgtctgctttcctctcatgtactcttaaaaaaaaaatccttatataaggcctattaaatatacagaattcttagtattgcaaagaactagattgaagttaaatgaactataaaaaagtttctatataataaaatttttgtaattttttaaaatcaggaaatataaatctaaactttaaagctaccttaacaagtatgctttcaacaaaaatataaatcatcatatctctttacatcattctaaaaataatgtagaaagggacagcctactgacaagataaaattaaaacagaaattctggaagtattaacattctttaccaattgcaaagtacagtaaaaatgctgataaagctctatattggcctgaagctatttttgttttttttttttaaataactttaaaaatagtgacagaaaatattcaggtcctctcaactgttaactttggtgtgaaattatacctgttagctgaaaaagattgtttttttcctctgttgtgaaaattctaatttatcaaccatatcattaacagatagcccttactttaaataataattctcaaatgtgaagtatgttttaagccatttattcctttaaaatgaaaaatatattaatgattttactgccttcccattatgttgcatctaatgatgtgctgctaattcttatgaccaataagaagagttctctttccaataagtgtttcaggtaaagacctgaaggtattttattagactaaaatcaatgccaaatttgaaaagcaaatacgggagacagaagtgtagaaaggtcagagtataaaactctaccataaaatgttttcaggtgtcaaaagcatttttccatttaattttaaaaagtggattttcattcaaaggaagaaaaggaagaatcagagattacttaagtagcttaaaatcactaaatcttgccatcttctacacaatttaagaaaaaagccatctcttttaaacttgagggcaacaaaattttcccaaggaaaaaatcgaataaataataaacagttctgtaacaactctgggggctaatatgttataaataaagattcaaattcataagttataaaaaattaaatggagtttgctactaattcttatttctccaattctgtacacattaaaaatggccaaacactactaaataccaaaaactactctatgttcatattctctgacccacttctgtaactttgctcatgttctttgacctacttctgggccaccagggaagcccaactacatcctaagaaaattaccaaaagagggcaatccaggtgtgacaaaattattcactataatatgatttgctatactaggaaaaaatgtccagccaaccaatagaaattttttactattttttaattcacctatatttactttttaccaattcatgtattccttctttccagaaaggattttaggtatcttaacaattcactatatatgtataaaatttggaccaaggaaaaacaatttaaatacaccattcaagtaatatggcccaaaccagttgttatggtcatacttcaaaagtttattctgaatttttgagtagccaaggtaaaaaaccaaagtagccattaaataattctcagagaaaaagagaaaccaaagttcctcagggaaaacaataattgttaacaaatggcatagcttccagatgatgggtgtgagcccacatttaaaaaataattattaaacattaaatgcatgaacattcacattataagggtcccagaaggagaaaagagagagaaaaggacccaaggaaatatttgaagagataataactgaaaacttccctaatatggaaaaagaaataaccaacaaaatccaggaagtacacagagtcccagaaagggtaaacccaagaaggaacacaccgagacatatagtaatcaaaccaacaaaaattaaatataaagataaaatattaaaagcaacaagggaaaaatgacaaattacaagggaactcctatcaggctatcagatgatttctcaacagaaactctacaagtcagaagggaatggcatgacatgtttaaagtgacgaaagggaagaacctacaaccaagaatacctacctagcaagactacctacctagcaagactctccttcagatttgatggacaaatcaaaagcttttcagacaagcaaaagttaacagaattcagcaccaccaaaccagctttacaacaaatgctaaaggaacttctctaggcagaaaacaagagaaggaaaagtcctacctacagaaaataaacccagaacaattaagaaaatggtaataggatcatacatatcaataattaccttaaatgtaaatggattaaatgcaccaatcaaaagacacagactggctgaacagatgaaaacatgttcatgtacacacttccacttcccacatcactctgcttgacgcccccccaaattgtatgtaattattttttattgttaggttaatcatgttcccattatgacttgcaattgcaattatctttcattctttctctggttattgattatgaaaactgataaacatcttttgctattgtgattatgtaactattattcacttaatatcactgtatcatgactggtcaacagaattagaattctatatcccaaaactgccatttaatagaaaaacctgtaatcactttttaaagtccagatgtatatcagaattatcttggaactttttgaaaaatacaaatgcccaggtactgcttttttttcagagctccatatgtgtttttaatgagcagccatatttaaaaacaactggactatatgaggatcttttacttttatctagtttgtttcactttttctatttcatattcagtgttctcatttcatttagtttgttttccaatttctcatctttctttcttatgttctttctcaagcctttatctagtgtagtacaaaagtttttgtatacatatacctttaaaaatatgcatcatatatatatattttagaaaacttacgaatttttgcctaactgaaaaatttatgacattttgattccacttgtttgacttagtatgaatagaatgctagatttctaaattaaaaaaaaatagatacacaacaagcaacaaaggtttactgtatagcacagggaactatagtcaagattttataataacatataaaggaaaataatttcaaaaataacatatgtgtatatgtataactgaatcacacacacacacacacacacaaaagaattctactttttgaaatttactaatgttttatctttctgccagtttttctaagtgtcctatggatgtctaataatgtatgagatacaaaattttaaatatatttgtgtaggatatgatattaaatataaacctatatttaaattattaacatcattcaagatgctctattatttctgcatttgataaaatattctcaaatgttaatataattatatattttttcttttcccctatattttttctgagttttgctttatgtatctttcttattaaggtgtctaatggtttatgatgtctatcttctttgtgaattgtaccttttaccattaaaaatattcatttcatttaaaataaatgtttaaaaataataattaaagattatacaataaggaaaatacatatgataatgttaaaagatacaaaattatatacacactatgtagtgatataaaagcatgatacatatggaaaaggtgggatggtcatacacataaccttttctccccacaaaattatgatttcctttactgcaatgaccataccatgctgttctgtgccaaaacatacctcaaggctgaatgctaggcagacggtagtagtttaatattttttaacttactaaactgtctgtacttacttgacttaatcaagatagtatttggtttataaaaatagaaatgatcagtatataacagaaataatacaaaaagtattttctgatgaagaattcattgctaccactatcaatggcaaggttgactgtagacacctttcatagctgaagggcaccaaaaaggcctcaatccacaacttccttataccactccatatatatttcaaattcttccttaaggctcacaagatattaactaccaagaagtgttactattattctcaaataaaataatatgcgtccttttaaaaaatactttattcatgtttgaaaagccagaatatttctcaggtagttcaaattttttataagagagcaaccagaaatctccaaaatcaaacatgaccataaaattataacaaaatttttgtatcatcaaaaatttaaaaatcataccacaaaaacctgatagattccacaatattaaaagttgtcaagtatgtcctttaattcagttcctgtttcttgactttttcttgcttctcaaatagcaagtaactacataaaaactttcccttttaacataagtagtggtctgaaagcagaacttagactttcactgagactgctttttacaaggggtatgtgtcctcaaacacatcaatcaaaactgacagtcttttaaagactctaacatatttataaaaacaaacatggaaatggatgatattgttatcatatggactcaaaaaatagtacagaaaaaactgatccatccttcttctctataggtatcatcactggtaattcctttggtcttaaatgcttaaatatagatcttcagaagactaaaaaacacatttaaaaaaagatgttgggttacactgactccaataaaaatcactacccagtcttaaaatacaaaatagtagaattaagattaaagtccagatattctgtatcctattatacaaaaaagaatttctatactctgacatcatccatttatacatgcttccatctttttgaaaaacatattcccagtcccagttttcccataagattgaacactgatgatactttaaaattacctcttaccaccaactttgttaaaaaacaaaggggcttttgcttcatattggagacctggggaagcaaaaactaaagcagtaaaatgaaaaaggtcaaactatgtttccctacctacaatttttttcagatgtttaaagtgtggtaaaataaagagaagaaaaattttagatattcttagatttgatatcatactcacttagagaaaaatagaagagagaggaaaacaagtagatggaaaagataaaaaagattcccaagtatcaaaggagaagggagaaagttccaaagcattcataaaaggagactcatgatagccttaactcatggaccaagagattattagttttgcacctgaatggtcaattttgattaaccacagttttaagttctttaactgttatttagacaagatttatttcaaattggaagagcaggaaaagagtggaggatgacagacatccagggggagaaattcttagaatattatattaataacaaaaataaagtttttcaatcaaatttagcttaagaccatatccaatatttggtgaataatttactcatccctttcataaagaattgtcaattatttttaagtgacaccatatttttaaaaattgttgttcagtcacccaattgtgtcttgactctttgtgaccccacagactgcagcacaacaggcctccctgtccctcaccatctctcaagttcatgtccattgcccaagttcatgtccatcacatggtaatcatggtaaccaggacagtgcttttgagagagaaatgagggaatggataccaaagaatatgacaattccaaaaaaggtaggtatgactcactagactggataaaatattaatttttaaagctactgttattattgcttcttggccttttggctaagatcaagtgtaaaagctactgttatcaagtataaggtaattcttcctttaataatttcctatcacagaagcagcttatttaatgcaccaaaagactctagatagggtgttcctttcaaagccaaaagaaaattttcttacacaaaacttgatactcctcagaagttaagaggaaaacgtacaggtaaaagaatgagagggtagttctgtcgcaaccatagctttagtgtttgttctaaaatacgtctctgatatgaaaacacaatcaagttagttaacaaaggtgtctacaagcctaaaagacatgacacatcactcattttgtctcattttgtttgccttccattaccaaatatccactggctcccttctacgacatctgcttaatagccagttctccttgaattctaaaatgcttaaaatgcaaaattctaatgattctaagtttagctctactgaactcttccagagtcctaagagcagcagttactacacacattctaagcctgatgaaagttattcttcataaatgccagtccttttacagcaatgtcactatgtgaccataaagggtgatgtgggaagagtaacagctgggcacctcttgttccctagacttctaaaagtctacaattctgggagaaaaaactggagagcaacctgcctgaattaaacatgaatatatgccatgatgtttcttttttgaattttgacttaattaggtccactttcattagccaaaaggggggacttgtctatagaattacaaacaatcattgtttttgaatcaagaatatatgaaattatattaaaaataaaatgattttgaaaaatgacattctgtacccctaaatgccctcagttttccattagagaggaatgaaagagaattcagtaattttttatacatactctgaagctagagtttctctcaatctttaaatttcaaagcaatacagaaaccaatagaactttgtgttgctgattaaaacttgaagaaaggatccacatgtacacactcgagaatcctgtataatggatacagtataatgttaactactattcaatgtaaactacaaacaaaacatgagaggtaaagtgaagaagagagtcctataggtatctaacttgtccccgcagacatggggacaccatgaaaatgtgaacaaaaaatactaaaactagatctcagatctctctcttgagtctggggtgacaattccacgcatatttttggaatcctagtcaaatgtcaggatgagttaccattccactcttttaacatattttacttactctggtcagcatagtttttggccttgagttcaagttgtcttgtttgagattctaaagattccactctggtctgtaaatcttttttttcttgttcttgagagtcttcaaattcaatgaatttctaataaagaataaaaatatattattttcattagataaatgaaacttactaacattataaactcccgtttcttggtatcaagaatcacaattaggcattaactactcaaaacagtctcatgtaaaggtctaggggactttcctgacagtgcagtggttgagattccgtacttctactcagggagcatgggtttcatccctggtcagggtaactaagaccctacatgcctcacaacatggccaaaaatttttttttttaattaaggtttaaaaatctccaaatatagaagggaaaagatgacaaaataatgtttatgaaaatatatctacttcattgtaatatgcatttcaaagaaaatatataaatcttttaacttagcctataacatgtaaaacagaaaagtacagaataatgaaatatcaatatatatatattaaatgattctctgaataatgaacagtcttctaaattacctgaaccacgtgctagcatgtgctagaaatacctccattaatcaaatttactaaaatcactctcattatggagttatcaataaatctctcttcatcttgttttatgaattgttttatctgcatcatctggcaactgactactcatttctccttaagaaaatttcccccaatttgatcttttccttgttttcctcccactttgctgattgctccttcttggtcttcattcctcctcttgtccccagtttcttaacgccggtaagctcagtccctgcacaactctttttttcttcgttgtttcttcttattacctagagaccataatgttaaatgctaaatgaatgctaacaacctccaaatttctaactcagtctctagcccagatctgaattctagacttgcaatgttcaaacgcctgctggacaacttcatctgaatgtctaataagagccttagggcttccctagtggtctagtggataagaatccaactgccaatgccagggttcaagccctgctccaggaagatctcacatgctgcagagcaacgaagcccagtgtcctaaagccctcaaaccacaactactgagggctccttagagctggtgcttcacaacaaaagaagccaccacaatgagagaaactcattcactccaactacagatagctcccactctccacaactggagaaagcctgcatgtagcaacaaagacagccaaaaataaataattaattgaaggggaaaaaaaaaaaggaaccttaaactcgacatgtcaaagcttgctcctcctggtcttacctagctcactaaattactacagtcaattgctcaggctcaaaattctacttcaatccaatcctttggctaatctaccttcagatttgaccacttctcttcctcttcaccaccatcctgctctgtgccaccattatccattgcctggataagtgcagcagcagtattttccaaactggcctcctacttccacctgtgcccctttacagtgcattttccacacagtagttagggtgacactttttaaaaaatcacatcagtgtatgcctatgctgcaaatactttgatttcattcttccaaagtccttaaccatagcctccgcaggaccaatgtaatcaatcatcctcttacttatttgacatcatcctctaatactcttccttcagatatttaaatgtctcattctggtctcacctccttaatatctttgttcaaatgttagcttcttactaagactttctttacccatcatatttaaaactgcaacacccactcactacttctcttgtttattcctctatcgcacttatcctcatctaaaacactaccagttcagtttggtaactaagtcacgtctgacattgcaaccccatgggcagcagcacgccaggcttcccggtccatcaccaactcctggagcttactcaaactcatgtccattgagtcggtgatgccatccagccatctcatcctctgtcttccccttctcctcctgcttcaatctttcccagcatcaaggtattttcaaatgagtcagttcttcgcatcaggtggccaaagtattggagtttcatcttcagcatcagtccttccaatgaattttcaggactgatttcctttaggatggactggttggatctcttgatgtccaagagactctcaagagtcttctccaacaccacagttcaaaagcatcaattctttggcactcagctttctttatagtccaactctcacatccatatataactactggaaaaaccacagctttgaataaacagattttgttggtaaagtaatgacactgctttttaatatgctgtctaggttggtcatagcttttcttccaaggagcaagtatcttttaatttcatggctgcagtcaccatctgcagtgattctggagctcagaatataaagcctgtcactgtttccattgtttccccatctatttggcatgaagtgatggaactggatgccatgatcttagttttttgaatggtgagttttaagccaactgtttcactctcctctttcacttgcatcaagaggctctttagcttttcttcactttctgccataagggtggtgtcatctgcatatcggaggttattgatattactcccagcaatcctgattccagcgtgtgcttcattcagcacagcactttgcatgatgtattctgcacgtaagttaaataagcatggtgacaatatacagccttgatgtactacttttcctatttggaaacagtctgttgttccatgtccagttctaactgttgcttcttgacctgcatacagatttctcaagaggtaggtcaggtggtctggtattcccatctctttcagaattttccacagtttcttgtgatccacacagtcaaaggctttggcatagtcaataaagcagaagtaggtgtttttctggaactctcttgcttttctcatgatccaacggatgttggcaatttgatctttggttcctctgccttttctaaatccagcttgaagatctggaagttcacagttcacatactgttgaagcctggtttagaggactttgtgcattactttactagtgtgtgagatgagtgcaattgtgcagtagtttgagcattctttggcattgcctttctttaggcttagactgaaaactgaccttttccagtcctgtggccactggtgagttttccaaatttgcttgcatattgagtgcagcactttcacaacatcatcttttaggatttgaaatagctcaactggaattccatcacctccactagctttattcgtggtgatgcttcctaaggcccactcgacttcacattccaggatgtctggctctaggtgagtgatcacaccatcatggttatctgggtcataaagatcttttttgtatagttcttctgtgtattcttaccacctcttcttaatatcttctgcttctgttaggtccacaccgtttctgtcctttattgtgcctatctttgcacgaagtattcccttggtatctctaattttcttgaagagacctctagttttccccattctattgttttcctctatttctttgcattgatcactaactagtaaggctttcttgtctctcctcctattctttggaactctgcattcaaatgggtatatctttccttttctcctttgcctttagttttttgcctcagctatttgtaacccctcctcagacaaccattttgactttttgcatttctttttattggggatggtcctgatcactgtctcctggacagtgtcacgaacctccatccatagttctttaggcactctatcagatctaatcccttgaatctatcactttcactgtataatcataagggatttgatttaggtcatacctgaaaggtctagtggttttccctactttcttcaatttaagtctgaatttggcaataaggagttcatgatctgagccacagtcagctcctgttctttttgctgactgtatagagcttctccatctttggctgcaaagaatctaatcagtctgattttgtgttgaccatctggtgatgtgcatgtgtagagtcgtctcttgtgttgttggaagagggtgtttgctctgaccagtgcattctcttggcagaactctgtaagcctttgtcctgcttccttctgtactccaaggccaaatttgcctgttactccaggtatctcttaactttctacttttgcattccagtcccctataatgaaaaggacatcgtttttggacaatgttctagaaggtctttaggtcttcatagaaccgtccaacttcagcttcttcagcattactggttgggacacaggcttggattactgtgatattgaatggtttgccttagaaatgaatcgcgatcattctgtcgtttttgagattgcacccaagtactgcatttcagactcttctgttgactatgagctactccatttctaagggattcttgcccacagtagtagatataatggtcatctgagttaaattcacccattcaagtccattttcgttcactgattcctaaaatgttgatgttcactcttgccatctcctgtttgaccacctccaatttactttgattcatggacctaacattacaggttcctatgcaatactgttctttacagcatcagactttacttccatcaccagtcacatccacaactgggcgctgtttttgctttaactctatctcgtcattctttctggagttacttcttcactgatctcctgcagcatattgggcacctactgacctagggagttcatctttcactgtccaatctttctgccttttgagactgttcatggggttctcaaggcaagaaaactgaagtagtttgccattcccttctccagtggaccacgttttgtcagaactctctaccatgacccatctgtcttgggtggccctacatggcatggccatggtttcatgaaattagacaaggctgtggtccatgtgatccgtgtggttagttttctgtgactgtggttttcattctgtctgcctctgatgaataaggattagaggtttatggaagcttcctgatgggagagactgactgtgggggaaactgggtcttgttctgatgggcagggccatgctcagtaaatcttcaatccaattttctgttgataggcagggctgtgttcccttcctattgtttgacctgaggccaaactatggtggaggtaatgaagataatggcaacctccttcatgcccttatcttcattacctccatgtatggagcttccttggtggctcagaggttaaagcgtctgcctccaatgcgggagacccgggtttaatccctgagtcgggaagatcccctggagaaggaaatggcaatcccctccagtatccttgcctggagaatcccatggacagagaagcctagtaggttacagcccacgaggtcgcaaagagtcggacacgactgagcgacttcaccttacctcacctcacctaaggagtcactcagtacccccgaccctgcaccaggccaccaagcccatgcctctgctggagacttcaggacattcacgggcaagtctgggtcagtctcttgtggaggtcactgctcctttttcctgggtcctggtgcacacaaggttttgtttgtgccctccaaaagcctgtctccccagtcctgtgtaagctctggtggctctatggtggtgttgatggtggcctcctccaagagggcttatgccacacccagacctgctgcacccagagcccctgcccctgcagcaggccactgctgacccgcacctctgcaggagacactcaaacacagtgctggctcagtctctggggggcttccgggtcctatatatttcagtaatttatcttatttattacctgccttgcctcgctagaatgtaggtttcatgagggcagggatttgttttgtttgctgttgtatttcagagaaggcaatggcaccccactccagtactcttgcctggaaaatcccatggatggaggagcctggtaggctggagtgcatggggtcgctaagagtcagacacgactgagcaacttcactttcacctttcactttcatgcattggagaaggaaatggcaacccactccagtgttcttgcctggagaatcccagggacgggggagcctggtgggctgccgtctatgggggtcacacagagtcggacacgactgaagcgactcagcagcagcagcagcagctgttctatttccagtgcaaagaatgacaatggtgcatagcaggtgctcaaatatttgttaaacgaatgaataaatgaaaaaattttcagagtaaaaaaactaaaacccatatagaaaaatgtatagttcacaaataaacttgttcttgtagttcagttgctatgtccaattctgcaaccccattgacagtagcatgccaggcttccctgtgcttcactatcacccagtttgctcagattcatgtccattgagttgctgatgctatctaaccatctcatcctctgccccctcttctcctttctccttcaatctttcccagcatcaggtcttttccaatgagctggcttttatcatgggtggccaaaatattggagattcagcttcaccatcagtccttccaatgaatatacagggttgattctgttaggaaataaataccactaaatacactctagttttaatatgaaatttactatcacccacttcatctatcctgaagcttttcaatcattgtagtagacattctgcacacactatcttcctttgaagaacttctccccagtttcatgctaaatctattcagctcatgcaatttgactagtgaggacttcatctccctaggtctgggcatacaacctgaaccagactgatcagactcttctctctgggacacgtgctagtttgtggaaagaattatacctcttctcagctgaagagacatccttttcaacagacggaaagagcatgcctcaaaacatgtggcaggggcagcaagaaaccctaattagagatactatttgagtcttagattcagtatttcctggagccagcattttccaattgtttcattttttcagttacattagccaataaattctatttttatagagggaaaaggagtacgtcaaggctgtatactgtcaccctgcttatttaacttctatgcagaatacatcataagaaatgctgggctggaagaagcacacgctggaatcaagattgctgggataaatatcaataacctcagatatgcagatgacaccacccttatggcagaaagtgaagaggaactcaaaagcctcttgatgaaagtgaaagaggagagtgaaaaagttggcttaaagctcaacattcagaaaacgaagatcatggcatctggtcccatcacttcatgggaaatagatggggaaacagtggaaacagtgtcagactttattttggggggctccaaaaccactgcagatggtgactgcagccatgaaattacgacgcttactccttggaagaaaagttatgaccaacctagacagcatattcaaaggcagaggcattactttgacaataaaggtttgtctagtcaaggctatggcttttccagtggtcatgtatggatgtgagagttggactgtgaagaaagctgagcaccgaagaattgatgcttttgaatgtggtgttggagaagactcttgagagtcccttggactgcaaggagatccaatcagtccattctaaaggagatcagtcctgggtgttctttggaaggactgatgctgaagctgaaactccagtactttggccacctcatgcgaagagttgactcattggaaaagactctgatgctgggagagattgagggcaggaggagtaggggacgacagaggatgagatggctggatggcatcaccgactcaatggacatgagtttgagtgaactctgggagttggtgatggacagggaggcctggcatgctgcaattcatggggtcgcaaagagtcggacatgactgagtgactgaactgaactgacagaggcttgagttggtttctaccacaagaaactgaaagcatcctctatattcatctactttcccttaagagctattttattttctcattttattagtcaatatttccacatctttgaagcctgaaacatccaacatcggacacattggttcttaatcattcgggcgtctgcccttcccaaaccctgccctctactttcctatgaagatatttcatatttcagagatttctgggaagcctgaagcagccattgtctatttttttgtagagaattaatctaagaatgattacataaagaagtactccagaaaatccaaattttaaacatgtgttaaatcttggtttggaaatgtgcagctgctgccctcctttaaaatgctaattactactgcacaacaaaaataaatattcttcagttctgataaggcacataaacagatcacacagggcagtgaaagcctgggaggacaaacacttcgtaatagacttcaaagagtaatcaagaaaaagtaacaaatgattgaaattttcaaaactgttatccaagaaaactgtatctgtcaaataggttagttttgagccattgtttcatgaaatatccctgataccacagataatcttgggaaaagaagctcctatagggtaggataattcaaaaaacttcagaaaatggcctggttctatatggcacttggcagtaatgtgcaagtaaaaaacataaaaagttaagaaaaaaattagaaacagagttctatgaaattcaatcagctgctaaaataagagtgttgacaaaaaaaggtatagactcctggttctaatgggagtctttttctgtctctttctgtacttaatcttctcatactatatttcactatatattcatatatatttcactatagtgaaaataattaagcaataagtggcatggattacactaacagaaagttctcctctatgctcagagagcctaggtggcctagttagcatatacatgtgagtactgctaaaattcttcatagctttgtagactacaaacatgtttgactcaagctttaaaaatttaacttacttcaaaataacatgtctgctttctactcctgtattttcaaattaacacacagactgagacaacaaaaaattggaacgaagcccattctgtcactttctagtcaaagaaaaattattgtcacaattaaataaaaccacacacttacaatgactgttttccagatgccaggagaagtacactaggcagtgaagtagtgcaaagaggtttattacaaactactaagtaatgacattcaaaagactaaatcaaataacacattaactaaaaagtaaaaactctttgtccaaccaatctatacacttacttcatgacagccaccaaagaaacagctatcaaaataacatgttaagtactacaatggaaccaagtacaaggaccaatagaaacagagaaataagtaactaaatctgatttaagtaaaaaagaaagagaagccattttggctaccttgaaagaaatagattatctgacaaaatgtggtaaaaacattacaggcagagttaatagcatatgcaaatgcatagtggcataaagatcaaggcatgcccaaggagaaaaaactcaggatttggaatttcagtaaataatgtaaaaggtaaacgattagccaaacagtgagttggaaatctctcctctgattcacaaaggtagtaagtgggcaagtaagattccattcatccatccatcctttcaacacacaagctgagtattctaaggtgatgagaatgtagccgattataagacactgctggtccctatgctccactgcttgaaatctggcagaggaaaataaaccttaaatatatgtaactgacgggaattccctggcagttcagtggtcagtattccttgcttccgctacagaggacctgggttagatcctggttggggaactaagatcccaaaaaccgtgtgacaaggtcaaaaaaaaaacaaaaaactgacagactgatttgcaaagataagtaacaggatagttgtctacttggaggttactgtcagtaaggaacggctgttatttctttcactgttttttccctgagcagccttatagtttgtatgttaagtcaaatcagtactctatactaagctacacattccacaatccacagaattgtctctttcatacaattaacagttgaaaacggcaaaacaaattttttaatgctttgcttctatctttagagagactttttttttaattggagtataactgatttacaatattgtgttactttcacttaggtatacagcaaagtgaatcagttatacatacacatgtgtgtgtgctgtgctaagctgcttcagttgtgtccgactctgcgaccccatggactgtagccctccaggatcctctgtccatgggatcctccaggcaagaatactgaagtgggttgccatggcctcctccaggggctcttcccaaaccagggatcaaacccacgtctcttgtctcctgtactggcaggcaggtcctctaccacaagcaccacctgggaagcccacatacacatctatccactcttttctttagattgattccccagtagaccattacagagtattgagtagagcttgttactttctcagtgataacaacatgggataacacaaccttggtttataactttatcccaggcttgtatatgatgtaattctctccaagactttctaaaatgaggatttaacatttcaaactctgaatacaaaaaagactttaaaaatcatagttcaagttcacacacaatgcaaccacactgtaatcatatgtgacacaagaaaggatatcagaaaagtgtacactgtggaagcgacacggtatgactaaagacatttctgagacatttaaactgagacctaaaggattaaaaaaaagtctataaagagcaaaaagttcatcaaactgaaagaaactaaggaaatccagtatggccaagctcagagatttgagaaagagaatggcctgagatgaggatggaatatagataaaaaacaaatcacatagagccttacaggatactgggtcacattaaggatgatggaactccactcatactttgaaaagcttagtttctgaggatacggaaaatgggctgtgctgagatggaaacaagagtatctgaatggagaccaaaggtaaccatattaatgagagatgattatatgctagcagtgaggatggaaagatgaaaatgaattcaagctattttggagataaaataaacaggactggtgactgaatgaaaaagagagaatgaaagctcaggaaaaagtcaagcttcctgaactgaccaaaagtgaggatggtggtaccacttgttgaatataaacagaagagagagtggtatgagtaatataatagatttttgtttccccagatagtttcctccatttttactgaaaagtcaggcttttatcagtctcccatcaggcctccctttcaggcttccagcaaggcaaagaggatcttaacactaaatgagtacaaatttcctcttagtccagcctgtggcctgtgtttcaaggggacccaacatggagattttgaggccaagtttttccccttctagcccctcctcatagctggaggaggggctagaagtagataacccttccttttccctggtattcagtaagcttcatcctttcacctcttctgccttgaaaaatgtgctctctcaggaagtgctggttactcagtcatatccaactctttgctatagaccccatggtctatagcccaccaggttcctctgtccatggaattctccaggcaggaaaactggaatgagttgccatttcctcctccaggggatcttcctcatccggggatcttcctcatccagggatcgaacttgggtctcctgcattgcagacagattctttaccatctgggccaccagagaagccagggacgctcctgcaggaaatgaactgacagactcatccacactgaggtttacgtggtggagagggcttcactggggtattttaagttcaaatggtgtgaaatccatgagctgaaccaggaaaactggaactttacacaccagaaagtagactgtgccttctcagaatgcacacccttgggggtcagccatatgcctcacttctcacagcctcagggctggatgagccccatatctcctttttgggatgctttccctctgttctgcaaaccacaggttctgcggggccacaccctctcttggttgtaaggctgcttgatactctatccaaggaggagacaaccacaatgttttgtcccaatgctcccacccatcccacctgggagggcaggctgggctggatccagttgctcttggatctccagatgaaagctccaggctatgccactgatctgaaccagaacattaataagaatagaataatagaattgattttaaataccaaggcaaactacctaagaggtattcaagagtaccatatggaatctttatttgtaaaagtatctcattatttggaatctaattggtacaaccaacatggaagttagcaatgtggatcaaagttcttagagaatgaatgaaaaaaatgttacttttaccatactttaagagctttgatatattacctcatatatagtgtgatcctacaattataaactggaggaaaagtaaatgggcaaaagaaaagctttggtggcctatattaaaaaggctgtttaacagtgatgggatttaggatgactttatctttttttaatagccttatttttaagtagtcttcagacttccctggcagttcagtggttaagacttcccacttccaatgcaggaactggttctacccctgttcgggaaactgagatcacatatagggttagtgaagccaacaaaaaaaaagaaggaagtctaaagatgctgggttttttgtttgtttttgcaataaacatgtaaaattaacaaaggaaagggggaaatgcaaactgtaggcctatacccctttaaaggtggctcaagagctaaggatgaaccttgattcatttgcatttcatctcagaaaaagcttgatatatcaagcattcattaatattgtcatttatctgaccaaaaatttttggttttcctaatgtggctgcatgaggtcttaattgcagcatgcagaatcttagttccctgatcagggactgaacccaggtgcactgaaatgggaatgtggaggcttaaccactggacaatcagggaagtttctaagagcattttttgaaatgcagttaatcaaaaaaatctgaaatggaatactgaaacagaggaaaatcaatgtgaagggatagtttacttttaattatatacaactggccccctgaagaagggaaaagctacccactccagtattctggcctggagaattccatggactatatagtctatgcggtcacaaagagtcagacacaactgagcaacttgcactcactcactcactcatggagatagtaaaggacaggggagcctggcatgctacagtccatggggtcacaaagagttggacacatcttaactactgaacatgttatatatacaccatgacagtatattagatctgctgaagttgaatgctaaaatacaagagtgatgtatttcaggactagaatattgaagtgtggatccattccagaaagcttattattactataacttgcatgaaacagtacttttagggaattccctagtggtccagtggttaacactccacactttccctgcgggggcacaggttcagtccatagtcagggaattaacatgccccaagcttgcatcacagtcaccaaaaaaaataataataataacattttttttttttaggcaaagtaaataggattttggaggctgtaccctagccagagacagtttaaaaaaaaaaaaaaagtaaaatgaatgctcataagaaacctgtaagcattcatcattgatttaatgtgattcaatttcttgccagcagcataactttataaaaacggccaacctacagtacatttggcaaatggtagggttagggcaatatcaaaaccaaggcaggagagaggcaggttctcaaactacaaagcagtactatccctagagaattctggttcctttcccccaacacaggagagtctgtcagatccctcagatgtgttggtacagggtgcacacctctccataacccacctgtttgtccatccatttttctaagctactctctcacacacagttttttaaaaaagtgttaagggactgggataaaagcccaccaatgggcattttcatcttgtgttacaaatatatcttcattagatactcctttctcctctcaattactaattggccaacaacaaatgtgactccagacaaacttgtgggagcaatgagacacttggaaaaaaaaaaaaaaaagtcggtatacaatacaaattcatctcaggattcaaaaagaataatctttgtgataagcaaaatggtttcaagttcagatggcttataggagctattctgccacaatgttctggagaaaaacaaagctttgaaaaggcatggtccttaagctaaaaaaaaaaaaaatccctagagactgttgctttattggaaaaagatagtaaagtgaagtgaaagccattcagtcgtgtccgactctttgcgaccccaaggactatacagtccatggaattctcccggccagaatactacagtgtgtagcctttcccttttccagggcatcttcccaacttagggatcaaacccaagtttcccacattgcaggtagattctttaccagctgagtcacaagggaaacccaaaaatgctggagtgggtagcctatcccttctccatcagatcttcccgacccaggaatcgaatcagggtctcctgcgttccaagtggattctttagcaactgagctatgagggaagccggggagaaagatatattaatggacaaaaaacaagcaaaaaacctctacaacctttaaagtagtaactttgtatatagtacttttcttaaaaaaaaaaaaaaaatgaccaaataaaaggctgacttactgctcagaatctaccaatatatatccacgacccccatttactctgtaaagtgagggaaagaaacatttccattattttaaataattattgttaaactcagttcatttaaatataactatttttcaatatagtatcttttaagaaataaaagaacaaaccatattattaagcaatgcctgaggaatgtaattccccaaagcctccccaatccaaaatgcagaaaaaacttccaatacaaatgacttagtttcttcaaacctaaataacaaagtgggggtgtggggtaggaggagagcacttacagatgatgagatgcttaagagacacagagacaggaaagggagaaagagaaagatataccaactgaatgcagagtttcacagtattgtaggtgagataagaatgccttcttaaatgaacaacgcaaataaaatgaggaaaataacagaatggaaagactacaaatctcttcaagaaaactggaaatatcaagggaacatttcatgcaaggatgggcacaataaaggacagaaatggtaaggacctaagaagagcagaagagattaagaagaggtggcaagaatacacaaaagaactatataaaacaggtcttgaagatccagataaccacaacggtgtggtcactcatctagagccagacatcctggagtgtgaagtcaagtgggccttagaaagtactactatgaacaaagtcagtggatgtgatgaaattccagctgagctatttcaaatcctaaaagatgatgctggtaaagtgctgcactcaatatgccagcaaatttagaaaactcagcagtagccacaggactggaaaaggtcagttttcattccaatcattccagttttcatttcaaccagagatcaaattaccaacattcgctggatcagagagaaagcaagggaatttcagaaaaacatctacttctgcttcattgattacactaaagcctttgactgtgtggatcacaacaaactggaaaattctgaaagagatgggaataccacacctccttacctgcctcctgagaaacctgtatgcaggttaaaaagcaacaactagaactggacacggaacatctgactggttcaaatttgggagtacagcaaggctatatattgtcaccctgcttatttaacttatatgcagagtacatcattcaaaatgtcaagatggatgaatcacaagctggaatcaagaaatatcaacaacctcagatatgcagatgatatcactctaatggcagaacatgaagagtaaccaaagagccccttgatgagggtgaaaaaccagagtgaaaatgctggcttaaaactcaacattcaaaaaactaagagtatggcatctggactcatcacctaatggcaaacgggtgggggaaaagtggaagcagtaacagattttattttcttgggctccaaaatcactgtggacagtaactacagccatgaaattaaaagacacttggtccttggaagaaaagctatgacaaaactagacagtgtattaaaaagtagagacatctactttgtcaacaaaagtccatatagtcaaagctatggttttcccagtcatgtacgaatgtgaaagttggaccataatgaaggctgagcaccgaagaattgaagtttttaaattgtggttctgaagaagactcttaagagtcccttggactgcaagtagatcaaaccacgcaatcctaaaggaaactgaccctgaatattcattggaaggactgatgctgaagctgaaactccaatactttggccatctggggtgcagagccaactcatgagaaaacaccctaatgttgggaaagattgaaggcagaaggagaaggggatgatagaggatgagatggttagatggcatcagcgactcaatggacatgagtttgagcaagctccaggagatggtgaaggacaggcaagcctggcttgctgcagtccctggggtcacaaagagttgggacacaattgaatgggtgaacaacaacaacaactagtagctcttgtaggtcttcacagaactgttcaacttcattggctttagtggttggggcacagtcttggactagtgtgatgttgaatggtttccctggaaacaaacagagctcattctgtcgtttttgaggctgcacccaagtaatgcattttggactcttattgactataaggactactccatttattctaaggaattcttgcccacagaagtagataattaaattcacccattcccatccattttagttcatcaactgctaaaatgactatgttcactcttgccatctcctgaaataaaagtttactattcttcatagtaagtgtgtgcttagttgctaaatcgtgtttgactcttttgggaccccgtggaccatagtcttccaggctactccgttcagaggattttccaggcaagaatactggagtgggttgccatttccttctccaggggaccttcccaacccaaagatcaagcccgcagctcctgcactgcaggtggattctaaacttttcttcaaaacacatcaattttttttactaaacagttcatttgttactttagggtactactgctatatcctaattagaaatgtctatcaaaaaattctaagcctgagatggctggatggcatcacggacttgatggacatgagtctgagtgaactctgggagatggtgatgaacagggaggcctggcgtgctgcgattcatggggtcgcaaagagtcggacacgactgagccgactgaactgaactgaagcaatagttaaaattaagggttggcacttaaccatttgtgtggaaaatttattcagctagaagaaattttcaatcagtaacataaatatttgtggctaaaactaattaaaaagcaatcagagccttctttcttatgagtatacagtgtgaaaactacagccatctatggaccaggcaatgggttctcatcagaccctgaatctgtcagcgtcatgaccttggacttcccagctattagaacagtgcaaataggtatttgttgttaaagccactcaacctctggtatttttgttatagcagcctgagcagaccaagagagaacagaagtggctgacaccatctcttctctctttttctcttgaaagcagccttgatgcccagagttctgaatattaatttttaaccatgaggtatattgtatgaagtccagagtcttggcctggactttgatgccagcaccctctatttctaaacttcctgctgtgaggaaaaacttaaacaaacaaagagaaatccctaacaaaataacaaccacaaaaacaatcagagaaggaattccctggtggtccagtggttaggactttatgtttccacttcagggggcacaggtctaattcctcgctggggaactaagatccttcaagctgtgtggaacagtcaaaaaaaaaaagagagagagagagagaatcatggtgctaacatgatttttaagtagtctacaatattctgacaacagtttcaatgatcttaatatttcaattttttaaatgcttaaatatttctagaatatctagtatgtataggacaatgtagccaaagtgtctgtaataactatacttaggagaactcagtttttctgtatatgcctaagtcaaaggactcactgaagaattttctggaagttgtagcataacttggtaccagcagtaaataaggacaataacttgaatgcacaaaagagaatttcaaatagctagcctcggcaatttgacctttagtatatttatctatccaccaaacaaccgaacaaaaaataacctactgcaccccagtaatttagtgggagaattaaagcaataggttagtcaaacacaacactgaaagtactatgaaaggaggatagtatgctatcagttcagttcagtcgttcagtcgtgtctgactctttgcgaccccatgcatcgcagcacgccaggcctccctgttcatcaccatctcccagagttcactcagactcatgtccatcaagtccgtgatgccatccagccatctcatcctcggtcgtccccttctcctcctgcccccaatccctcccagcaccagagtcttttccaatgagtcaactcttcacatgaggtagccaaagtactggagcttcagctttagcatgattccttccaaagaaatcccagggttgatctcctttagaatggactggttggatctccttgcagtccaggggactctcaagagtcttctccaacaccacagttcaaaagcatcaattcttcggtgctcagccttcttcacggtcccgctctcacatccatacatgaccacaggaaaaaccatagctttgactagatggaccttagtcggcaaagtaatgtctctgcttttgaatatgctatctaggttagtcataacttttcttccaaggagtaagcgtcttttaatttcatggctgcagtcaccatctgcagtgattctggagcccaaaaatgctatgggaagatataaaatgggtacaacccatacttcagtgtcgtaaaaggcattccagaattgaaacctgaaacatgaataatggtagccaggcaatcgaagagaaaagagagtcccatgcaaagaggcagcttttaagaaggcctggagaaactaccttttacataacaaactcaaggtgttcagtatggctctaaaaggaaaagattagactagtaaagtcagaagcagccagactacaaggccttgtatgttagaaactttagtcaattcaaaaacaagattttagacagacccactaaaggcttttaagtgtggaaacgatctgatcagattgccattttggagagatccaggcacagtgtggtggacagtgtataggctggcaatacacgatgcaaatagatcatttatgggacagtttgagttgcccatttatttattcagaaatattcaaagggtatttcttatgtgccagagctagtatccagtttgaatgaaagaagctccagctcttcacagtagtaagctttactttcagagtagtaaaaatagttttgaaaagtaaagagattccagatatatttaggagttgaaaacaaaagaaggcagcaatggggatgaaggagagagaacagttaagaatgatgacctggcttctggctaggtagacagtagtatctactcaggaagagaatgagcaaagcaagcttgtgagttaagttcagttttggacacgttgggagacattcatgtccaataagcaacagtaatatgtatctgaaactccagagagagagatatggacttaaaaggctgttcttagtaagctatcagttccataaaggaagaattttgttttactcaccactgtatcccaatagccacagtaccaggcacacagctggccttcaataaatatctgttaaatgaatgaatgaaatacactattttgcaatagtcaacaaaatggtcaccaaactgatcagaatggattatatgagctaggcagcgtacagagtgagaacttaaggggatcttagaaaaagcaccaaagaacaccattgctaacgggagtaagaataatccacagataagcaagaggaaaaccaagagatttcaaagttagagaaccaaaatataatgtttcttacagaataagtgaccgaaagagacaaatgttgctaagaagtatgaggaataagacagaaaagagaagaaagacatctgagagggtgattcacttttgtgaattttctttttttttcttcttttttgtttttgttttttttgttgagcctcacagaacttggtcctcctactagggatcaaacctgtgccactgcagtgaaaacatggagttctaaccacttagtgccagggaattcctatcacctttgtgaattttcaagaatatgaggaggagaaattctagtatgcctaacatttcatatctaaataatgactctacatatctaaataatgagatggactgcttagccttttataaacttgtttgttctatctaacatccctgcctctttactctgttatcacctcacctctatttcctgtgtaacacgtatcacaatctataattaactggtttgttgttacaatataaactgtaagaaaggaagggctacttttcttgcctgatctgtttgtggacacattcccagagtctagaatagtgcctggctcaataaatatttcttttttctgatcattcaggtgtcctgtttatctccctttgggaatgggatagggaagaattaaaagattatggagattcctctcagcccttaaaaaaatacctgcaagaaaagcaagtaaaaatacattttagggacttccctggcagttcactgattatgactccgtgcttccaatgcagggggcgtggcttctatcttggctgagaaactaagatcccatgtgcttcctggtgtggccaaaaaataaatttaaaagaaaccaagattttaaaagaaaaaatattttaaagcatagcaacagaatcgagaaacacaaaaatcctaaatttgtcccctacagaggatctaatcagtgggagtgcaaattacaaggaaaaaattcttcttaggctctataatcctagtggagcaggtaagcaatcagaaacaaggtaccctaaaatgtatgcaaggctaaaaataaagttgccagagaaaacattaagtggagggtagtttctcaatctctgcatttcaaagcttaaaatgggaaaaataatccattaaacttttataccataatcctaaaaaaaattagacaattttaactgctttgtagaactcacgtttaaatttctatttatagaaaagtagttaaactgcaataatttcttcctttccagatgagtgccattagttcactataaaaacattaacttactcatctttataaccaacacatgctctgctctaaaaaattaattcacagacttccctagtagtccagcggttaggactctgtgcttccagtgcagaggatgtgggttcaatccctggctggaaaactaacatttcatatgctatccagtacagcaaaaaaaaaaaaaaaagcaaaacacaaactcaaatggaatactagatattagaaaatgttctcctacataaagttatgactgtatggtagaatgcattaatttttatgataagtacttttaagtactgaagggagaaatgtcataacatctgcaatgtactttgaaatggttcacaatgtaaaaatatgtgtatgcatgtgtgtgtgtgtgtgtgtgtgtgtgtgtgtgtgtgtgtgtgttgtaaaatttgttgctgctgttcagtcaccaagttgtgtccacctcttagtgatctcacacactgcagcacaccagacaggcttccctgtccttcatatctcctggagcttgctcagactcatgtctgttgaattggtgagctatctaaccatctcaccctctgccaccctcttctcctttcaccttcgatctttcccaacatcaggggcttctccactgagtcggctcttcatgtcaggtggccaaagtattggagcttcagcatcagtccttccaactgatttccttacatttaagaatttgatacattttatttttgtgcatggtgttaagagaacattctaatctcattattttacatgtaactgtctagttttccccccaccatttattgaagagactgtcttttctccactgtatattctcgcctcctttgtcatacactaagtgacaattaactgaatagcaaggagagataagaaagccttcttcggtgatcaatgcaaagaaagaaataaagggaaacagtagaatgggaaaaattaaagatctcttcaagaaaactggagataccaagagaacatttcatgaaaatatgggcacaataaaggacagaaatggtatggacctaacagaagctgaagatattaagaagacatggcaagtatacacagaagaactatacaaaaaagatcttcatgactcagataaccatgatggtgtgctcactcacctagagccaggcatcctggagtgtgaagtcaagtggaccttaggaagcatcactacaaacagttagtggaggtgatggaatttcagttgagctatttcaaatcctaaaagatgatgctgtgaaagtgctgcactcaataggcaagcaaattcagaaaactcagcgtggctacaggactggaaatgctcaaaattctccaatccaggcttcaacagtacatgaaccatgaacttccagatgttcaagctggatttagaaaaggcagaggaacaagagttcaaattgccaacatccgttggatcatgataaaagcaagagagttccagaaaaacatctacttctgctttattgactaggccaaagcttttgactgtgtggatcacaaactgtggaaaattcttcaagaaatgggaataccagaccacctgacctgcttcctgagaaatctgtatgcaggttaagaaccaacagttaaaaccagacatggaacaacagactggttccaaatagggaaaggagtatgtcaaggctgtatattgtcagcctgcttatttaacttatatgcagagtacatcaagtgaaatgccacgctggatgaagcacaagctggaatcaagactgccaggagaaatatcaataacctcagctacgcagatgacactacccttatagcagaaatcaaagaagaactaaagagcttcttgatgaaagtgaaagagaagagtgaaaaagttggcttaaaacccaacattcaaaaaactaagatcatggcatccagttccatcacttaatggcaaataaataggaaaacaatggaaacagttacagactttattttctgagctctaaaattactgcagatagtgactgcagccatgaaattaaaaggtacttgctccttggaagaaaagctatgaccaacctagacagcatattaaaaagtagagacattactctgccagcaaaggtccatctagtcaaagctatggtttttccagtagtcatgtatggatgtgagagttggactataagaaagctgagcaccaaagaattgatgcttttgaactgtggtgttggagaagactcttgggagtcccttggactgcaaggagatccaaccagtccatcctaaaggaaatcagtcctgaatattcattggaaggactgatgctgaagatgaaactccaaaactttggccacctgatgcaaagaactgactcatcggaaaagaccctgatgctgggaaagattgacggcaggaggagaagggaaatattgaaggcaggaggagaagaggaagacagaggatgagatggttggatggcatcaccaactcaatggacatgagcttgagcaggctccaggagttggtgatgggcagggaagcctggtgtgctgcagcccatggggttgcaaaagtcagacatgactgagcgactgaagtgaactgaccatgggtatgtgtgtgtttatttctgggcattttatcttgtttcactgctctatatttgtttttgtgccagtaccatactcttgattactgtaccattacagtatagtctgaagtcgttttgagtcacttcaatcatgtccaactctctgcgaccccatggctgtagcctgccaggctcgtctgtccatggcattctccaggcaacaactggagtgggctgccatgccctcctccaggaatcttcccgactcagggatcaaacccacatctgcattggcaggcaggttctttaccactgatgccacctgggaagtctgaagtcgggaccctgatttctccagattcatttttctttctcaggattgctttggctatttggggtcttttgtgtttccatataaattttagaatttgttgttctagttctgtgaaaagtgtcagtgataatttgatataaattgctttaaatcaaatgatcaccttaggaagtatagtcattttgacaatattgatttttccaatccccaaacacagtatatccttccatctgtttctgctatctccaactactttcatcagtgtcttatacttttcaaaatacaagtctttggactcctaaggtaggtttatttccaggtattacgttctttttgatgtgatggtaaaagattgcttccttggtttttctttctgatcttttgatgttagtatatagaaatgcaagagatttgcatattaattttgaatcctacaactttaccaaattcactgatgagccctagtgtttttctggtagcatctttaggatgttctgtgtatagtatcatgtatatcaaacagtaacaattttactacttcttttccaatttatattacttttatttctttctcttgattgccgtggctaggacttccaaaactgtgttaaataaaagtggtgacaatggacattcttgccttgctcccaatcttagaagcaatgaattcagcttttcatcactgagaatgatgtcagcaatgggtttgtcatatatggcctttattatggcctctattcccactttctagagagctcttatcataaacgggtgttgaattctatcaaaagctttttctgcacctactgaaatgatcatacgctttctttttattctcactttgttaatgtggtgtatcacactgattgatttgtggatacttaagaatccttgcatctctgggataaatcccacttgatcatggtgaatgactcttttaatgtcttgttgaattcagtttgctagtattttgctgaggatttttgcatctatattcatcactatcagttcagttcagtttctcagttgtgtccaactctttgcaacccccatggactgcagcacaccaggcttccctgtttatcaacaactcccagagcctgctcaagctcatgtccatcgagtcagtgatgccatccaaccatctcaccctctgtcatcagtataattggcctataatcttttcttttgatatctttggttttggtatcaggctgatggtggcctcacagaatcagcatggcagtattccttcctctgtaatttttttataacagtttcagaaggataggtgttaactcttctctaaatgtctgatagaattcacctgtgaagccttctggtcctggacatttgtttgctggaaattttttaaccactgtttcaatttcagtacttgtgaatcatctgttgacattttctatttcttcttggttcagtcttggaaggttatacctaagaatctgtccatttcttctaggcggtccattttattggcacatagttgtttgtagtagtgtcttatgatcctttgtatttctgtgttatcagttgtaacttctcctttttcatttctagttttattgatgtgagtcctctcctttattcttgatgagcttggctagaggtttatcaattttgcttatcttcttaaagaatcagcttttaatttcattgatctttgctactgttttcatctttatttcatttatttctgctctgatatttgtgtaatttttttccttctactaaatttgggctttctctagatgctttaggggttcctctttctctagatgctttaggggtaaggttagtctgtttatttgagatatttcttgtttcctaaggtaagatggtattgctataaatgtcccccttagaactccttttgctgtatcccaaaagtgtcggaccatcatattttcattgtcatttgtctctagctatctttttatttcctctttgatttctttagtgatccattagctgttcagtgacatatgtttagcctccatgtgtttgtgtgtttttttttagtttcttcccctgtaattgatttctaatcccacagcactgtggtcagataagatacttgatataatttcacttttcttaataaagttatcgaggcttgatttgtggcccaagatatgatctgtcctggacaatgttccgtgtgcacttgagaagaaagtgtatttagcagctttcagatggaatattctttaaatatcagtaaagtccatctgatctaatgtgtcatttaaggcctgtttcctgattttctgtgtggatgatctgtttcttgatgagagcgagttattaaaatctccccaaattattgtttttctgttgatttttccttttacgactgttagtatttgccatagatattgaggtattcctatgttggatacacacatatacatatatacaactgttatatcttcttcttgtattgatcttttgatcattatatagtatccttctttgtctcctgtaacattctttattttgaaatctattttgtctgatatgggtactgctactccagctttcttttatttccatttgcatggatacttttttctatccccctcactttcagtatgtaggcaccagaagtcttgagtgaattccgcggccttgtactgaagctaataactaaatatcactggccaaaatttcaaaaattatagaattcaaacacatatattttaaaatatcaccttttttgatagacacattacatacattattaaactgcttctatgcttatatttcttatctcaacctagaaatttaggtaatagctacattctttgtaagtgctgagcacagcaaaaaaaaaaaaaaaaaaaaacaggcatttttaaaataaccattagtcaagggaacaaaagaaaatgtatttggctacattattctaatactagttctcctgggaaccaaaagtatttaagtacatagtgtgtagttaaaggtaagctaaggaatccaagaaactcactcaccaaacacaggcacagaattggatcagtgacctgtgtcatataccacagtaatctagtaagtagtttttactcaactaattcatcctggtaccttggccattttcatagtctcttttgtgattttaaataagtaaaatgtgaatgtcactatcccagggacacataatagatactaagatacttaaattcagaaatctctgaaaggtaaatggtaaactgttagctcctcagttgtgtctgactctttgcaaccccacagactagcttgccaggctcctctgtccatggaattttccaggcaagaatactagagtggattgcaattcccttctccaggggatcttcctgacccagggatcaaacctgggtctcctgctgcaggcagattctttaccatctgagccaccaagaaatcctgaaggtaaatggtaagatctatcttaatagctaaacaataattatctctgattaccatttcaaaaggtgacatacacaccctctcatcaaagtaagcaagaagaacagactgttcatttcagaaagtgcctggaagtagggactgatgggcaaggacatatctactctgacaaggggcagtgtgaagcttatttcaatagttcagcaaaaaaaaaaaggtattttcaaaatatgaaaatacatatttttaaaatgtactggttttatgtataaattcatttgcgtatacagagatcaatgaagcactaaagtgtattttgagcattctaaaacttaggtttaaagaagttaagatgtaacagtccaaaaagctgttgacccttgctgtaactaaaccaagagagagaaatgaagtcagcatctcagttatctttggaccaaaaatctttagttccctaaagataccacaagatacaggttttaaaaaccactggatttcttggattccttagctcaccttccttggtagctccatggaaaagattctgcttgccaatgaaggagatacgggttcgatccctgatgcaggaagatcccacatgccacagaacagctaagcctgtgtgccacaactactgagcctgtgctctagagcccaggagccctactgaagtccacacgccctagagcccatgctccatgacaaaagaagccacagcaatgagaagcctgcacaccacaactagagaacagccccgctcgtccatgcagcaacaaccacccagcacagccaaacataaataaataagattaaaataaaaaaacactgaacaagtggtttgaaaacttcatgtcaaatgttcaatggaccagcaaattgctctgtcctaacagatcatctgtgcatataaataaaccaccattccactactgctccactgtagtgaaataaaacctacttttaaaattattattatttgcctcactgtgcagtatggaggctcttagtccctccctcccccacaaccaaggatcaaacccatgcccctgtagtgtaagctcagagttctaaccactggaccaccaggggattcccaaaacctacttaatagcaaattaaattccttttgataccagagtaatagaattaaaactaaagaacgatcataaatatcaattcaaataacaactttgccaaagaaacaaaataaacaacattgaagcaaatatggaatttctgtttttaagatcctaagtcctcaacaaatataagctcaagtattcaaaattactcttcactcctgttttgaactgaaaagacttcaaatattcctaagtgtttactgaagaagttaactttcactgtaaattatttcacaaacaaaaattaatttccttagcatttttgaataaaatatttttatggggacttccctggtggtccagtggctgaggctcctcactcccaatgcagggggccttggttcaatccctcgttagggagtgtgatcccacatgctgcaattacagatcctgcatgacgcaactaagaccaggcacagcctcaataaataaattttaattttaaaaaataatatattctcatgaaagaatgagaactacaacatcaatatccacgcctgccttcctgcccacaaatcttatcattcactctcatgtgcacagacttgcaaagaaaacaacctgattacaagtcttcatatgctgtgctgcacttagtggctcagtcttgtcgcactctgcgaccccatggactgcagcctgccaggctcctcggtccacggggattctctaagcaagaatactggagtagactgccacgccctcctctggggatcttcccaacccagggatcaaacccaggtctcccacattgcaggtgagttcttcaccgtctgagccaccagggaagccatgaatactggagtgggtagcctatcccttctccaggggatttcctgacccagcaatcaaactggggtctcctgcattgcaggaggattctttaccagctgagctaccagggaagcccataagtcttcatataaaacatcaattgttactgctttaagtgctgattcattggaaaaaacttaattagaaaattctcagtaatatccctcacctatgcatttaatcacttcattttagacaaaaacccacagaaaagcagtcctaaaaaaatcacataatcacatcaccttcttcccagcaaagatattctgtcttcatatatgcttctactactcaaggaggatgaagagggaacatcttcatttttatgtgcaatctccctccagtcaatcacgctaaactctcactttaaaactaaattcgctatgtataactggatcactttgctatacatctgaaattaacacagcactgcaaatcaactatacttcaataaaaaaattctaaaacgaatttcttaagttttctttaattcatttgcctatttcagggaaattttttttaattactcaaaacaaatcatgtgtattctaaaagaatcagaatttacacaaacataaaaaacactaacatattcttcctaagaataacatctctctctagttttttttttttttttttggtctgtgtcacacaacttgtgaactgtttttttaatcactgatttaacagatcaattgttcatagattcacaggtttaccttggatagagtagacaggaaatgttgagctgaaaaagtgaaatttaagctgagtcaaaagtgaggagctagtcaggatgaagctctgagggaaaagtattctaggccaagggggtgaaggcatcagacagtacttggttaaatggaaaaatatatatatatggctggggacttcgctggtggtccagtggctaaagcttcgtgctcccaatgcaggggaccagggttacatccctggtcagggaactagatcccacatgcctcaataaagtcaaagatctcgtgtgccacaactaagacctggcacacacataaataaatattttaaatatacactgttgttgttcagtcgctaagtcatactagattgttggcaaccccacggaccacagaatgccaggttctccagcccttcattatctcctggattcgctcaaattcaagttgattgagtcattgctgccatcctaccagcacatccgctgtcgcccccttctcctcaagccctcaattcttcctcagcatcagggtcttttctatcgagtccatgcctcgcatcaggtagtcgaaatgttagagccgcaccatcagtccttccaatcaagggtgatttcctttaggactgactggtttgatcttgctgcccaagggactctcaacagtcttctccagcatcacaatttaaaagcatcaattcttcagtgctcagccttccttatggttcagccctcacatccatacatcactacgggaaaaaccacagctttgactacatatatatatatggctggagcagggagcccaaaggggagagtggtaagctataaaatgagatttcttgactaggatttgaagctggttataaatctatataaaatcagcccttcttcagattatttttatagactcaaaaccagcaggttaactcgtcataacaaattcaaattaaagcaaagaaaaagacagagggtattcaaattaagtactatcattataataaagattacatttcctatttaaaggccacaaaacttagagaaaattaaacacagaatcatttctgcaaatttacctaagagacactgaatttctgagtacttgggtaaaacttgatctatgatcttacatgaaaactggtaacaagacgactttacatttgtggtcatctagccatcaaccttcttagtctcaggtcatgcttcattacatagaacttaccggtacctttgaaaaagcatcaattacaaaagaagtcattggatatccactttttacatgtcatttacttaagaaattaatatataatccagagtctagcagcttagtcagttgtattttcagattctgcaacctgtggcagatggttttcctggcatgtgtgaccctggcattttgcccatgtttacatggactgacaggagtttaaggctgatgggagtaatttcttgctttttaaaattatgtatttatttacttatggctatcctgggtctctgctgctgtgtgtgggctttctttagttgcaacgagctgggtgaggggaacaactcttccttggggtgtgcaggtttctcactgcagtggcttctcttgttgcagagcacaggctctagggtgtgtgggcttcattagttgtcaagtgcacaggcttagttgccccacgccatgtggaatgttttcagaacacagatcaaacctctgtcccctgcatttccaggcagactcttaaccactagagcaccagggaagtccaacaatttcttttatctgtgataataaagtcatgccgggcctgttcctcacctgtgtgtatattcggttaattccacagtcttcccttgtacatccataaaatagcaaaggcctctctgagcatgaagacatggcaagtcatctcaggagtggtacataagctccattccataaagagtgctagtaaactagtggaaattgtgatttcatccttagattttcttttccaacctttccttccatatatacttggaaatacttttgaaataaagtcagttttgtttggcaaattcaatagcatccctttgagacaaatggatcgcaaaatcagaactaaaaagcatcatgcagtcaaagttaaggaaaacaacaactatttgacctcatacaaaggtattaagtaaaaaaagtttacatggtggtactatttcgtgtcaggaaatgagctgcacatctttaaaacttttcaagtatttctgaaagacagtatgtcattccttcaataattagtaatttagcttccttctatcaccatatatttacccaggtttgctagacgctcaggaaacaaagatgaacaggacacttcacctacatcagataaattccacagaaataatgccaacatatcctgaaagctagaatctttgaccacctcaagaagttaaacacctatcacttgcactccagagctccaaaaggctcaatgtcaaggttggggcaccgaggtcactaaagttaaaagctgaggtattacaaagttaaatgctggccaagtgcagtctctgaaaagagttgccaactgtcacccacacctctttaacccgtcccctgccacttccccgtcctttttgtaaatagtttttaaagggaactgtccaaggttaccacctgacaaggaagagtgcattgatgtggtataccaataaaataaaattgtatactctccatatttacagagtattcccatacaacatctaagtgtcgacaaagtctcaaccaaggcaatataacacataaaataaaacttcctcagtagggttaaaatatcaagaaactgaccgaaagaggaagataccaaacttcccaaagcagcaacccccaggaaaggtactggaaccagcggaagttacatatccaggacagttgtttaaaggcgctccacccaccccaaggtaaaagtttgaaacgccgtctgactacccccacggtgggtcggaaacttccctaaactacaagaggcaagcagataccctaaaataccgctctcagccaaccccaggtgtcctcaggccaggctgtggcttcctccccaggccttcttcccccatctcactctcttctccaggacactcacccatctccctgggcgtccaatgctggccgggggtactggggcctctcggccgccaggctcattccgacgagcctcgggcttaggcctgccccaaggaggccgacgcgcctcccctccgagacggagcgcgaccccccggccctcgggcccggccctcaccctcccctctggccggcctcacctcctctgcgtgcttgcgcagcgccttctctcgctcgtactgggtgatgagctgctcgttgtcgtcccggagcagctccagctccacctggtgctcttggtcctgcgcgaacaccgagtccaggttctccagcacggctaccaccagtggcatcagctccttgaccacctcctcgtcgtagcgcccgatgagccgctcgaactcgcggtagatggagccggccaggccggacacccgctccgacatcacggccccggagccgccgggctcctcctggtacaccacaccgtcctccagctccatggtggcgggctgcccgccggccgggggcgtctccggctgagggggcgacacgggcccgcacgggacggggccgctgcggctggagctggggctgggcccggcggggtgggggcccgagccggaggaggggaggggtgaagggagcgtattcagcccaaccgccgctgcaccaactgccggggcggccgggctgcgcgcgccacacgtcactgaaggggcgggatccgcccgtgtcggcccgtagggcgggaccccgcaggaggccaggcgcggtcgggggcggggccaatgcagcaccctgcgccagcggaggcggcgttgcgtcactactgggcgccgcgcggacgtcgtgtaagccaatgggaaagactgcgataggagggtggtgagaagtacccaccccaggcgcgatttgcggggcgagccccaaaggaaaccgagggtttctggaagagtgattagcagtccagaatagctaacattttattagtttttacagc

SEQ ID NO: 97 - DNA, 30723 bp, Hippotragus equinus
  source 1..30723: mol_type = genomic DNA
agttggtgatgccatccaaccatctcatcctctgtccttcccttctcctaccaccttcgatctttcccagcatcagggttttttccaatgagtcagttcttggcatcaggtggtcaaagtattgcagtttcagcttcagcatcagtccttccaatgaaggcgggtcgagccggcccaagaatgagcattcctaacctgtgcccacgtggggcggactgagcgggctggaccacccgttaagaacgcgcttttccctgcctctaggcctttatagcccctcccaccaggaagttgagccccgcccaccagggggcgtgtggtcgggtaagtcccgcctccacgagcaagctctctatccttactggctggtgggaaggggcccccccttcatcacagtgctgtccccgcctccgcccgaaccccggggcagggcactgcgcctgcgcagtagagctcccgtttagcgcctctgcgcggtccgggtggcaggcggagaccctatggcggacacccgggaagaatcggaaccgcttctgagccgggcccgcggcggcagcggccgcgactgcccaaggggcgtacccacttgcagcagcgtccaagagagcgctggtgagccgcggcctggggaggggccgggccgcgcgggggcggcgcgtctgggtccccgcggcccgagtcgcgcccctgctgtcgctgcaggcgcgccccgcctcccccggccggggtccgatcgggccttgcggagggctgggcggctgcgccctgcggaccccgatcccggcctgggcgtggagctgggggcgcggggtcgctggggggagtggtggtctcgccctgctccaccgaccggctggacagagaggcctcgctcagccggggagtagccagccccgtccccccgcccaccccccagtcccctccgtcccgccccacccccaagtcccctccgtgggctcggggcctcgtactttccgtggatcgccttggtgactcctaggaggacgtacttccattttctccagttcttatcggggaaagtgaggcacagagaggggcgttcccctacccaaggtcacacagccaggaagtggccgaggtgaaatccagctgggagtgaattgtgagccttcccaaaccggggcggcttcctgcctttgccctctgcagctctggcctgcccttcctgtttatccgcagaaagactgctcattcctggggaggcctgggagggtggaggccttctgtccctgtcagatcccaggggcattgggtgctggatttgggagggaagggcctcagcctccttttacggagggggaagctgagaccccgagaatgtccacaactggtgcaagctcacagccctggggcctgtcgcagcttctgctgccccgcacggggtgctccttaaggggccatctgggctcctgcttgcaggggtctgtgctgtgtgcctgactgttggggtgggtgcctgaccggagataggaaacatgcccacctgcccatctcagagcctgtcccaggacagttctccatccagcctgtgccaggcctcccagggccccggaagagggacataggatatggtggtgttcagggggagcagactttgtgtctggaggtccgggtgcctttctggtgctgccactgcccggctgtgtgaccttggcaggtctaacctttctgtggttgttcagtcgttcagtcgtgtctggctctttccgaccccatggactgcagcatgccaggcttccctgtccttcaccatcttcctggagttggctcaaactcatgtccattgaatcgatgatgccaacctttctgagtctcggtaaaacagaggtggtcactaggggtgccctgaagggggccctggtgaggattcagggagcgtctgggtgcccggccaggtggcagagctggtgttcactggtgccgatagctgttctgagcagagaactgtgatcattgcaggtccagccccgggagaatgcacggccaggcagatgagaccctcactgcagagacaagaactgaggcaggcagtgtggctggtgcgggggggactctggggagggctctttgtcccgaccctgtggccttggtgagggcttctgcgaacacagacaagacaccctgtgttctggatttccctggccaggctcttcagccaggctctggggaccctcactgaggttaccgccagctcccatgcagggctgctggataggaccctgaactcagggtctgtctggcctacagccagactgtcctaggaaccacggtgggggaaggctgctgctgggtgcccctcgggccccagtgggcccctgtggtcaggtcccgaggcagcccctcctcatggaccacgacttcagggtggggatagtcgttttctcttccccttcctggtcagggaatgaccctcttactggttatggaaaagtcagaggacaagggattgctgtgctctagaaggggctgtgagaagaatactgataggaagtgttgatgaagggcttactatccgtcgcgcattagctacagtaacccattcagcctgcacatcagtcctgttgtgtagggcctgcaggaactgaggcacagcgaggtgaggggactcgcccagggtcacacaggcccagccagggggtgaggggagctggagccagcgggggaggggatttattctgggatgttggaaaggggaggcctggggcagggggaccagtgcagggctgacgggcacagtgtttgaaccctcttgtcctctgtgctctgacatcctaccctagtgtgcccaggtgattgcccaccccccgcaccccaccccgggggaatgagttcctagacctccaagctgcaggatggtgctcctggcagggctgacggggcctgggcaagggcgtggaggctttggagagcttggcctcggtggagccaagttcggggtgagtggcgaggagagcacaggctggaggaagtggcaggggaggaggcgggcagagtgtggactctctcctggggtgggggggcccaggggaagctatgaggtgcacgtggaaggctgctgcaggggggacagggcgggagggccctgggggtctggtgcttcgagggccgggtggccggagttgagcgagccccttcagcggcccccagtccgggtcctggagcgagctctggggcctctggctgcccgtcttatgcaggcagcttgtctccttgggtcccctcagatcgcagtgtgcccaggaggctttctggggaagcagtggtcgccaccctcagagcctgcccgggggaactcctgggcccctggggttgagcgtggaggttgtccgtgtggggaccccgaggtgccgacggacatggtgcttgttctcggtgacacagcaggtgatggcacagccccgtcccctgtctctgtccatggtcccccatgtcccccattggcccctggaccccgctgcacgggcccggaagacagtggcacagcctccctggggacggcagacaagagttggcagtggtctggagctctgcccaggcgtccagcgtcccctttcccgggcacctctctgcctctctgtctcctctcggtacccgtgaagggtggttttggcagctgctgacctccagggaccagacgtgagagtagagtcttcagcaggagtggtgactggtcagttcagctcatctcaaagccccgcgatccgctgggggctgcgtgccggctctgctgtcctgggtgcctgggctgcaccctgcccgctccccgcggcctctccgggcgggtcccccgtctccctggactgcagctcctcacgcctgcctcatacccctgtgtcagggagtcgtcccgtgcagagtcggagtggcgcccgtgctcaccaggcggcaggcggcacacccggccaaggggaccgaccaggtgcacagcccaaagctccctgatggggggcctggggtgccgggctgcggttggagccgcccaactcgtcctgcccgaaggcccctcgcagtcgatcttccctggcctccaagtgcccctgtctggttggcgaaggctccctcggctcctgcccttggggtgactcggctgtggccccctggccctgtgggcccatgacacgagctggggtgggggggaattagggggacacgatgaccccagaaggcccttcttaggtctccgtatctggtggaggtcacgcagcacctcggacttctagacgtgaagtgtcagtgtgagacccgtgcccttgtttggcagagggctggctcggagcaccaccccatctcacagttgaggcagctgggccgcggtgtcctgacaaaggccgcccggaggcccgcggtgggacggggtggggagggcgaccatgaacacagtccgtgcgccatgtcggccctggggctcctgcactcgccttggggggctgttaagaacccccattggacagggggcgatgggcaccgtgggggctgctcctgtcctgggcccggagcctgtcgttcagaccctgccccccaccgcagggcgcaggcatctcattccagagcctctggaaggtcgcagccgggtcctcaccttgctttccccaggagtcctgggctgggcgagcgtctcccgatcccactcctcacccgccgtgtcccctctgcccgcaggcgccgcagccaggcgggatctgtgcttggaccaggctgtggtcctcatcgaagacgccatccaggtgggtgggcctgtgcttgccctggggctcgtggggctgggggacgctgccccactggccccttcgcccctgccgtcctggggccaggctgcggttgctgggccatacggttgtcgcccccgtgctgactgggatttaaggcttggtcccctccagccctccttaggagacgtgtgccaggtgcccttctgggccactcatttctccggttcaccatctgccccagccttcgtgtgccgtactgctctgggttctttgaaaggtacccagaggtggcatgaccttccttcacctgcagacgacaccccgggttaatcagggagatagactgtggaagctggcagtaccctctgtgctggatgaggctgggggcatcctggagggtgacccagctgaggcgaggcggggtcggtcttgcacagaagtgaggagagcctcacgggcagacctagctgtgtgcacaactgtgcatccagcaggccggggtccgtccaccggctggccccggggtccggccctcgggcgttactcctctgccgggaaaccttgtcgcttgggagggtgcgaccctgctgggtggccacgagcccccagtccctgtggagcggactctgtgatcccggggccgtgtccctgctgtggacgtgtcgtggggtgaggggctgccctgcatgggctggctgtgcggtgcggccccgaggggaccctcactgccccgtgtgacctccacttccagtatcgctccatcaaccaccgcatggacgcccggtctctgtggctgtacaggcggtactactccagcagcagccaggggtgagcgggcacgcgccccatggggctcctgcagccgggcctgggggggtctcggggggcaggcaggctcccctccctggggtggacgaggagctgctgtctcccctccttaccagagcagaggcagaaagggcccctctctggtgagggctcctttccagaatcttccggccagccgtggcacctgagtttggactcgatgtgtgtggtctgaccacacacgggtggccccagagccagaagtgtgggccccagcctttggacccgtggcgtctgccctgctgctttccaggcatcctgcctgctgggctgctctttgggcccccgagcgtggctggtttgtgccttctgaccagtttcggttccttttccaggattctgagcttcaccattttcttgatcctggctttggccttcgttgagaccccttcctcgctcacgcgcacctcggacgtgcgctaccgctcggccccctgggagccgccctgcggcctgaccgagggtgttgaggcgctctgcctgctggtcttcgtggccgatgtctccgtgaaggtgaggggccacctcgcccaccttgccctcccgccctgccccggcttcccgcgttcatccttccccctcccagagccagccgtctgtccccaccatgcactttgacccgcagggcacagacctgcctcttggacggccctcccctcccagaccattgatgggggtcagctgagccatgggggctgtgcagcctcgcgggacccgggaagggcacggctgagggtccacagtgccaccctggggagagacccctgctgaacagcgggccctggaggagggcttttcacagccctcactgccccggcccagagtggaggggccggcgtggggggtggggccggcgtggggggtgggcagatgccctgccagtgtgccagtctggcttccgtgacccggatctttccagaagctggggcggggcgggagctgggctgtgtcagggcgtcagagccacagggactcggcggttagaccccgctgctggccacacttcccatcacttctgataaacagcggtgacgccaccgcgccagccctcatgggcacgtccagggctgagccagctgcaccctgcctgcggtccctttagggggcagttcagcctctgtggtctgaccccaaggggcatgggtaagcctcagtgcgtgtgttaccaagagccccgggcagtgtcttatttctcctttttcagcctataatgtggttaggaggtctgggggttttaacctggaactgaaactggtgagttttcattggccttttttgagtggccggtctgttggggaagtcttggaaggtgggagagagtgtgggttttacctgcaagtggtggcctctgggggggtcagtgatagaaagttaggcgactgccacccagatgacaaacccacgttcccaaggccggcccctgggccactgcgctggttcctggtgtttccggaactgtccccacgcacaggcctcagtgctgaccggacaggcaggacggctgtgaggacaggctggagcgggtcagtgccgcgcccgcggtcacgaggaggctgggcgaggcgcgtggcctcccgcccacccggcgcccagcttcctgctctgagtcatgcagggaccacgcggctcctcaaggctgcccagcgacccccgtgtccacacggcgcaggcctcgcaccggctgcccccgctcagccgccgtctgtcttgcagagctacctgatcgggtgggcccagttccggaggaacccctggctgctggcctaccttgtggtgctggttgtgtctcttctggactggatcgtgtcgctgagtctcgtctgccaggaggtgggtggtcaggcggccccaagggggagtggggagctctagagggggtgagggcgcaggtgaacggtgtgggttatgggggagagccctggggcccagcgtccctctggcctagctctgcgccatccagcccatgtcagtctcccacaggccggagccgtgtccccaccttcaggcccagggagggcgtgaggccctgggggcgagttccagggtccggtctgcccagaacacccagaggcaccgccctgtgattcaacagatccgagcttgcagatgtgggtttgggggcgtctgtagccttgagggccggtcggggacacagaagccccgtgaggtgcttttgaaagaatttaccgttcgggctcagacagggcttgagtaagaaagcgagaggggaaagcccctgccctggggctgtggagctcaggagagaggccctggccctcgggggggtgctggtgcttccaagaggtgcggtggtgacttagttctgggggtgctggaggccggggagcggggacaccctgggtgctgccagcaggaatggcacgtggacagaggccggggggcacccctgcccctcctggtgccctcccgcccagtggggcagctgatgcaggtgtcaggggtgttaggggtgggttcccagctcacagcagggctggggggccggggggtggtgccccctgcagccgcccccacccccgtgcctcctccatgttgctgcatgagcaccctcctccctgaggagctgccgccccctccccaccaaggagaaggctcgccccctccccagacggggcagaggccagcccagccaccaccgggtccatttctgagtgatggccatggtgtccatcaagtatccccgaacattctgggtgagggtcgtccgtgaaattagggaggagagaggcatgagggcccttactgtgcacagacactgtctgtgtaaccagcagggaggaccgcgtggcttgtgtgctgaggggctggggacccgaactcacacttgcaatctccctgccccgtccccacatccctgggtctctgtatacaaggaacttcactcctgaggggctcaagtccgtggcagtcctgcctctttattcctggaattttgtgacagttgtttgtcctggatgtccctcgggggagcccacacagacctccctgtccctctgggcggcagcttcccaagcccaccgtggtaactggagctctgcgctctgcctaccggcccccagtcctcttcacagacagctgtggttcagaaacacggtcctcgggggtggtcctgggagaggtaggggggcagggggcagagtccatgcctgcccacctgcctgtctgctgaggacagctgactgccttgcttggggtggggctggcgagtcccccttggggggccacagtggggccggtgctgggccgtgccagtggccagggtggggaggtctgtactgttggccccgggggtgacccccatccccatccccccaagctgcagggggcaggcgaccagctgagcagaggtgggggtgagggtgcccagtgcggctgccagccggaggtgaggggagggtgccctgggcttccaggcagccgtggagggcttgggcagggaggggaggccatcagccttgtgtgtgtgagacaagaagatgcccactaggacatgtctggagttgacagcttgggttgtagattgaatgtggagggacccttaacactgtaaggacagaccagttccctgggccgtgaggccagcgagaggggaggaggggcctggggtccagcacgtggccgggcacagagtgggtgacccaggtgtcaggcagggggaggtgcctgccagccaggctggaacacaggaggtgatcttgggctcagaggcttggcagtcaccgtgggccggtccagtgccctcgggcaggagggcaggttggctggaacagatgagcaaagggcagtgtggtgttttggttgtgagtggaaggtattgaagcacgtggcatgtgtgcatgtggggacagggtaagagctctggggggcctctgaggggccagggtcctgagcacagggaggagggtcctcgggtgtgacaggagggggagaggaaggggtgtgtgttgatgtgtgtttgtgtgagcgtggaggtgcgggtgtgtgtgagcatgtggaggggtgggggtggtgtgtgcgcatgtgtgagtgtggaggtgcaggtgtgtgtgtgtgtgagcatggaggtatggggtgtgtgtgtgtgtgtgtgtgtgtgtgagcgtggaggtatagggtatgtgtgcgcacgtgtgtgagcatggagctgtgcgtcagcatggaggtgcgggtgtttgtgtgtgagcgtggaggtgcaggtgtgcgtgtgtgtgagtgtggaggtgcaggtgtgtgagtgcgtgaacgtggaggtggaggtgcgggtgtgcgtgagtgtggaggtgcaggtgtgtgagtgcgtgaacgtggaggtggaggtgggggtgtgtgtgtgcgtgagcgtggaggtggaggtgcgggtgtgtgtgtgcgtgagcgtggaagtgcgggtgtgtgtgtgaatgtggaggtgcgggtgtgtgtgaacgtggaggtgagagtgtgtgtgtgagtgtggaggtgtgtgtttgtgtgtgcgtgagcgtgagtgtggaggtatagggtgtgtgtgtgtgagcatggaggtgcgggtgtgtgtgtgagcatggaggtgcgggtgtgtgtgtgcatgagtgtggaggtgggggtgtgtgtgtgtgagcatggaggtgcgggtgtgtgtgtgtgcttgtgtgagcatggaggtccagagtgtgtgtgtgagcgtggaggtgtgggggggtgtgtgagcgtggaggtgtgtgtgtgtgtgtgtgtgtgtgtgtgtgagtgtggcggtgtggggttcctgctcactttctgccggtctggtctgtgtgggaggctgtgacccagagcataggaggggctgggggctgccgattgaggagccctgggccagccccccgagggcaggacagcggcttcccagacagatccaggggcgcccgccctctgtgagaggggctagggggtgctggggagacaggctggtcaccccctggcccggtgctggctcgttgcggggcctgagggccctgggttccgacctgtgctcagagggacgtggaagtcaaggtcggccgagtgggcagcctggggacagccggggccgtgcccgtctttacagggcgccgggtctctgggcccatcgtgggggccgcgctcagggtcccgggtgcgggtctcttgcagcccctgcgagtgcgccggctgctgcgccccttcttcctgatgcagaattcctccatgatgaagaagacactcaagtgcatcaggcgctcgctgccggagatggccaggtgggcgctgggccaggtgggcgctgggccaggtgggccgtggcgtcaggtgggcgtggggtcaggtgggcgctggggacagatgggagctcagtcaggtgggcatgggggccaagtgggccctgggacaggtgggcacggggtcaggtgggcatggggccatgtgggtgccgggaccaggtgggcactggggtcagatgggagctgggtcaggtgggcgctggggtcaggtgggcgctgggtcaggtgggcatggggccaggtgggcactggtatcagatgggagctgggtctggtgggcaccggggtcaggtgggcgctggggtcaggtgggcgctgagtcaagtgggctggcagggtggggtggggatttctgctccctgctgggggcctggggctcccttcctctggccaggggggcttgtgggcaggaggcatttgggggtctctgtttcgcacctgaggcagccctcttaatagccttgcttgacccctgccccctgctccatcctgcatatgcttcctgccttggctgtgactgctcacttccctccgtccctggcccccaccctccccctgcacccccacccccgtgactcacgtggctgacccctcactgctggcccaagttgatggtgctggcctttctccttggcgagtcccggggtccttggagctgtctgtcctggcacaggtttgctaaggttgcacttgtgccagagtgcgctgagcagctgagcaggtggctgggtcggggcagggagctccccgctgggcccggtcagcggagccgggaccgcgtccacccggcgctgagtgccgctccccccgcccccagcgtcgggctgctgctggccgtgcacctgtgtctcttcaccgtgtttgggatgctgctcttcaccggcgagaaggtactgcgctctctgctctgctccgccaggcagcaccctgccaggtgacccacagtgccaccccgtcagtccactggctgttcactgaccctccttctctgcacccctcttagatggaggcctctcagaccagccatcagggagcccctctcagcccctgcctgtttctccagaggggacccttcctgcctggacccctcccctctcagcctctcactgcttctcagcccccggcagcttcttgctgcgtggaggtgtcgtctgtgtagttcttgtgtgcatgctgtgtgtgtgtacatgcatgggggtgtctgtgtgtgtgtctttgtaactgtgtgccctgtgtgtgtgtgttttatctctgtgtgtgcatgcacgggggtgtttgtgtgtctacgtaactgtgtgtgtgtgtatgtttctatctctgtgtgtacatgcatgggggtgtctgtgtgtatgtctgtttgactctgtgtgtgtgctgtgtgtgtttctgtgtgtgtacacacaagggggtgtctgtgtgtgtgtctgtgtaactgtgtgtatgctgtgtgtgtgtttttttatctgtgtgtgtgcattcatgggggtgtcttgtgtgtatgtgtatgtgtaactctgtatgtctgtgtgtgtgtttctctctctgcgtgtgcatgcatgggggtgtctgtgtgcatgtgagactgtgtgtgcgcgctgtgtgtttctgtctctgtgtgcatgcatggggttgtctgtgtgtgtgtgtgttactgtgtgtgtgctgtgtgtgtttttttatctctgtgcatgcatgggggtgtctgtgtctgtgtctgtgtgtctgtgtaactgtgtgtgtgtttctgtctctctgcatagatgcatgggggtgtctgtgtgtgtgtaactgtgtgctgtgtgtttctgtctctgtgtgtgcatgcatgggggtgtctgtgtgtatgtaactgtgtgtgtctctgtgtgtacacgcatgggagtgtctgtgtgttctgtgtgtgtgtgtgtaactgtgctgtatgtgtttctctgcatgtacacgcatgggggtgtctgtgtgggtgtctctgtgtatgtaactatgtatttctgtctctgtgtgtacacgcatgggggtgtctgtgtgttctctgtgtgtgtgtgtgtgtaactgtgtgtgctgtgtgtttctctgtgtgtgcatgcgtgggggtgtctgtgtgggtgtctgtgtgtgtgtaactgtgtgctgtgtgtttctgactctgtgcatgcatggaggtgtctgtgtgtatgtaactgtgtgtttctctgtgtgtacacgcatgggagtgtctgtgtgttctgtgtgtgtgtgtgtaactgtgctgtatgtgtttctctgcgtgtacacgcatgggggtgtctgtgtgggtgtctctgtgtatgtaactatgtatttctgtctctgtgtgtacacgcatgggggtgtctgtgtgttctctgtgtgtgtgtgtgtaactgtgtgctgtgtgtttctctgcgtgtgcatgcgtgggggtgtctatgtgggtgtctgtgtgtaactgcgtgctgtgtgtttctgtctctgtgtgtgcatgcatgggggtgtctgtgtgtatgtaactgtgtgtgtctctgtgtgtacacgcatgggggtgtctgtgtgttctctgtgtgtgtgtgtaactgtgtgctgtgtgtttctctgcgtgtgcatgcaactgtgtgctgtgtgtttctctgcgtgtgcatgcgtgggggtgtctgtgtgggtgtctgtgtgtaactgcgtgctgtgtgtttctgtctctgtgtgtgcatgcatgggggtgtctgtgtgtatgtaactgtgtgtgtctctgtgtgtacacgcatgggagtgtctgtgtgttctgtgtgtgtgtgtgtaactgtgtgctgtgtgtttctctgcgtgtgcatgcgtgggggtgtctgtgtgggtgtctgtgtgtaactgtgtgctgtgtgtttctgtctctgtgtgtgcatgcatgggggtgtctgtgtgtgtgtcactgtgtgtatacgcatggggttgtctgtttgtgtgtgtgtgtgagtctgggtggcaggggcagctctgctgggaggtgggaccagtaagtctcaggacccacgtgtctgtccagtgtcactgctgtttatggagcgcaggacgggtggggtgggcgagggtgcctcccctggagtgggtgaggggtgggcctctgacctggggacacggagggtcccgaggtgtccgtggagggctggcccttgggtggcagctaggagagtggccttgcgaggctccctgagtgatgaggtggttttctgtgcctgggcaagcgcctcccgcccacattgtccagggcacacgcatggcccgtggactccggctgggagcgggcgggctggcccccgctgggccctcttggcccaggctgtgatgctgcccgccaggctggtgagagctgctcactgtggctccaagcaggcctgcccagtggccggtgtcagtgtggggcatccctggacactgcctctcaggcccagaggtcctgagtgtggtctgcccggcctggagctcggagcccactgggaggcgatggagagatgggctctgaggctgcgcagccatagtgggaggtccacacttgttgggtctggggcctgggctttgtggcccgaggcccggtgactcctcagtgctgctgtgtctgcttctgcaggacgctgggcaggaccgggagcggctgacctacttcttcaacctgcctgaggcgctgactaccctcctggtgctgctgaccaccgccaacaatcccgacggtgcgggggcccgaggcagggcggcactggggggtgggcgggggcacagggctagagctgagcctggcactgggcgtgggggcccccgaagcctctttgtcaagagctggggattaaaggtggagcccctgcctcctctttgctggttttctctttcccctttttcgagtatccttctcagtcctactctccaccctcttcttcccttttctttctggtcttctttttctgttctttttcctcttctgctcattttctgagtcctgagaagctagaggtggacacacttctttgtgttgatggaccgacctgggctcagcaggcccctgggctcagcgggcccctggtggcctcctcctctttgaggctcagccccaccatgtgtgaggccccggggtctctggtggctgtgacattgactgtgtcagggttgttgatggggccttggtctacttaggccgggtgtgtggccaggaggtgagggtgttgtggtccttgggctcagctgtggcctggccagcctggctggggtctttcgtcttgggctggggtggtcacccaccatagagaccctcccaagaggtcagccactggcttccataccgggtgagagctgtgcccgggaccctgagcactgcccctacatgtcctgtgagtcttccagtcactgagggagggctgggctttgtctgccgggagcactcacaggaatgtgtacaggatgagcgttccccgaaggtagtgagctccccgcccccacaggtgtgcgggcagaggtgtgaggggcagaatttgggcaagaaggccttccaggtccaccaacacagggccctcctttctgttgaaaagacagtggtttaagatgacgaaagggatcagctggacgctgggattatgagtgttttattttctctgatttctttcagtgatgactcctgtgtattccaggaaccgagcctatgccatcttcttcatagccttcaccctgatcggtgagtcggggcgggtctgcaggggtcacttggggcaaggttctgggtgtgttccccagccctgtgacctccctccacgtgacctctgtagttttcactctgtgtgaccaccagtgcctcagtgcctgctgggcaggccaggtggcgcccccatctgtacacgagggcctcgcgtccctgccctgctccctcagccagcttgctgctggcgggctggctgccgctcctgtccgcacggtcctcgctgaccgtgtggtcctgctgaccatggcctttcctctcccaagggagcttgtttctgatgaacctgatgacggccatcatctacaaccagttccggggctacctgatggtgagcggagctgccccccgcccggctgtgcctggagctgcccctggaggcctggcggggagctggccggcagggtggcccgggggctgtgtgggtgtggacgtgggtgggagggcggggcctgtggtggtctcggcccggcccccgcctccctgccgtgggtgacctccctctctgctccccgggggtgctggccccacagccacccctggccccttccctgccccacctcctctagggggaaaagcaagaagactaaagctcccggggcagtgaccacaccccccaccccccttgtaggtgggccaggggccccaagtccactgagaaggaatgtgtaccttagtgaatttcatagcggtggctgccggcagggcctggcccctgttgtctctgactgccccccaatgcccacagggtgaggggctgctccctgggctgtgagtgagccggggctgtctggggcgaggggcagggtggcctgggacagggctgggccaagcccctcagccccattccccttttcagatgtctctccagacctcactgttgcggagacggctggggacccgggctgcctacaaggtcctctcgtccgtgacagcagagggagaagcccaccccgagcggtgagaatgggggctcccacccctcccccgaggctgctctgggaggggtattcatgggggagcatttcccgagatccctgctggcagtgggtcacaaggctcctttggagtcaagcatccctgggcgggttccatggtcctggtgtccgagttaactcgtgtcctcatgacctgctcgagattccggtctggtgggggccacgcattctggcctgtccccctggtgccttcccacacccgagctgtgacttggggtccaggacgagaaaggcttgggacgcacgtccactctgccccccactccgtgacagcttggaggcagtgtcacagagcagctccggtccccaccgctcactggtcccggggcctgtgggtcgcacgctctagcatcctcagccgctcctctctaaggcaggaccacggggtctcgggattttggagacaggaagaccatcaagcgctccttcctggagaacttgtcactgcccgggttgcttggggcagcggtcagggcgcctgagggtgctgagttggctgggctcactgagggcatcttccccacagacttggggtgaagcctgaggatttcttgcaagtgctccggaaagtccagctggacagtgaccacaaacaggccatcacagaggtactggccccccttcccgccgccccacctgtgcctctgggctccctaggccatgtgggtgttatttcagactggcccggctggcccggtcctggtgggcctggggcggctcccttcctgcccgtggcctggctgcccagcacacccgtgcgttcctgctttgcagaagctgcattcccgtggcggcggcctgctgtcaactgacgagtttcagaaactctttgacgagtttgataagagggtgattaaagaggtaactgtggctgggccaggggcacctggggtcagcggggaattcctcgatgtctcttggcattgatcccggcgccggtactcaccttcccagggattctggcccctaggatgtttgtgggagcagagctggtgtggctcttggaaactggggagattttgtgacctcatggaattcccaggccacagggactgtcgtcctgacccagaggaacttcccagttttctccattcttcatggtagacttctcttctcacatgtcctaacccgagaggtgcctgagtttgtccggaaccttagtctgttgtccttgacactgatttttaaagttagcaggcgggcttcagcatccagcttaacactgtgtccacaagaccccggcctgcctgcattttatgtggcaggtgtgtgggaggcggcaggggaggaggtgcggtgacacagccgagctgttcccaggcagactgtggggccgcggagggggctgccgctccagccgctccagccgctccagccacctggccttgacagggctgagctgggcttgaatgcggattgaagaggtggagtcagtcgtctcctgttgatcggatccctcgcagctcagtgtcaccattgagccagtcagctcggctgctgtagcgagtattgcagcctggaggtacttaaataccagggcttactgtctctaggtctggaggctggagtcggaggtccaggcgtgggcgaggccggcatgtggacagaggcccaggtgtgggcggggcctgtgtgtggaccgaggctggaattggaggcccaggcgtgggcagggctggtgtgtggaccgaggctggaatcagaggcccaggcgtgggtgaggccggcatgtggacagaggcctaggtgtgggcggggcctgtgtgtggaccgaggctggaattggaggcccaggtgtgggcggggccggcatgtggacagaggcccaggtgtgggcggggcctgtgtgtggaccgaggctggaattggaggcccaggtgtgggcggggcctgtgtgtggaccgaggctggaatcagaggcccaggcgtgggcgaggccggcatgtggacagaggcccaggtgtgggcggggcctgtgtgtggaccgaggctggaattggaggcccaggtgtgggcggggccggcgtgtagacgccgtctgctccctgtgtcttcatgtgtgtttccctctgttgtgtgtctgtgtcatctccccttcttataaggtcagcagtcctacgggattaggaccaccctagtgacctcattttaacttagttggctcttgaaagacccagtttccaaatgcagtcacatttgaggtcctggggttaggctctcaaaatataaactttgggggatgcaccttagcccataagtgtcttctctaggtctgtggtcaacctccgtggcctcaggccccagtcagaggtggttttccctgagaacatgaggcctttctaggtcccccagaggcaagtcctgtttggcctggagctatgggtgctgtacccggggggccagcagcatcctcactgcaggacccatggggtacaggagatggttatagggacagacaggcgggcacttggtatgttaacatacacgatactgtctgtgtccaggtgacttgaaggagatagtaagtacgtgcaggttttataaaaaccatgatgatggttttcaaaggataataaatccggaaacacctttctagatgatggtcctggggcaggaggtttgctgggcccaggaggcagctcttggcagctgttgttttgatttgctgtgatccagcccttttctgggtgcagcctgacctgggtgagaaaatgttgggaaggtgggctcctttctcaaggttcgctgggccagccagaccctccctgggcacttgccagctggcctgtaggatgctgctgggtccaggtcgtccaagaccaactctccccttgtcttcagtcaggatctgatatcaaaaggaggtgggtggttgtggtggtggctgatgactggtcgcacgtgcaggccacgcccctcatctgaccacaccctcatctggccacgcccctcctctcaccacaccctccgccggcctcgcccctccacggaccacaccccctctctggccacacccctctctgaccacaccctccgctggccacgcctttcctactgtggttcacgagatgctcgctcttcccatatgccctagatctaaagtgcagaactatgatttgaggcgggagtttgggtcctagaagtctggggagctgcgatgtccttgtcgtggttttatgacgtcctccttccctcctagcgggcaggcaggtgcttcaaggattgttagcacgtgagggcttatcccaggtgccctgacaggctgtgagtttggaattgcttctgaagagaggcgctctaggtggctgacagcaggacatcatgggtcttcatgagagtcctccatgtgcggtcgccttctgccatcacccaggccttggtccattgctcgtcagtccgtgccaattggctgcagagaaggtaccatgccagcttctgaaagcctgtttctcttttacttttgttggctgcatcatgcggcatgtgggatcttagttccctgaccagggattgaacccctgacccctgcagtagaagcccggagtcctaacaactggaccaccagggacgtccctgtttttgttgcttttgaggttaaaaacatagtaggcattcattatagacagtagaaagaaatagaaaaacccacctaactgtccaccttctaagaagtcatttcacagaaatcatttcaaggtctgttgttttcttaataatggtgtgatgaatgaattcattcttcttgtaatagtttaacataacggataatgctggagtctcttttggccaatgtatcagtctgggttcaggcaggagacagaaatcacgtagaaatttaacattgagaagtattagctgtgataagagagtccctgtaacatatggggaagctctgtggtccccgagggtggaggaagatgcctggggaagaacagacctgggcagggaccccttccccaaggccagggtctggacgcctttggagaagttgtggtccagagcccagggggacagatgtttgctggtttacctgggctggagctggtctgtggtcactggtcaagcaggatgccaccgtctagggtgcagcaggcacttgccatgagcagagcgtgtggagtgcagagggaactgggcactggggccggctggcggcctctgggcaccagtacccatgtggaggacattcttacggggtcaggctgtgctgcaggtcaccaaggagccgtgcgtctgggtgtggggctggatcagagccccacaggtgtccttccccgacttgaggtgtggttattgtgaccgaggagccaagtgttcagtttgatcaagtttaaatttgaatccagtggtcacggccagtgagtagccgccccgtgcaatggtccatctcgtgctgcagtgactgctctgcgcctctgtcctggtgcacaggcaggggcctctctgtggggggagcaggttggcgtgggtctccgggggggggcaggttggcgtgggtctctggtgggggcagcagggtggcatgggagtgcagagtctcacagacatcttcatggtatatttgttgcccacctgccctcctctgatcaggctctactccagcctggtgacggtgtgtgagttgcctccgttctgtgctaagttttcatagttattagcaagtaatttatacgtacattttcacgtgacacttggcatacgtttaagacaacttcatgcttgtccatctcgggccgcttgcagcatcagtgcccttctgggttatttccctgcctcttggtgttagacgactgtggcgatcatctctgtgcataaaaatgacgccgtttgagaggctttcctgaggctggagagtctgggtggcaggcaaggcgggaagactgagtcccaggagaagggggttgggcgtctcggtcccccgtggccgaggccggctccatcgtgtttctgtttctgagtgtgcgtgtccccccagcacccgccgcggcccgagtaccggtctccgtttctgcggaccacccagttcctcttcggccaccactactttgactacctgggcaacctcatggccctcggcaacctcgtgaccatctgcgtgagtgtgggtttgccctggcgtcgctgcccgccggctctctcactggcccccgggctgagccgccgaccgctttggcttcgcaggtgttcctggtgttggacgcgcacgtgctgcccaaggaccgtgacgactttgtgctaggggtgagctctgcagccacggggctgtcatccagggtgatagggcgtgagggggcagagcacacagcctccccacctcgggccccggtccctgggaggcagggccatcctggtgcttcacagcggagtctgtggagtagggagacgtagggcgtggggttggaggccctgtctgatggccgggggagcctggattgggggtacaggtgtgccagttgtggttgaagccgtgcctggggtacaggtcccccgaggagaggatgtggagcaagaagggggtgctgagatgcccatgtctgggggtagggggctcgggaagagcctcccagaagggtgtgagcagcgccaaagaagtgggaggggagggtcacgcggctccagcgtgggagggcgtgtctgtgcgccacgggttgcaccatgtgcagcaggccgggacccacggggccctgtggacaggcacatggatctcatcggccccactgtgggtggggacgtgggggaggtcggggagccgggcgggacccacggggccctgtggacagaggcgcatggatctcatcggccccactgtgggtgggggaagttggggaggttggggagccgggcaggacccacggggccctgtggatagagacacacccggggccctgtggatagagacacatggatctcatcggccccactgtgggtggggacgtgggggaggtcggggacggggccctgtggacaggtgcatggatctcattggccccactgtgggtggggatgtgggggaggtcggggagccgggcgggacccacgggtggtgccggcactgaacgctgggcgcgcttctccctttcagattctcaactgcatcttcatcctgtactacctgctggaggtgctgctcaaggcgttctctctgggcctgcagggctacctgtcctactccagcaacgtgttcgacgggctcctcaccatcgtcctgctggtaaagtctgagacagctgaggcgcggcctctcgggtgggcggtgtgcactcagcctgtgcacagggtctctcagctgcccctggacctcagggggccgtagggcctgggcctcccgcctccggtgacaaaggggctggctctcccgggtttggctgcctggcggggggctacaggaggctcatttccgctgcctctgtgggtcgttggggctggggcagggtgagggcaggctgcctctcctgacaccccagggacacctgcaaggaacctgcagaccccgccagccggcccagccccgccaaggacagtggagcctcggcgtgctgagggacgggcaaggtctcaagcactgggggtcttgggaagtgtttccccggatcctgggggagtgaggggttctcctggtgtgcacatcacagcagcaatattagtgcaatatgtattcgagtttgatggatcagagccgtgggccctcggcagcagcagggaggcagctgagaggagggccttccggtccatccttgactgcagtttctcccgagcccggaactccgaggccctgtcccagccctgccctccgcacgtgcagccccactcctgaggccagggcatcctcagcagcaggaccagcggagggggcaggaccggctgtggtttctccccagatccccttggggcccgcgtgttagagccaccggtaggcctgccgtagcgagccttcttctcttttgtgattaaaggttttggagatctccactctggctgtgtacggcttcccacaccggggctggtatgtgtcacggagaacccggggaggcctggctagcgccccagggaagggtgtgcgtcctgcctccagccactggtgcaggtggctctagggccgaaggcctgactcgcaggcgagtggccacagctcctgccccgccatggcctgtggggtcagacgccttctccgctcttggggactttgcgttaaaggccttgtggccgcctgcaggatgatcgtgttcccagagctggggtgggaggctctggaggtgcccctgcgatggggcctggggcccaggtgtgccgggggccggaagcagggaggcccccgccatcacttcccactctgggtgtcagttcacctccctgtagacgtcagggtggctcagggcttgctgaactcacgctgcccccagttctggccacacgtttggccaggggtcccagggtgccttgcggcgtggcgtgtggcagccttgggggtcttgctgcccaaagcacagctgccctggtgaacttgcgtgctgacctcgcgccctcagggggcctcttggtccgtcggctgggctgccttcgtcatagtggcgtgcttctgagtcatctgacgaggatgggctggatgagtcctgccccttggggtctcggcaggggtctgtgtcgagggggacggaggcgggagcagtgaagcctcgaggccgcctggcggctgtggggccagctctccgtgtttcttacgcgcactgaaaacccacagggtgcttctggtgggaggcggtgaggggtgtgtcctgggtgagaatgggtaaaatttaaatagaaatgagagcacagtaaggcccatgagggacacccaggggacggggtcagaggataggagacggatctggagccgtgtctctgccagctctgctggggccggagctgggcgtctggagccccagggctctcccgtcacattgccctgcaccacgtggggggctgagccccaggaggtgttgccacgagcgccctgggccgcgggctcaggctctgccctctcgtctcggcggagcttttccggtcgatggcgcctgtggggcgacttgctggcacccctggtggctctctctgcgtctctgtctctggaccgcgcatctcctcgccagctaagccgtctccgcgtgtctctgcaggaagccggcgatgctgggcctgctgtcgctgtgggacatgacgcggctggtgaatgtgctcatcgtcttccgcttcctacgcatcatccccagcatgaaggtccgccggcgcctgccgggccacgctctgggggtgggcgtgcctgccgggcaggggctggggctgcgcaccgtccccccaagtacctggggtccctctgcctgcgccccagccttgcgtccaggctgggccatgctggaggcggttgggagcataagggcgtctggcccagacagcaggggggtgtcggtgggacccttgggaggtcacatgctcctcggggtccctggcctttggggggggccggtgtgcccccaggcatcctgagcttctgaatggccttggcacgggctgccggtggctagtggtgccccctccaaggacccccagtgcaggagtggagtggcttgagacagtctctgagccccggtttctcataatgttcccgccaggagtagccccaactttgcggtggggggacagtccgggcgggggtgtctctcccatctgctttcccgagcacttctcaggagaaaagaacccgaggacacctgccccctttctgagtgtccaggtccttcccctgtgtgcgtcctgccaagctgtgcacctggcctggccaggggtgacccgttgtcacccagtggtatttcccatctgaaggggttcctgggtgcagaggactgtggccctgagccctccatccatacacacacctgtgtgaccctacacgggcactgcacacaggcacgtgatcacacacacccagagcacacacaaaatcatacacatgtacatgtaatcacaccctcatataatcacacacgtcatctcacacacacgcatgcacacaccaacagatgcatttgcatgtaactgcacaattacacatgcgtgtaaccacacacatacacataatcgtgcagtcgggcacaaaataagcacaagtgtgtgtatacacacgtgtgtgtgctcacacatatacacggtcatctacacacatgtacacacgtgcatgtacacatgtgcgtataatcacgtgtgtccacacgtacagcagagttccctgcctgctagcgtccggtgctgtttctcctgacttatcaagtggggaaactggctgcttggaaagctggtctctggagcttagattcacgtgaattggggtccctggctgggtctctgaggccccacacctcaaaacccgtcacccagggctgactggccatctccaggtcagcctttctcgagcctccagatcagctttcgtgggccggtgggcagtgtgggccaaggccctgcacatcgtggcttcaccagcagtcttgggaggtgtctgcacgtataggggtttgtgtgtgggggtgggcaggtgtgtatagttgtgagagtgtgagggttggtgtgggtgtatgtacaggtgaggcaggtgtgtgtgtgtgtacaagtgaggtgtgtgtgtgcaggtgaggtgggtgtgcatgtgtgtacaggtggtgtgggtgcatgtacaggtgatgtgtggatgtgtgcaggtgtttgtgggtgtgcaagtgtgtgtacagatggtgtgtgtgcaggtgtttgtgtgtctacaggtgtttgtgtgcaggtgtgtgtagaggtgaagcgtgtaggtgcatgtacaggtggtgtgtgggtgtgcatgtgtgcaggtgtgtgtacaagtgaggcaggtcacccgttctcttgccgtctcagctgatgtccctggtggccagcaccatcctggacctgatcaagaacatgcgggccttcggcgggatcctggtggtgagtctggctgcccgtgttggcctctcgggggaacaaggccaggccactgggtgggcagctggagctccgtggaaagtggcggccttcagaaggaaggtccctgcattcgggtggcagcgggtgactgaggcctggggaacccagggcagggcaggacactggagagaggagctggggtggtctggtggaaggcacggcccaaccataccgccttcccaggccagagagcctcttggtcacttccgaatccctcgtgtgtcctaggccctgggccacactgagaagatgaaaaacagaggtaccagggacccccccgggacccacagaggccccagagtggtcagccatccttgcttgaggatcagccgcttttgctgagagagtctcgatgtaccctaccctgggccaggcaccccctggagccaggtcttgagcagggggcccggctaacgctctagtcacgaggcctggcagtaaggagagagggtgaagaaaccctgctgttgtggacaccagggggctccgtggtgcctggggctgtcatgcgatgctcaggggacctgcttcaggcactgcccacaggccccagtctgcctcgtggaggaaacaggtccagagaggggctgggttagcctgggggtgcgccttgtcctccgccccccagacacattagcgacgggtcaggggcggctggcagccccttctctgactgtggcacacagctgcccaggggtgtgtctcagacgcctgctgttgagcgtggggagggcagtaggcttctcccagagggacgtggccgctcctggccctcttcccgggatgccttctgcagcccccgctgcccagttctccatggggcccgcctcctgctgcacctgccctggaggagggctcagttctcccccagttgtccccccaggctcccgtgtatccccagggcttccctctgggacaggttggtggccaggaggggtgcctgggagcagagtccccatgtccccggggagaaacccctgctggcacgcggaccccagcaggccccgcctggctgtgtggggccccgcctggctgtgtggggccccgcctggctgtgtgggcccccgcaggcgtgcgacgccgacggcccgcttgcctccccaggtgatctactacgtcttcgccatcattggcatcagcctgttccggggcgtcgtcgtggctcctagaaacagcaggtgagctgggtcctgggggtgtagggggagcgtctccggggacgctggagccagggtgaggcctcggaggtggtgtggggttggttccccaggagggacctcctgggtcccctttcttccttggcctccctgctcttctcccccacccccactctagcagccctctctagaatctgcactgagggtgacccctgaccccggagcccaggctgcttgctgcaaaagggatgtccccccacccacatctgcccatgtgtccacagcactggcctcactgccctcggcacctcctcggttggggggcacgtcctttttgtccccctttctcaagggcccgctaggtctatgcagagcaggggctgagccggggctgggcacgcaggcgtgtgtcccaccgtggcccccacgccgaccgggttgtgccctgccacccctccctgcagccgagcctctgttaacggttccgcgccctgcgggagctttgagcagctggagtactggcccaacaacttcgatgactttgcggtgagtcctgcgcccccgcccctcggtaccccacccgccgcccctgctccccacggcctcctggaaaccccgtccgctccctgcaggccgccttggtcactctgtgggacgtgatgattgtgaacaactggcaggtgttcctggacgccttccggcgctacgcgggcccgtgagtgacctggcctggccgccccgaccgcggctctgcgcggggtgtgcgtctgggtctaacctggggtcgcagggcatgtggggcagcaggtggcttctgggggggcctgtgacctggggtgaaggggctcagcccagagcctggagagctcagacggcccccgcgctgggccaggtctgagctccagccccgctcttcctggccggctgcccctaaaggccaggctgggccagcctgggggttcgggcagaaacagtgacatggagcagggagcggcgggtccagaagagggctgcgctggactcacgggcgcccccggcctccccctcattctccacaggtggtcagaggtgtatttcgtgctgtggtggctggtgtcgtcggtcatctgggtcaacctgtttctggctctgattttggaggtagtggacacccctggcccagactcttctcagttggagtttctaacttgatgagctggggttcacctggaacttggtcgaagagcttgtgctgggttcccatggctctggggtgccgctctgccctcccttggggcagctcatcctgaaggctcctgacctttgacctgtggggtggggctggaggagggccctcagggaaccgctcctgtagctgccgggggtcttgtcgggcctcgggtccctgtatccagggggagcttctcagccaggccggcacaggaggggttcatgcagggcccgggcctacccgccacccatccctccgtcccttctgccagaacttccttcacaagtgggaccgccgcagccacctgcagtccctcacggaggagctggaggacacctctgagatgaccgaggagctcccgttcaggtgcgtgagggcgggcatggggcgggaggcggggtgagagggagggtggggcctggggcaggaggcggggcgagagggtgggtggggcaaggagggcggggcgagagggagggcggggcgtggggggccagagtctgggctgagagggggtggggcaggaccaggaggtggggcgaaaggacggggtggacggggtgtaggacgagaagcggggttgacaaggagggcggggcgggaggcggggctgagagggcaggggcggggcctgggccggaaggcggggccaagagggagggtggggcgggaggcggggtgtggggctagaggcggggccgagagcgagggaggcggtgggcaggtgctccccttgggacctcctcctgccgtggagctgagttcctctcaccatgagcgtatgtagggaagcctcctcaggtgccgttagcctccaggtgaccctgttggtgggtgagatgaaacctcggctcgtctttcccctggtaacctggagcgtgttcctttggtggctcagcgaggcgacggccgcaccaccctctgtgaacgtctgtgtgtgtcgcaaccgcacagagtgggcttctcccggcctttgagggacaccccgtaaacatcccagaggtggacccgagccccctgccggtggttccgcgcagctcctggtcccgagaagccctgacgaggcctctccgtcgcccctgcacacctgctcccctgcaggcgcccggggcgtcccgtccatcgtttcccctgttccgcagggacgtcctggaggagcccacggaggaggagctggtggacaagctgagccgccacccgcacctgcagctgtgcaggtgacgtccggacgccttcccggctgcggcggccggcggccaggcagcctcgggaggctctcaggcccgggaggaggcggccgcggcccagaggaggggccttccccttgggcagacccgctgcgcggactgaggctggacaggtgcaggccctgattcgcagccgagcaggaccgctccacagcccctcgggcgctgttcgagccactctcctttataagctgcttccgagggattttcttttctaaatacagcgggtgactctacagggaccactgacgtgtgaaaggagacgcagcggcctttgcctcacgccctgccgtttccgtggtgcctttgctgctggtggccttcagggaccaggggcccgtgcaaggcccacattggccgactggcagctttccagggcatgaagcttgagatcctggttttacacaggaagctggactgttgttttactgttttacggcctgtgtgagtgtgatcgagtgtgtttctgggtga

SEQ ID NO: 98 - DNA, 113434 bp, Hippotragus equinus
  source 1..113434: mol_type = genomic DNA
tccataacatattttggagcaagaatgtaaaatataaggggaatgttatgttttcttaagataattggaatgtatttatcaagctcaaaggagttaattagtgtaaatttgttgctattttattaaaatcaaaggtgataataaaagaaacaagtcattccacaatcaagaggaaaagaatcacaatagttcccatattttacaagagcactttcattcagatacaactagcagttacttagtatgaaatggcatcctttccatggaaatatgagcttgagaagaactcttcagggaatgatcaaaatccagcaaagcaaacacaggtggcttctacctgagtaggaggaggggtacattttatattgataacagttctgataagggtctccagagacacatgccaagcatttccactgggacatcccctggggactttaacatcatttaagttatagtgaggtcaggtttttttgccccaactctattgcctaaacctttcataaatggctctgatacaacacgttgtggtaatcctctttttccatgagcaggggctgcttttcttctggaagctggtttctctttcgacgacataataggctagtaagccctcccagcacagcagtaaggacagacccaatcacagctgccccagtgagccacggccagattcgacgtgcttgttctaagtagggcttaatgtaatcttgaaaaatgtccggttctgaaatagaaagacatcccaatgtttttactatcatcatcatcaccatcatacttgctccatactttggagtcagaggcttaagtctgaatgccagctttgctacttactagctataagagcttgggaaagttacacctaataccccaaggcttgagtgtcttcaacaggaaaataggaaaacaataccaccttgtttggatgtttcaaacttcatagatagtatctgacctgtaaattgtatagtgactgctccctgccagctactctaactcctctagctatttattgttatttgactccatatttctaaataataagcaaatactactatctcttaatttctcaagtttatctctggagtttgtcatgcataagcaataattttagctctctcacaacttcctttttctccatcttttcaatataataacatcatgatttggggccaaatccacatctaggactttcattatttatactatttcaatttgattcacaattgaacctaatagtattctatgattacattatgattacattttctttctcacatcattttcctcttggagttaatgatttattttatatatatatatatatatatatatatatatatatatatatatagctaagttgcttcagtcatgtctgactctgtgcaaccccatagacggcagcccaccaggcttcgctgtccctgggattctcaaggcaagaacactggagtgggttgccatttcctcctccaatgcatgaaagtgaaaagtgagagggaaatcactcagtcgtatccaactcttagcgaccccatggactgtaacccaccaggctcctccatcgatgggattttccaggcaagagtatatatatatatatatttgcttgattttaaaggaaccatcactatttataagacactctaaaatgtctgtttcgtgatacaaaggaaagaagagagtgtatcttgggctgactttgtaaaaaaatatgactttatgtgactcaagtcttaagcaaaagtaattcatgtaactttggggtggttcccttaaaaagaaaaagaatgccttctctttttccctcttctccttccaactaatgcaaatagcatgttggtgagccagtgcaggccatgcgatcaagggtacaccctaggtcttatagaactacaggaaagcagcagctctggtccctgaaattatggagcatgtatttgactatataccaagactgctatttgagcaataaataaactaacttatctaggccatggatatttgagcctactatatctgctccccaaccttaccttcccactgatgtgggaactgtaacagcttttttttttataacctattttgttggctacaattgattagttctgagtgaacctctgactcaagatgggccaatcagaattggccattactcagaattcattgtgcagaattgagtccagtgactcaggagccagtaacagtcttagcgctagagaaggggtggggaggggaaaatgaggaagggaaagagagagaagaagacgaatctttagactgcttgtttcctggttgctactgttcctcagtctcagctgcatttttgtcttttttacatttctagtgtttattccttccttgggttttgtaaaccaataaattatctttttatgtaatcttgtttctgtggaatttctgacatttgcacttcaaaaagtcctaattatttttaaaggttaattagattcctgcaataataaaagatggagtaagtaccttaagatactctgaaattacagttacatgagagctacgttatcataaaaaattacatcaaccaaataaaaataaaatgagtatttttttatataaaataactaggaaagaatgggtagcaacgtgttgtgaatgtaaaatgagattctcaatgttcaccataaactcaagaactcagaacaattaaaacaagagaatttgttaaaaattaattttatattatatttcagtcttcattcaaaggagaaaagagtggcatttccctgacttaagtgggactacagagctctcagaccctgtctgtttcccctgttactttctgagttcctgtccttcacactgccttttgccagctgtcactaagatacttctaacattcttaggctccattaagcataatttgaaaaatatagccaattactgtttctcttcttcatgaaggggcaataagctgcaaagaattaacattataaaataaataataataacaaaatttataactttggattaatattaatttaaatcaaagaaataaaagctaacagaactaaaataaattttaaaatgtgaaaaatattttcatcaagcataaaagttagttttaatacatttaaaaatcatattgaaaatgagactacaaatgtttagcttgcattgctattaatcacttcaatatatcatgcattttgactgtgacaaaaggcagatacatagaggttacataataataatgattttctttattgcttgctgctcagctcaaatgctttcaaaattttaagatactatttctttatctgtctttctgctttccagcttattttattatttctctattttggttcatttcaagcacttttaaattttactgtcaccagtggactatcttctttgaaacaacctgtatttcttaatggcttcaatctaaacttttgacttttccttctcagttatttgtttttcagcctcaatagtgctcctttgaattatttcttaatataaaaagttttctattatttttacctacttaaaatttcatttttcttgttacctattctctatagaataatcatacagttttctatttgtttggtgctctgtcttttccaaagcatattcacatgcccacttatctatacaagaaatgcatgaggtagttaggaatcattatgctaatttaatgaattccaaatctgcaacttagaaaatttgctgtaatatttaaactcttcaatgcatgtgtaaccttaggtatgatgcctttcacagcaaaagtaatttatacctcttatttattattcttattctatactgttcatggggttatcaaggcaagaatactgaagtggttcgccattcccttctcctgtggaccacattctgtcagacctctccaccatgacctggccatcttgggtggccctgcatgacatggcttagtttcattgagttatacagggctgtggtccatgtgatcagattggctagtattctgtgattgtggtgatgaaaaggcaaaaagttaggacattgaaagatgaactccccaggtcagtaggtgccctatatgctactggagatcagtggaggaataactccagaaagaatgaagggatgcagccaaagcaaaaatacctagctgtggatgtgactgatgatagaagcaaggtctgatgctataaagaacaatattgcataggaacctagaatgttaggaccatgaatcaaggcaaattggaagtggtcaaacaagagatggcaagagtgaacttcgacattctaggaatcagcgaactaaaatggactggaatgggtgaatttaactcagatgaccattatatctactactgtgagcaggaatcccttggaagaagtggagtcatagtcaacaaaagagtccgaaatgcagtacttggatgcaatctcaaaaacgacagaatgatctctgttcatttccaaggcaagccattcaatatcatgttaattcaagccatgccccaaccagtaacactgaagaagctgaagttgaacagttctgtgaagacctacaagaccttctagaattaatgcacaaaaaagatgtccttttcattatagaggactggaatgcaaaagtaggaagtcaagaaacgcctgaagtaacaggcaaatttggccttggagtacataatgaagcagggcaaaggctaatagagttttgccaagagaacgcactggtcatagcaaataccctcttccaacaacacaagacaagactctaaacagggacatcaccagatggccaacactgaaatcagattgattatattctttgcagcaaaagatggagaagctctatcagtcagcaaaaacaagacttctgactgtgactcatgaacatcttattgccaaattcagacttaaattgaagaaagtggggaaaaccactagaccattcaggtatgacctaaatcaaatccgttatgattatacactggaagtgagaagtagatttaaggaactagatctgatagagtgcctgctgaactatggatggaggtttgtgacattgtacaggagacagggatcaagacaatccccaagaaaaagaaattgaagaaagcaaaatggctgttggagtaggccttacaaatagctgtgaaaagaaaagtgaaaagcaaaggagaaaaggaaagatatatccatctgaaagcagagttacagagaatagcaaggagagataagaaagccttcttcagtgatcaatgcaaagaaacagaggaaaacaatagaatgggaaagactagagatttcttcaagaaaattagggataccaagggaatatttcatgcaaagatgggctcaataaaggacaaaaatggtatggacctaacagaagcagaagatatttagaaaaggtgacaagaatacacagaagaactgtataaaaaaaagatcttaagatcttcatgacccagataatcacgttggtgtgctcactcacctagagtcagacatcctggaatgtgaagtcaagtgggccttaagaagcatcactatgaacaaagcaagtggaggtgagggaattccagttgagctctttcaaatcctaaaagatgatcctgtggaagtgctgcactcaatatgtcagcaaatttggaaaactcagcagtgcccacaggactggaaaaggtcagttttcattccaaatccaaagaaaggcaataccaaagaatgctcaaactaccacacagttgcactcatctcacacgctagtaaagtaatgtttaaagttctccaggccagacttcaaaaatccgtgaatttccagatgttaaagctggttttagaaaaggcagaggaaccagagatcaaattgccaacatctgctggatcatggaaaaagcaagagagttccagaaaaacatctatttctgctttattgactatgccaaagcctttgactgtgtgaatcacaataaactgtgtaaaattctgaaagagatgggaataccagaggaataccagacctcctgacttgcctcttgagaaacctgtatgcaggtcaggaagcaacagttagaactgggcatggaaaatcagactggttccaaataggaaaaggagtacgtcaaggctgtatactgtcattatgcttatttaatttatatgcagaatacatcatgagaatcactgggctggatgaagcacaagctggaatgaagattgctgggagaaataccaataacctcagatatgcaagtgacaccacccttatggcagaaagtgacgaactaaagagcatctcaatgaaagtgaaagaggagagtgaaaaagttgggcttaaagctcaacactcagaaaactaagatcatggcctccagtgccatcacttcatggcaaatagatggtgaagcagtggagatagtgactgactttatttttggggctccaaaatcactgcagatggtgactgcagccatgaaattaaaagacacttactccttgaaagaaaagttatgaccaacctagacagcagaagcattactttgtcagcaaaggtccatagtaaaggctatggtttttccagtagtcatatatggatgtgagagttggactataaagaaagctgagtgccaaagaattgatgcttttgtactgtggtgttggagaagactcttgagagtcccttggtctgcaagtagatccaaccaatctatcctaaaggagatcagtcctgggtgttcactggaaggactgatgttgaagccaaaactccaatactttggccacctgatgtgaaaagctgactcatctgaaaagaccctgatgctgggaaagtctgagggcaggaggagaaggggacgacagaggatgcgatttttggatggcatcaccgactcaatggacatgagtttgggtaaactccaggagttggtgatggacaaggaggcctgcatgctgcggttcattgggtcacaaagagtcagacacgactgagtgactgaactgaaccgaactgaattcttattccaaagtagttccatcaatatttcaaatgaatcagcttgcaataaaagtttatctttttcaaacttgttttggtcactgattttgttcaattttctcttctggattcccagattctttccttctgtgctcctgtgtgacacttggcacaattacctatgtgttatagttagttatatatatgtcttacttttcaaacttgatcacaaactcttgatagcaagtagtgtatctttatctttcattcttctattcatttatttattcatttactgagacacaatatatgccacgtggttgttcacacatgtgaaaggatcagagcccctagcctgaaggaaacaacaactggaagaggagactgacaagtaaacaatttattttaagaacaatgctgttctagtgaaagtgtgtaaaagatataatgggatgatagggaaaagacctcctctatctgtctggggagtcagagaatgcatcccaggagactatccctctgagtagaaaaatgaattaggacttgaaagtagaatgctgatagcaagccatccctggcagaaggaacaggatacacctttgcatacacataggcaaatgtaagtgaacaaatccatgaacaacagagccctcatcaaatcctgtgtgcagaatgaaatattccaattactatgcatgtctcctcctctcatttttaaaaataatttattcattttaattagaggttaattactttacaatattgtggtggtttttgtcatacattgacatgaatcagccatgggtgtatatgtgtttcccatcctgaacccccctcccacctccctccccatcccatcccttagggttgtcccagtacactggttttgagtgccctgtttcatgcattgaacttggactgatgatctatttcacatatggtaatatacatgtttcaatgctattctctcaagtcatcctactttggccttctcccacagagtccaaaaaaatgtgtctctattgctgtctcacatattgggttatcagtaccatctttctaaattccatatatatgcatttatatattgtattagtgtttttctttctgacttacttcactctgtataataggctcaagtttcatccaccttattagcactgattcaaatgtgttcttctggcgtgctgcgattcatggggtcgcaaagagtcggacacgactgagcgactgaactgaactgaactgaatattccattgtgtatatgtaccacagctttcttatccattcatctgacaatggacatctaggtttgtccatgtcctagctattgcaaacagtgcaataaaacaatcccattcaccattgtgatgaaatgaataaaatccttaggaataaaaagtgacagtgaagttgctcagtcgtgtcccactctttgcgacccccatggactgtagcctaccaggtttctccatccatgggattttccaggcaagagtactggagtgggttgccatttccttctccaggagatcttcccaacccagggattgaactctggtctcctgcattgtaggcagacgctttaccagcttaataaatctacctaaaaaaaaaacaaaagaccaatatatagaaaactataaaacactaatgaaagaaatcaaagatgacacaaatagatggagaaatataccatgttcatggatcagaagaatcaatatagtgaaaatgagtatactacccaaagcaatctatagattcaatgtaatccctatcaagctaccaatggtatttttcacagaactagaacaaataatttcacaatttgtatggaaatacaaaaaaatctcaaatagccaaagcatcttgagaaagaaaaatggaacttgaggaatcaacctgcctgacttcagactatatcacaaagctacagtcatcaagtatggatgtgagagttggactgtgaagaaagttgagtgccaaagaactgatgcttttgaaccgtggtgctggagaagactcttgagagtccaagggactctctctgcaaggagatccaaacagtccatcctaaaggagattagtcctgggtgttcataggaaggactgatgctgaagctgaaactccaatactttggccacctcatgtgaaaagttgattcattggaaaagaccctgatgctgggagggattgggggcaggaagagaaggggacgacataggatgagatggctggatggcatcaccgactcgatgcacatgagtttggaggaactccgggagttggcgatggatagggaggcctggcgtgctgcgattcatggggtcacaaagagtcggacatgactgagtgattgaactgattgactgacagtcatcaagacagtatggtactggcacaaagacagaaatatacatcaatggaacaaaatagaaatcccagagataaatccatgcacctatggacaccttatttttgaaaaaagaagcaaaaatatacaatggagaaaagacaatctctttaacaagtggtgctggggaaactggacaaccacctgtaaaagaatgtaactagaacacttttaacaccatacacaaaaataaattcaaaatgggttaaagatctaaatgtaagaccagaaactataaaactcctagaccagaaactataaaactcctataaatcataagcaaaacactctctgacataaatcacagcaagatcctctatgacccgtctctcagagtaatggaaataaaagccaaaataaacaaatgagacctaattaaacttaaaagcttttgtacaacgaaggaaactataagccaggtgaaaaaacagccttcagaatgggagaatataataacaaacaaggcaactgatgaagaattaatctctaaaatacacaagcagctcatgtagctcaataccagaaaaataaactacccaatcaaaaaacgggccaaagaactaaacagacacttctccaaagaagacatacagatggctaacaaacacgcaaaaagatgctcaacatctcccattatcagagaaaggcaaatcaaaaccacaatgaggtaccatctcatgccagtcagaatggctgctatcaaaacgtctacaaacaataaatggtggagagggtgtggagaaaagagaaccctctaacactgttggtggcactgcaaagtagtccagccactacagagaacagtgtggagattccttaaaaaaactggaaatagaactgccatatgacccagcaatcccactgctgggcatacataccgaggaaaccagaattgaaagtgacacgcgcattctcctctcattgttaaaatcaaatatcaagtcttttggaatatatttagaagaaggaagctcttaacaaagtagcaccatatagaaagcaggagtacatttgccaacagtattcaacccattttggtttcatcttttaaccagttatgcatgtgacaaaatgacctgctactcaattttctaaatgatcaataatgaactgcctgaactaaattatattgaaaaattttaagacatttttagtaaggtggttaaagtttagcaatgaatagagataaaatttaaactccttgaaagtactattggagcaatagactaattcataaaatggaaaataggcaactgtttttgtttattttaaagcaaaacttctctaaaacttgtgcaaattcacagctgtatggaaatactctaaatacataaaacatttaaaatcaattttattttaaaaaatctaactataaataataaataccattaatcccttaaagtgatactcttttcccttttcttttccaatactttttgttgcctttttggtaaaaagtacccatttggacattagggaaggaacaatgaggtggagcctggttggctgcagtccacggggttgcaaagagttgaacatagctgagcatgaacacatgcctgcatacaatggggtggaccatgaaagtcactaccacattgtgatcgtaaaggactgtaaagactggacgtttatatgctgatgtctcccacatcagtatctgcaggccacaacctcttctgaggttcaaggccatctagctacctcagagatatctttactctgatgtgccattcaccccatttcaccatgtaactgacactaccttgagattctctccaagtctggccctgctcctattgttactgccttaatgaagtcaatcaccatttatcataggccagaaagcttaaagtcatctctaatatttccttctttctcacctattacataaatcattttccaagttccataaattttgctttcaaaataacttcaaattcttttgtcctttctaattcgcctcctatcaccgctgctgcaattcaaatttccttcagctctcccctggatacttgtaatagcattttcatcagcctccctgaatgtgctttgcaactgccataaaacttcctacaagctgcagcaaacataatcttatgaaaactcaaatttcaccctgatttgtttaaaattcactaatgaatctgttatcctagcaatatggcccaaattcataatcaagactcccttttcaactaatgaattcctcctgtcatggatattctctgaaatgtcactttattgactcctagagataggcacatctctaaataaatgagtcattaggtaagtagtggtttaaggtctttttctttcattaggaagagactatgttgtttgccaccatatctgtagtgtctcaaagaatgccttgtacaagacagttactaaacatatgtatgtaaaaggaatgaataaaccaataaaatcacctaaaaaatacctagagcaatagacggcttgaaatacatttaaaatgtctaaaaatgagctgagtattaagaggtgtgattttttttttttagcaagctttatttatgtgtattgtactatacataagaaagtgttaggccctcagtcgtgtccatctctgtgaccccattaactgcagcccaccaggctcttgtgtccatgggatttcccaggcaagaatactggagtgggttaagtatactttatttgtgtgtaattacatgtaaggcatacttacatgcatttattcttcatgataaatatcacttgtgttcaatttaattcattgattttaccctataccagatattctttggtatttagattagagaagcttggaagatatcaattctgattttgtagggcttacagccaaggtaggaagaaaggaagtgacatcactcaattctgccttactctttgcgatcctatggactgtggcccaacaggctcttctgtccatgggattttccaggcaagaatactggagtgggttgccatttccttctacaacagccaaggtggagaggggaacaaatcacatgtagaaaaactagcatgcagttctaacaaaggagtgattaaacatgactatatgtctatatgtatatgtatatataattattccatatttgagagtttgacaaatagatgaagaggatcagaatttagttagagagaatagtgtgatcaaaagcatgagcccatgaaagagtctattatgttctggaaatggaaatcataacatcctgatggtgaatctttgaaaaattgttatcaacatgttcctttctttacacactctgggtgtttctagaaggaagggaaaacatgtcactggagatgacccttctttttgactcacaggaatttaccccccttatcacttctctacccttatcacatctttaccctgttcacagtgatcttaaggtttcaaagaactgatttcttccacgagccattttagtcctccttccattggctatgatcttcagataaaacagaacaggtcaatcaaacccatatctgtccaactaatggctccccaaagggcaagagaatattgataaaatacagattctcctgttgaccttaaggtgtggttctgctatgccacatactagctagatggcctgggacaagttattcatatgctttatgcctctattttctcatctatgatctggaaaaagaaataatagtatcttcataaggatagttatgaaggttaaagcaaataatgcatacagcatgtctagaagagttcatgacacctaaaaagattcataatgtgtgggctactatgaagtgactcagtttatctcatctgtgtaagtttccattgctcatgcttctcaaattggacaatttagcattccagaaatgcatagtacactttatacctctattttgttattcttttagtttagaatattccctactcttttccatctgctacctgcccactctcccttcacggcctctgaactattctgaagtcattgtttcctcctctgtgctctcgtagcattatgtttatgactcctttactgcacttaacacagcctgatgtttcatagtttctttgccaatggcttgacttgtacaccatttagagctccttgaggctagaggtatgtcattaatgtatgtgtcactaaggtgtaataaaaggtaggaagttgataaatgtcatttatctgttcctttaattttactaatatattcactttttcttgaattatccatgaatataatgaaacatcagtgcttgttgaatacctcttatccacaagctctgtgttgttttattgcttttgaccatcttctgttaagtggaaaggaccctgtagaattgaaatctggctcttacgtatgctggtatttgatactgggaaggtcactgagattgttttagcatcaatgtcctcacctcattctagggataataatacttacttaatatattctgactaacaatgcatgtagagtatggagtagactctcagattgtgggggaacattgctatctgttcctcatttatcaagaaaatatacacatacttaaactaaggaagattatttaaagcctaggtatagttccaatcctaggcttttataacactaccttaatcatagtcatagcgattattattattatatctattagcattattattaataggatttaatatcaaaatgttcacaagttttcttgataaccctagcaggaatttcccaaagacgattctaaaactggtagatatttttcttgtgcagactgcactaggttcttaatgcccttaattatcacaatatctctttgaggtattattcccaatatcttaggttaagaagctgaaattcagggaatggaagtcagaattcccaaggtcacaccaaagtctgtttaaagcatcaggtctcacactcactgttttctgattttaattcttgtgctcttcccaggttgccacacacagaatgccttatattaagcacaatggataagagcttaaagattcttgcagcttgggccatgtaataataaattagtgatgaactaaggattataatgcactttccaagttaaagcattgggggataacactttaaaatcataaggttttgcacactctcaaaaaatattggtcacatcagactgagcaattcatatgaaagaaactgagctttacctgaatcttgtaggtagctatagtcatagcctagatctttggatgaaataaagaaatcaccgtttctgtagagagggatgaaaggaaccatgtaggattcccggttgtgcccaatgggtgcattagcttctggataaacatcttgaagaggatgatactttcgaagccactgttcaaaaatactgcagaggaaaggattattcataatcagaaacatatttttgttgaagaaatatctggagttcttaaagtaaaataacaaggcatatcttaaaatctaacaccatggaaatataccaaacatagttttcatgctttgaaaagattttgtaaagcacagttcatgctgtcaggccctgatgaaatccactcatttgagagaaatattagaggataattttggaaaaggaatttcttagatgataagtgaaagttaaatgacaagttaaaacccttcagaatgccacagagcaagtgtaattattggctgagtgacaaccgagacatagtcataaataatatatgtctcttatctcaaagaaagttcacccaaagaaaaaacatgcaaaactaaattggaatcaatattagaagttggctattttttggtcatggttggggactttatttcaacctcctgttatatttagagaagtatatgtttaatgagggctgcccctgttggttcggcagtaaagaatctgcctgcactgcatcagtccctgggttgggaaggtcccctggagaagggcatggcaacctactccagtattcttgcaactcatggacagacgagcctggtgggccacagtccatgtggtcaccaagagttggacacaactgaagtgacttagcttgcatgcacaactacttcatgagtcttgttgaaagagctcaccttccatgacagaagttaaacatacttagcacttaccatttcccaacttcccagtaagctagagtatgaccacatgatcaatactcagccaatcagacatacccattcaagactttgaaacaggagatactgacacaaagaagcaaggacaatggaaaagcattctagcagtgggcaagggaagtggtgctaacaacatcctgtttataagcatgagatcagaggtatcagtaaaggtaagcactgcccagaggtaccctgtgttcgagagcacagtttggcagatgatttggctgctgccctcctctctcgttcttacctgtttctcaacctgcatctccactatctcctgaattatccattattctttcagcaaatttgttccctgtttaattcagccagagtgagtttctgttgcaagcaattaaaaaccctgacaggaacaaaagctaaaaaactaagagatcaaaactgtccagtaaggatggaagtgaaactaagtataacagaacatgtagcagataattaaagggatgacaaagaaaatgcctctgtatgaccaaaccacataacacagagggaagaacactagacctggggtcagaaaactccccttgggtcctagatttgtgatttaagagctgtatacattgtaaaagctcataagcaaatcacagaaactcttgaaggcttagccttcacatccttaaaatgaaagtaataatatctatcccatttgtttccaaacaaattatccaacgtggtagtttttaggagagtgctaaatagataagctattgttatttagctctaaaatttaagctcagaggcaaaagtttcatgcaagaagctggtgtctaaaaaagagagtgatgtttcaagaaaacagagaagtttaaaaaaaaaaatttttttttgaagtacaataaagatgagaacaaggaagccagatggcagcagtgatgattgtttttggtgatgaaaaagaattctatttgtttaaaaaaatcaggatttcaaatgttagttgtggtcaaagttgttttcattgtgaattaattgaaggatcagtaggctgctgataaatacctcgattattaaatacattttctgagtatttactatatgttaagttttgaagaaatatgaacctatgtaaagctcaagttctgtgggttttgacaaagttgtcttaatgttaagacaactttaagactctaaaatgttttaacctgtttaattttccttttattcatctgaataatgagataaatatttaagtcatgaaggtattgcaaggattaattaagcaacctaaatgtctattgacagatgaatggataaagaagatgtgatatatatttatatatgtatatgtatatatacacacacaatggaatattgctcagcccataaaaaagaatgatataatgccattttcagtaacatggatggacctagaaattactatgttaagtgaattaaataggtagataaagacaaatatcatattatattcccttatatgtaatataaaggaatctaatataaaggaatctaaaataggatacaaatgaacttatttataaaacagaaatagactcacagacataggaaaaacttatggttgctaaaggggaagggagtagaacagtaaaataggaatttgggattaacacatatacactactatacataaaatagatatacaaagacctactgtattcaatgtcttataataacctctaatgggaactgtattcagtgtcttgtaataacccataatggaaaattatctgaaaactatatatacacatgggcatccctggtggctcagtggtaaagaatctgccaatgccggagatgcaggttcaatccctgggtcaggaagatcactaggaaaaggaaatggcaacccacaccagtattcttgcctgggaaatcccatggacagaggatcccagtgggctacagtccatgggattacagtagagttggacatgactctgtgactaaataacaacaatgtatgtacatatatatgtacaatataaactaatccaattgctgtacacctgaaacattgtaagccaactttatgtcaataaaaattaattaattgaaaagattaaagggttaattaaaatagcataagtaagatattggaacagatcctggtaaagactgaaatctgagaagggggcagcagaggatgagatagttagattgcatcactgactcaatggacgtgaatgtgaacaaactttggcagacagtgaaggactggagaacctggtgtgctgcagtccacggggtctcagagtcgaacaaagcttagtgactgagcagcaacaactgagatatatggctaagcgttggacaaacggtgaggagaagctgtcctccgccatagcgtctttctcttcttcatgattcgtgttacactggaagaacgttagctggtgagagatgtgagacaggctatcatagaaatgccaaagctgtgcatatttgaactagctcttttaaaatggttattattctttaagtagaaatagggaaacagtattcaaggggatttttttttttttttttttggtgtgtacttccgtttcctcaactgaagaaattaggaactggcttaacaaataaatcccaaattcttttcaagtcttgtattttatgaatgattcttcttattttgatgtctatggttttcttcttttcatgaaagcattacttgttcattacacaaaattcagaaaatagaaacatgcaaaaaggagaaaattaaaaaaaaacacacacatacttgctcaatatttctgttagttttttaaatatgcaaatataacactatatacatattttaacaaaaaaattataacatagacactattttatgactttttattagtactaaatgttgaagttatatttaagaatgtttaaacaatattcagcagttttcaagtggtaaatctattttttaatgagaaggaggccctctgataattaatctctccccatccctattaaactttggctgatttagaaacagtccaatatacaatgagctattagataagagcttcaggcagacattgtgccttttgtcaattgagaaaaattactcttatagttcagtttatatataatcttatttctgccaagaaataaaaattctttaccttaataggacaaggacatcaattcttagcaccaagagatataatggatgaaaccattaatgtgctcacccaccttttccaccttttaaaatgaaagtattaatcctgtttaaattcttcatcagtagttctcatcttcagttaatttcatcaaactatgtctagaatggctcacatcagaatactaatgtttaacttggataagcacactgacattttgggaagcaaattatcttcttatcacagatttatttaacctgcatctagatggttttctagaagcctgagcaacaatgaaatgcacaagagagggtttaggaaaaggttaagctaaatcacagacaaaaacaaggaggaatgtgttttctgtataaaaatagcacagatgtcaggtcacttccattcttataataagacaaagttagataggtggaaaatcaataacttttattggactcatgagagaaccaaggtcacagagcagactacttctccccaaactgcagagataagtgcaagcagaggaactcaactgctattcccttttcaggaggagaagctggatccataaacccaaacactttgataaatgcctggagactggtgatgagtgaagctagtgatgagatggacagctagtgatgagagacactcctggaacccatagtctgacggggattcccacgcattccctggcttttacctccaggaactctgtccgattttcacaataaagatctgagaaagatcctctcctggctgtgttgggggacggagagagtatccattgtgaaatatgcccagaggtcttctccacaccaaagcccttcaatccagaggaaataaccaccagagtattattccagtaggaggaagggaactcctctcagtccagcctctttcagctttcctgtctcatttaaggccacatgggtcaggacttcaaggaaacagattgggaatatgacaactaaaaacggagatcagaggtgggaaaatcaggaagctataccactgcagaaacactcatgacagtcacagccccaagacactggccaactaaaagactgaaatttaatcagagtactatagaacactttccctctcctgtgctttaccatgataccaacagagttctagtatgataagagtgaattataactaaaagatctgtgagacaaatcgtttctgaggaatagtatcacttcgagtcatagaataaatgtttgattataagcaaaaatgtaaaataatagtctctgtggaatagtatcaatgtgagccatagaataaatgattataagcaatcctccaaaaagtacagtatggaagggcagtggaaccatttaggagtttgaaagtgaaagtgttagtcgcttagtcatgtccgactctttgccaaccctgtggattacagcccgccaggcttctcagtccatggaattctccaggccagaatactggaggggattttcccgacccagggatcaaactcaggtcgcagattctttaccatcagagccaccagggatgtccttaggtttgagaaaactggtgaatatggtatctgccaagtgaccaaagctaacactgcccatggtcagccatgttgatagtgtgtgcccttgatatgatgtggacagaagagtgctttcccctcggtcctcttcctcctcaagtaactccagtctacaaaattccagtcaaggggcattctgtaaaacacctgagcagtactcctcaaaactgtcaaggtcatcaaaaacaagcaaagctccaaaaatagccacagtcaagaaggagggaggagacatgatcactaaatgtaatatgagatcctggatgggatcttgaaacacaaagagatattagataacaactaagtaatcttaatggtggctcagatggtaaagcatctgcctacaatgccggagaccaggattcaagccctgggttgggaagatcccctggagaaggaaatgacaacccgctccagtcctattgcctggaaaatcccatggacagaggagcctggaaggctacagtctatgggatcgcaaagagtcggacacgactgagcgacttcactcactcactcaagtaatcttaatagactgtagttaataataatgtattgaaattgtttcatgaattgtgacaaaacttccatactgatgtaaattaagaataggggaaactggatgtgagatatatgcaaactcagatatgtaaagagaaaattattcttaaatttccttttcaaaaatagaacaacaaagaaacctaatgtgattggatattagggaactgatttgctttagtacattcactggtacaacaaaattgtataaatataatacaattctttttcattgacttattcaaccatttcataaatagttgaatacatatatacatctataaactggttctttgtcaggtattgatgtagttctgtgtccttgtagtacttagatctagtggtggagatggatactaaccagtaatttcagaaatgtatctttaattacagactggcaaatacaaaagcaagatggtaatacagtttagtgaagaggtctgattgattctgcctcctttgggaaagtctctgatggtgttagagaatgagagaagtgatatgtgaatgtttctgaaaaagagaacagaatttgcaagaaccttcaatgggatgccacattctcttatctgtctcactcctcccatagcttcacttattttctatagctgatgacttctcaatttatatttacagagtaaatcttggtctgacatctcagcccaaatttccagctgcccaactggcaccctcattgaaatatctcaaaagaatcttaaagcacagcacacagaatcttcaaaaatcatgatattaacatctcttccttatgctacccttctccactgatttgtaactttgggaataaaaatatctgtccagcaagaatatataaaagaccaacgtatctatggagagaacagtttgagatgaagctagagaggaactgggggcaaaatcaagaaaggcagttgaggacacgcaagaaatattttcaatttctcctaagaggaataggaagtcactgtttgtctctgcagtggtgagagataacatgaatagataattttataaaaagtataaaatgtataaaaagattgcactgtgaagaaagaactggaggatagtcagaactgatgtgcagggaacaagggatgaggaaatcacaagaaaatgtatccacattaaaaaaatgatgggtagctttccaagtggtacaggtcaggagtgaggcatcacagaagactccacattttctggttaaaggggactcacaatcaaaacagaagcagaaaaaaggaaactggacaaattcggtaaggccctggaggcagataaaaacccaggtctttgggctgatatacctgggcttcttcttcctctgacactccagtcacctctgctggggacttggttttcttcttccttattctccccgagtggatcctgaattacttctgtcactgactaaggcttgcattttggggcaggcagggtttggcaacaggactggaaacatacagaaaaatagatgctggaatatgagttaaaggctccacttcagaagttatctctgaaaatagaaaatagtctatagtcatcaactatagtctatagtcatcctattttctttccctgtgggaggaacaaacctagagacattgttttcagagcaagtaaaagtatgctggaaaatatcagtgctatctctagctacaaaacctcatctttttaaccttccttttctctgtgcctaacacatagtaggtgttcaatatttacatgatcattgttgctgccctcctgagtttataatctcacccaggagaatgagttcttaataaagccatttctgttaatacaacctctcagtgtatgttgcttattgacttaagcctcaacaaatcaaggaggtaactgttatatagatcccattttacagaagagaacattgactcaaagggttgaaactctgccaatgctgacccaacaagactgtggcagagaatccagtgtttcatgtcagatttatgttagttttacaattatactcaacttgcagagctgtggccagagcccaggtgttctattccaagttaaacagtcttccactaacaagcgaaatgttagtgattactatttaaagcagaaagatggacaaagcattaatgctttgctccaggtggtgctagtggtaaaaaacccatctgccaatgcaggaacttgagatgcgggttcggtccctgggttgggaaggtgcccttgaaaggagcatggcaacaacgccagtgttcttgcctggagaatcccacggacagaggagtctgggaggctatggtccatagcgttgcacagagtcggacacgattgaagtgacttagcacccactaaccattttagggctgtgcacagaaattagaataggtatcctttgtcattttactttacctgagaaatgaacattttattacaaagtgtctcaacattgcagagaagagttgtgaaatattaacatcgatagtctaaagacttgtgatttttctttgtggaactaagaccctttttacttcctcccaaaggccatgagaacccatagaccaacaccggcttagtaggtcacaaagcggcgacagagaagggggccaaagagaacggccttggcacggattctgggtctgtgcgttgacctgtccttgaggaccaacttagagttcctcccgagggaggccagtgagcagctgtgaaatgactctggaagtgctgagtcttatctagaagctgaaactcactgcaggcacgtgggagaaagaggagctaagggaagaggtgcagcgcatgctgtgaacacaggggagccctgcaggatgtgcagacaaaagggcagaaatccagcctcaaccgtttataagcaagggttcaatgtctgagtgcgtgctacgtcgctcagtcatgtcggactcgtggagaccccatggactgtagcccgccaggctcctctgtccatgggattctccaggcaaggatacttgagtgggttgcaggtcctccttcagaggaccttcccgacccagggattgaaccctcacctcttatgtctcctgcattggcaggggttctttactactagtgccatctgggaagcccaaagtttcaataaaaagtcctaattttgatgctgggatttgagggccgcaaaagaagccaaaaacataaaatttcttgagaccttgaatcagatttttggtattggttttttgaggggagagaggataatctttgttagcctgtttactcatctgtaaaatgtggataataaacttcaaaatgtcatgagatgccgggggccagagtgaggacctctgcccatggcaaaggtcatgaggaaggaggcttggcatgcgcaaaggcgtgatcaagcctcaggaaaccccctgttcccgagcatctaccccaaaaccagagtctgttttatgctctcccccataaccgtttctctcggagaaggagtaaacgtgcagctccaaggcaataaaaattcctgggcgtgacaagagtgtttcagcttacgcactcctctgaaggttatctagcccacctgtataggttcgtccggccacatgtgattgtttccagcctcacaatctgagaggtacgagatgttttagacttcagttcagttcagtcgctcagtcgtgtccgactctttgcgacccatgaatcgcagcagccaggcctccctgtccatcaccatctcctggagttcactcagactcacgtccactgagtccgtgatgccatccagccatctcatcctcggttgtccccttctcctcctgcctccaatccctcccagcatcagagtcttttccaatgagtcaactctttgcataaggtggccaaagtactggagtttcagctttagcatcattccttccaaagaaatcccagggttgatctccttcagaatggactggttggatctccttgcagtccaagggactctcaagagtcttctccaacaccacagttcaaaagcatcaattctttggccctcggccttcttcacagtccaactctcacatccatacatgactactggaaaaaccatagccttgactagacggaccttagtcagcaaagtaaagtctctgcttttgaatatgctatctaggtaggtcataacttttcttccaaggagtaagcgtcttttaatttcatggctgcagtcgccatctgcagtgattttggaaccccccaaaataaagtctgacactgtttccactgcttccccatctatttcccatgaagtgatgggaccggatgccatgatcttcgttttctgattgttgagctttaagccaactttttcactctcctctttcactttcatcaagacgctttttagctcctcttcactttctgccatgagggtggtttcatccgcatatctgaggttattgatatttctccctgcaatcttgattccagcttgtgtttcttccagtccagcgtttctcatgatgtactctgcatagaagttaaataagcagggtgacaatatacagccttgacgtactccttttcctatttggaaccagtctgttgttccatgtccagttctaactgttgcttcctgacctgcatacagatttctcaagaggcaggttaggtggtctggtattcccatctctttcagaattttccacagtttattgtgatccacacagtcaaaggctttggcatagtcaattaagcagaaatagatgtttttctggaactctcttgttttttttccatgatccagcagatgttggcaatgtgatctctggttcctctgccttttctaaaaccagcttgaacatcagggagttcacggttcacatattgctgaagcctggcttgaagaattttgagcattactttactaacatgtgagttgagtgcaattgtgcagtagtttgagcattctttggcattgcctttctttgggattggaatgaaaactgaccttttccagtcctgtggccactgctgagttttccatatttgctggcatattgagtgcagcactttcacagcatcatcttttaggatttgaaactgctcaactggaattccatcacctccactagctttgttcatagtgatgctttctaaggcccacctgacttcactttccaagatgtctggctctagattagtgatcacatcatcatgattatctgggtcatgaagatcttttttgtacagttcttccatgtattcttgccacctcttcttaatatcttctgcttctgttaggtccataccatttctgtccttgattgagcctatctttgcatgaaatgttcccttggtatctctaattttcttgaagagatctctagtctttcccattctgttcttttcctctatctctttgcattgatcactgaagaaggctttcttatctcttcttgctattctttggaactctgcatttagatgcttatatctttccttttctcctttgctttttgcctctcttcttttcacagctatttgtaagccctccccagacagccattttgcttttttgcatttcttttccatggggatggtcttgatccctgtctcctgtacagtgtcacgaacctcattccatacttcatcaggcactctatctatcagatctaggcccttaaatctatttctcacttccactgtataatcataaaggatttgatttaggtcatacctgaatggtctagtggttttccctactttcttcaatttaagtctgaatttggtaagaaggagttcatgatctgagccacagtcagctcctggtcttgcccgtgtccgaggtaaggggcagccaggagaagccacctctcgcccaaggccaggggtggttttagacttactaaaggcaaattcttttggggagttggaaattattaatatagtgggttggttaggaattatattggtgaagggtttttcatttcttgtgccaataattgctgctaattccctaccctgggtatgacaagggtgtctcaggtcaaacctctctgctgacagactaccttgtgtgacaggattatccatactcctgccacatgattatttactacctctcaaccataaacagcacagagagttttggagtattttgaaagtcttagttagcatagggcttttctgattgttgagtcaatgattgcctccatatccttaggcacctgggaatatattaatcaatgtatttggaatatagaaaaggaaatatagtagtttttaaggttagcaatactagactttttgagttaatgaattttcccttttgtaatagatcactgtactttgttataaatcactgtgtctttgctatgtaaaaatgtaactttatcactatcttaagactaaatagatcttaaggggaacattggtgaaaggattttcatttgttgggttgatgtttgctgctaaatctccatgttccctgcccttataatgaatataactagcatataggagaaacaagtattaacctttaagcatataggagaaataagtattaacctttaaggttaatcctgttaaccttgggttaaataaatttctttcttgattgtaactcactacaccctcaccctataggaatgtaactttatttggagggtggtgcctggtttaagaaaaaacacccttggaagaaataagttttttggttatcagaaagaaaggatcataaaatgtcagcaggtttcatggccagaagatgatgtaaaatccctaagacctttttatgtgaagcacctgatttggataaaggtcaggactgctgacccccgtgtgactctgtattcatccttatgtgtaacaaaaggtacataagcaaaccccaaaataaagaaattggatcagtttccggaaagactgattccctcatgtcattcttttctgctctccatttttctggctaaattcccatctggagcatgggtgctcgccacatctacttacttgccctggttttcaagcccacgcgagaaggagcccaaggagggcactttccgatattcaagtggcaccggtggcccaacgtagatggtgcaaattccttgttttggaattttattggtatcccacgtaaaccaagttattcagcatccttttctctcctactattttctggctgaattcccatctggtgcatgggtacccaccaagcctattaattttgcctgcggtccgatctcagtgcctcctctccttcaggagaacaggaagacgcctgcggcctacgtaggtggtgactggtattccatgtgaaccaagttattcagcctctttttctctgctaattttctaatctctctctatctgtaattaaataagttatttctaaggacgccaatgccatccccaccttcgaattccctggatccaccggggctggaccccagcaatgagatataactaaaattaggtgtacagtacacccagaacagggccaacacacagtaagtacccaacagtgggtaattgttgctgttattcttacacccatcagaaggcatcgtttctgcagtttaatataaggagccaatttgaattcccttagaatagaggttttatatttctattccttgggaattttggtgtatcacaagaaggatggagttagcttaaaaaacaaatatgtcagtgaattttatttcttgttttaaagaaattatatgaacagagagtgaattaattatagaagttaacttcccagatgctgaaactgcattgctcagattcagattttggttgtgatactcagaagctgtgcaaacttgggcaaactacttcacctctgtgtgcttcagtttccttcccagtaaaatgacagctacaatatgggttgaattgtgccccccctaaattcatgtgttggttttcagaaagtggttatatttagagatagggtctttaaagagctaattaagtgaatatgagatccttggggttggttataatccattatgtctggtgcccttataaggaggagaaatttggatacagacaggtacaacagaaggaagagcctgtgaagacacagggaaaagagagtcaagaagaaatcatgaagtgaggtctcaaaagtcaccagttttgcccatcccttgatcttgaaatttctagtctccaggattgcaagaaaataaatttctgttgtttaagccaccaagtctatggtactatgtcatggtagccataatggatgaatacacaacagcacgttatctgaagggtttcttgcaggtatttagtgaataaatatatgtaaaattacttagaataatacatataatagaatacagaatgctgttacttttattaaaagtatagctactttgtttttaagtttcttattggagtataattgctttaccatgttgtgttagtttctgctgtggaacaaactgaaccaactctatgtatacatgcatccctccctcttaggcctccctcctgccccattcctctctacccctcaggtcatcacaaagcactgacatgaaccccttgtgcaatacagcaggttcccactagccgtttattttacacacggtagtgaatacctgtcagtgctaatctcccagttcatccctccccttcccctactgtgtccacatggccatttttttgttgtgttcttgaattttgagactgttttggagttcttcttcctttgttgttgctgtttagttgctaagtcatgtccaacactttctcagtcccaagaactgcagcccaccaagatgtttctgtccatgagatttcccagacaagaatactggagtgggttgccattttcttctccaggggatcttccaaatgcaaggattgaacccatgactcctgcattgcaagtggattctttaccatgaagccaccagggaaaccccttttcttatgatttccttagacttttatttgccactgtatcttttgcctctttaaggctcagggcataaaaacaccaaccagatttactgtttccctcctttgatcattacatatgtcatgctagattgtaattatttgattatgtgtcattctccaatagtatatgggtgatccaggaagagtaattacttcgtcttattggtcactgcagaccaaatgtccatcacagtgccttctcattaacaagagggctagattcatgtagatcaaaaatatgtaaaatttgagaattttgtagtattttggggagagggcccacattttatcaaattctgaaagagtatgaactaaatattaaagaatcatttacttagtggttaactattagaactgagagaaggagaaatccaagagatgctgatgatttattttgagttggttatctctaaaagtggagttactctctgacccacaccagttagcaaagtgtctggcatgtaataagcattgttgttgttgttgtttttcagttgcttagtcacgtccaaaactttgcgaccccatactcggcctccctgtccatcaccatctcaaactcatgtccatcaagtcagtgatgccatccaaccatctcatcctctgttattcccttctcctaccacctccttcctcttctgctgagaccactggaaaaacttggagccttcctttggatttgaaataacagcgtcccaataattcctcttcttcatgttgctggctaatgatattctagaactcatttaaggagtatttggaaatttttactgaaaagcaatacttttaaaagaaatggacactttaagagcataaattgttaggaatgagtagctgcaaatgaaaagcctgctatacagctaagaaattcaacctcagttgagtataattccaaatgtatactctactccacaatttcttagcttagttgaggaaagggcaaagaagtctttgggaaatggatactgagtgaaaaccagattaaaatcatttaagctaatgataaaacttgacggaacttagggtacaaaccaaaatatcaatgatagcaaactgaaaaaaaaaaaaaaccccagcaaactaaaagtctaaggggagaaaaaggcagtttcagaagttactgttttttcttttcccataaatacttactggtatcattaagtggcaaggtacactactaagaaccatgtacactgacatatgtaaaaagacagccaatggaaatttgctgcatgactcaaggaactaaaaccaaggctctgtaacaacctagagggatgggaaagggtgggaagtgggagggagctttaagagggaggggacatatgtacacctacgctaattcatgctgatgcacagcagaaaccaaagcaatactgtaaagcaattgtccttcagttaaaaataaataaacatttttaaaaacatgaaaaaaagcaagccatagtgctccccaagtgatgataacatgcacccagagttgacagacactgcattagacaaaagttgaaatcaaatgagccaagctgcactcacagaccagagctagtcagagtgaatttgtgaaaaaggtatcctaaagggccagccctctcagctgatgctcagtgtaagtgagaggaaggctattcatgcttctcagtagacactactgattgaccttcagagtctctgtgctcttacctgggaagttgtgctaataaaccttaccttgttcctttcactatgatgcccattttgtaattcattaaacactgtattttgaacccactacatgttaagttccaaggatggaaaagaagtgttcccattctcatggatctcactccataccatgataaaaagataaataaaatttcaaagcaatgtaaatgacactttggagggggcatgtgtataaaacctatgggattacagaagcagcagctaactgctggagtcaaggacagtttcacagtagggatgatatttaaactggatggataggttatggggaaggcattgcacaagccaacagggagcctgggcactcatgctactgaaaaatgaaagtggcttggtgtgtcagaatggaatatagagttgtgtaggatcaacaggaagtgagacaagaaaggtgagaagagtcagactgtaaaaaatcatctatccaccaaggagatggaaggttgtagggatggggaagtagttttaactccatcctcagagttaatttgccatgtaagtacatttgataaggagtgaacatgactgaacttcaattttctaaatggaattatagtagatatgattaaataacaataaatcaacatatattacttctgtctattgaagatcgcatattgtaacagtgggccaatagtgaaacatatgcagacaattattagttttctgcaggtagttacaatgcctctctttcataaaaaatttctcttctcttaaacttttccttcactttctactatttgtcatcagagtgatgcttgtaaacaactaatcaattcagtaatgattcccatttattaggtagtcatgtatctagtactagccttgggattttgacatatatcatcatattatttctccaccaagactgcaagagaggtattagtaacagtagcagtagtgagactttggctcatataacactcactatattatcaggtaccattctaggtactcctatatgggaactcaattaatccccaaaatacttccataaggaatgttttgttgttatccctattttgcacatgagaaaactgaactacagaatggttcagacaatggcccaaggtcacatagcttggattcaaatccaggacttggcaggattcaaatgcaggagtgacaggattcaaatctaggcagtctgatctcagtgccagctcttggccttagcaaagcatggcctcatggtggtattcacattacaatacagaaaaacaaacaaacaaaccaaaagcaggagtttaaataacgttcctcagtttatttagttaataaatgtagcagcaggactccaactcaggtttgctgcactcagcgcttcccataaatgcttccagttgtgtgttttgcaaacacacacacagacacacagagtagacctgtgtgacttgcacactttccagtttagtcaggaaaagaaaaagaatgttggaaaagagattttgagtctcagagattttccatgactgagtattagaaataaaggctcaatctgttcactgctataatcatagaacttagaatagcatctgtacacagctgacactcaataaatgttggataaataactatcccagggggatatggagaatatattgtatatattcagtgaacggtggtggtggtttagtatttaagttgtgtccaactcttgtgacccatgaactgcagcccaccaggctcctctgtccatgagatttcccaggcaagaatcctggagtgggtagccatttccttcttcagatatttagtgaatatttattcactaaatggggatttattgagcgtctccccatgcaggcaagtcaggcagtatacacggtagtgtggaagataaaaggctacaaaaggcagagtcctccccataagcaatatttaggaaggatttataccatttacacatattttttgtatctttcctttagttaaggctctaggacctgtatatgatgtgaaaagcctttttaggtatcgatacttaagtcatccttcgtggtaataacaatgtgttcaaggtgggcataattagtatacagtttcacccacctaaaatctctttcatgaacaccagacaatactctgtggtttccaactttccctgtgaattatgtttttaagaccattatctctatgtcttaggggcttcccaggtggcgctagtggtcagtgcaggagatgtaagagttgtggattcgattcctctgtcaggaagatcccctggaggaagagatggcaacccactccagtattcttgcctggaggatcccatggacagaggagcctggcgggctacagtccttggggccgtgaagagtcggacatgactgaagtgacctagcacaaacgcatgcttatataagcatcactttcagtatgatgttaaaggctttactgattatggtaggattcacctcattctgacggtcacggtggaaagtccatcaaactgtattacctgtacagatggagaactccttcatttggaaagataactccttcttccagacaaaaggatattgctaccattttaacacagtgcccttcagacacagcttgtacaatttcagcctctcatgaaattgatattggtttgataggaattcacagaagttatggaattattccttcacctaatagcctacatcacaacctagagatacgtgccttcacagttaaacaaagactataaaatcaattttatttcccttgctggctttaagaatccatgttaatagaaattactaagatgctcatttttcatcttggctcactaataggatatttgtcaatttatcaatatccatacctggcctgcatatttcctggtctccatctcttttccagaacatataatgagaaaactgaataggttaatttggtacacatggattttaaaagggactaatgaggaaagtgagccgacaggacaaaaatctatgattgtcagcttaaggcatttgcacttctccatatgtaatgagtctctgttaccatttgagagggtgaatgacatgaaaaaaacttatgcataaaaggatttatatgaaagtgtcacactttttttagttggagggaattagaggattttttggttggagagattagaggcaagagaccaacgcatacttctaggtagttaagtatcttacagcctctactaaaaatgtaagaaaaatcaaaggtaatgtgtgtaaatgagataagggagcaaagaagatcacaaatgtttgaacaccaaggatgtcatctggcagagggagaaaaatcattctgagctcaagtactgtatttcaatgaacagcaaatattccatgcacgcctaagagtatttatgatgttgtacaattatagaaacatatgcaacacaaatgcataaataatttataaagtaataatactaatatcagatgaaaaactatacaatgtgttcaagactagcgtaatgaacaaagaggacaatgtaaaacatcctttagaaagcaaattcatctggagccgacaacctgacatcttaatcacaactaatgattctggctgctggaaggaaagagcccaggaaaacacaggtcaaggactgaaaaagagattattttctgcgtgattttctttcaaatagtagttatatacccatctagtcacttttttttcctgcagctgaaatcttcatctatgaatatgtcctaatctttcctttcctactctactctcctattcaacttgagaaaaactgatgaatatatttcttacaaaggtcagtgatctgtcccccaacctggaatgctccggtggaacacttcctcatctttacgctggtatgtcccaaactacatttgtatatattgtgtacctatcatttttcaactttaaaatttcctcttaataagatttatctgttattaatatgctctgcttggtaagttgccattcttatattttcctttaattctttatatatggaatcccttagctccctgcacatatttaaaataagtaattgaagtatattcctagaaagtcaaacatctagactcccatcatcacagtttccatagaccgtttcttcttccttgagtatgggatacactatttgtcttttcatttactgtgaatgtaatttttaaatacgcaacaaaatactaccaaaccaaatccataaaaagaattatacagagtaaccaagtgggatttatactaggaattcaaggttggtttaacatcccaaaatcaattaatggagttcactcatgatctcctaactaaagagaataataggattaaataatgagaatagtttttaattagcattagaagaaattcagtacaacaatagtggcatataagaagttccaaatgtttctgttattacttactgatgttaggtcaacaaatacatttggaaaattgaatttcagcttggaacaaaagaatatagtcacaagtaaatgagatttgaacactgccccggcttttggtatgtaaaccctaaacggggaattcagggatccaaacagaaggattcaaaggcatgtgatggactctggtttgactttgactcacccaaattcacgggtattgaaaagtcattcctgggtcctcctatttcttccaattcttcatatgaatgatatctcccccccaaacttagctacattagatacttaagtaaagtcatatttggtactatttacaaatttttctttttgcaggaccaaatttaatttccatgggtcaggggcagatgagtactaagcttatagttttaggcagtctgtctgcttgatatttttaaaatcaagcagatttaaatagtggtttaaatctgttgtagaggtttaaatagtgtcaactttcttgaaaaagaggctaagaagagtcaggcaagatattagcatcctatccttcacaacaaggaagaatttgatttccaatatgaggagtttctcctgtggctcagcagtaaagaatccacctgcaatgcaggagacttgggtttgatcctcagatcaagaagatcccctggagaaggagatggctacccactccagaattcttgcctggagaatcccatgaacagaagacactggtggaccatggggttggaaaagaagcagacaagactgagggactaaacaacaagcttgaaagaaagaagtctaggtgtacagagaagaggttaatagaatgctgtatgttggtggatatctgtgttcgtaaaattaacttttgccaagtctgtggtaatgtgactggtgttaattctaacctattcatcaagagcatgaacataatggttctgagagcattaaaatgctgatgcccaagcttccatatttattaactaagaagttctatgtctggggtctgtatctgggtattttaaataaaagtatcccatggatttaagcagcaaggattgagaaccacttttatagtaaataacctattttgttaagtttgatttataaaatgaatgagacagacactgaacagaacattaggtatcttaagctgagtggagctgcaaagctactgactaattgattttaaaaaataagccattcacagttctcataaaatttaaaatgtgtaattgtgttttggtaaaaacaaaatgccaagagattgctctaattgcttccacaatatttatttttatgtcttttgattcattttgaaagagtggcattgtgacagtgggatgcatactgattactgtggtgaaaggtaaaaatcttctcagatggtctctccctgaacacagatgaaaaatagttgtgttttttgtctttgtttattttactattataacttgaagaatcatgacactttatatcttgaaggcaatgaagaagaaaaattgcattttcatattagctgtctgtatcaaatcaagcaagaataaaaagaaaattgattttttttgctagaagtctggtggatagagtaacctgttttaaagaaaataaggaaaaatttccatcacctatttgccgacatctggccaaagtaaaatgtgtaaaatggaaaaatagcaaaattacctgaggatgctgcttattcagtgtgaaaagtgaaaagattttctatttagatattagactagagcaatgaggatttaagggtcacctctttgggtaccttcgatgatgtgcattacagacagcatttgggggaaaatctcatgaaattatgattggaagagtgaataaatcgataaacaaaagcaaaacacaggtagatattgcatggatttgagaaaaaaatggagtatttttattgcccacaaaatattcattatgaaggtcactgtagtcgaagtaaataaacgctgacctatttttccagccccaacaggcccctttcatgcatatcttgctaatttctgcccggagttcagggttgtcccagttttgaggactgatcttgatctcagtaggaagaactggttattgttgtggttcagttgctaagttgtgtccaactctttgcaacagcatcgactgtagcccactgggctccttgtccacgggatttcccaggcaagaatactggtgtcggttgccatttccttcaccaggggatcttcctgactcctgtgtctcctgcatggccaggcagattccttaccctgggccaccagggacgcccaggaagacctgggacatctctacaatagaactttaagtcctaccatagactaaccctgactgtgtgttgatatatctattccaataactctgctacttttctgccatgtttccttgatctggctactatcttattaacttatttgtgaagttcttctagaattgagtctccacctatctaaacaaaacttcccatgacaattgggtgtcttgccccaaattgaatctacttgagtaagcaattttcttttctaaacagactgtccctttcaactgcagctaatacaatgttatctgtccatcccctgcctagactggaatagaatattcagcacattctccttctgcaattaagagttagtatttgttaattcccaaattcaaatacctcctgaaaattcagcaaatatttctgagtggctactatgattcttgcacataaaaatcttaaaaatatatttcctgtacttaaaagccacacagtctggagaggaagacagatatatgaatatgctattttaatgtacactaggatgctgctgctgctaagtcacttgagttgtgtccaaatctgtgtgaccccatagatgacagtgcaaagagacaagtaaaagacagtaaaaaggaggaagtgatcagcttctattgaaagaaaggaaatagaaagtaacagtgtttgagctgaagatcaaaaggctgctagaagaccaggtgataaatgaagaccaagaagctggtggagcatttcaaggaagagattccagtttgtacaaaggctccatggagcggggtacatttgtgacaattctacgcggggatatcttaaggagctggagcgtatactttgccttcaacttttggtgccctgagttaaggtatctacttttcattctctccacaaaggttgtgtactgccattctctgaagttagatgcctgtaggcaaataggaagaagcttcatgattcatcatgacataacaaaatcttggggtttgtcagtctaagaggaagtgaaagacactttgaagaatacattatttccttttctccatagaaataattctcaagggaggagtctctgagggaatttttattgagggggttagatgctatggaaaagtattttatatttagatcctgtcatagttattatactattgctttacagacccaaatataccttaccactatcaataataaggtggacaaatcgatatattctgttgaggtcatccatcctctttgtcaagttgcaacactgtttgctcaatacattcatgtgcagaataggcatagtggcagagatggaggtcaggaaatgggttcaaccatatagctcatacagttttccttctcaggaaggctgacctacctaccaccactgagtgccaaatctgctaacaccagagatctattacaaggttctgatcaagtaacaacccttgcaagcagagcataatttactacctggtatgttgattatattggattcctatcatcataaagtataccacaactgctttcatcagcacagatgaaaatttgtgtataattgatgcttttgaactgcggtgttggagaagactcttgagagtcccttggactgcaagaagatccaaccagtccattctaaaggagaccagtcctgggtgttctttggaaggactgatgctaaagctgaaactccaatactttggccacctcatgtgaagagttgactcattggaaaagagtctgatggtgggagggattgggggcaggaggagaaggggacaacagaggatgagatggctggatggcatcactgactcgatggacgtgagtgtgagtgaattctgggagttggtgatcgacagggaggcctggcgtgctgtgactcatggggttgcagagtcagacacgactgagcgactgaactgaactgaactgaactgtgctttctctgtacttctgcaactaccaccacccatagacccatgaaatgtttctttattgctacattctcccactcaacattacttctgactacggaatccatctcacagcaaaaccaatgcaacgcagctattccctatggaattcactagttttaccatgtattcctatctaaaagcaaccagcctgataaaatgatgaattggccactgaagattcagttaggtgccagtgaggactcacatcctaaccagctgaggccctctgttttataaagacagtaaatgctttgaaagacagtggtggtggtttagtctctatgtcatgtctgactcttgcgatccctggactgtacctgccagtctcctctgtccatgggactctccaggcaagagtactggagtgggttgccatttccttctccagcagattttcccaatctaggaatcgaactcgggtctccgccattgcaggcagcttctttaccaactgagctacaagggaagatctgaaattatatactgttgaaagacagtatatgctttgaaattcttctgtgtatattctgtacaggcactagaaataagaatggaaatggaatggttcctttcacaataaattcttataacacacttacaaacgtttttcctgtcactataattttgaaattgtctggtttttaggtattaattttctgaaagagaagaactgcttccacatgggtacatagaaatattgcattgaattggaaatttagttgaaaaatattttagatgcttcatgatactgagtatatacacatgaaagagaattactatattcgttaaggattctatgttaaatgatcctgattattaaggtatatttgagtttcttccacacagtagtggaggaagcactatgtaagatattcagggaattctctggggcgtttttaatgtttctacattaaatactaatgaatcagtggaagactattgtaaccagagaaaggtaaaacaacttaaaattcaggttctctaggaataaaagttcgatattaaatagccaatggatgggctccacttattattggctactgtttctcagtcccaaagataccctactctacttctactgggaatgggactgtgtaatctgcacacctcctttgccaactggatccttgacagacactgccagtagactggaagaagaaaagggacttgctcatccttgtttatttcagcaactgctcgttaccctcagaagggcagcagaatatagagaacaaacgtatggataccaagctggaaaggaggggtaggatgcattgagacattgggatggacatacataaacgctaatgatactatgtacaacatagatcactaatgagaacctgccatatagaacagggaattctactcaatgctctctagagacttaaatgggaaggaaatccaaacaagagggggcatatatatatatggcatagctgattcactttgctgtacagcagaaactaacccaacaatgtaaaacaactataatccaataaatttttttttttttaagagaagggcagtagagtccagcctccagcttttttttatctaaactccgagtcatcatcaccaatccctctaagaagtttcaacattgttgggctagaactccccaccaaagtctgatatctagttctgtaaaatgctgaagaccagctgactagagcccccaatgaaacgtttgaattcctgctctatgaggcccctcttccaatgtcaaaacaccacaaagtacctatcctagctgaacaataccctctgtcagaagtctgagtccatttctgtgttttgttgttgtttagtcactaagctgtgtctgaccctttcgcgaccccatggacagtagcccacttcctccaaatgccacttttctctcaccatccccatatgtcccgtcagccttggaaggggtactgcttcctctacttcctttccctggatatattctttcaatttctttgttcactttttaattctctaatctgatatgaacggagaaggcaatggcaccccactccagtactcttgcctggaaaatcccatggacggaggagcctggtgggctgcagtccatggggtcgctaagagtcggacacaactgagcgacttccctttcactttcatgcattggagaaggcaatggcaccccactccagtactcttgcctggaaaatcccatggacggaggagcctggtaggctgcagtctacggggtcgctaagggtcggacacgactgagcgacttcactttcacttcactcaatctgatatgaaacacacacacaaatccttatcatttttcataataaactacagaaaattaagttcttattggctaattgatcatgggttaattttttttttcatacaaagttaagaaaaacccagtcagtaatcatagagcatattttgaagatataaggcataggacagtaccacaaatatttgagatgtattccagatttcatatattttacaggtgaaaaagtatattcacatactcaaattgttccaagcagacaagttttttaataataaatgcacacatctgtttttgaattaaaattaaaaatcacatcttgagttgcactagtaaatttccagtgctcaaaagtcacatttgcagacctagatcattagccttcttacttatattagactacaatgatataaggtaaagttaaggtaaggtgaagtcgctcagtcgtgtccgactctttgcaaccccacggactgtagcctgccatgggattttccaggcaagagtactggagtgggttgccatttccttctccagaagatcttcccgacccagggatcgaacccaggtctcccacattgtaggcagactctttaccatctgagctgtatgtggcagttgtatgatgccaaagatcagaatgcaaatgaagtaacactattcaatgatatttccattttccatctttgttctaattttacatgtgcccaaaagactggcagagctggggaacacagctctctcacgtcaatcccatcataataacagtgcaacacgagaaatattttggatggaaaatgaggctacagcagcacttgacttttttttttctttttgtttttgtttctgagctttggtacttactcatgaactttgcttcctgagtttacaccactctgcttcagcagttcctctgacatcaattctgtctctgcctctgaacacacttttatgtcttagctattcattgatctctcaggattcctcactctctattctctgtcccatggtctttgcttgattgcttccatatttacactcaccactgacactagtattgcctttacttgtaactgagaagacaaaattaatacttgtcagtaatcagttctgtttctgcttaagagggaaaatgttgcaagaggttgtagctcctaatttaacaataagaaaaaaatcataattaaaaaaaaatatgtttttctcatccaagagctagagtcacaatgaaaccagcaaactgattacggtgggtgataaaatgttgagaggagacaggatatgtgaactgtttcacccttggcagaataaaagtcattaaactgggcaagagggaaaccactgaaattttaataaattgattaagctacatgtgggctatggaacagtttaggagtcctgggaatcccaggcagagaaatacataaccgcttgccagtccttttctccaggactctcctggatgcctatggaaagactgggaagcctgcctgtgttctgaagatgaaggagatgcacctggagggcccactgtgctcaggggtgaaggtgttaactgactgtgttcaccccagatctttctttcatatgaagaaagctactgagaaatggaagatgctggtttataaaccaccttgggaactttcccccttgtaatctgaaactcacccccatagcagagggctgggacagccagaagcaagaggcagaccacctctgactggtaggtggagggtttaatactcaagggatctatatcgtggaggctggtcttgggggcttccaggtggcttagcattaaagaatccacctgcaatgcaagacctcaggagactcggtttgatccctgagtcaggaagatcccctggaggaggatatagcaacccacaccagtattcttatctggagaatcctatggacagagcatcctggcagtccagagggtagcaaagagtcagacaagactgaagcagcttagcatgcatgcatgtggtcttgtcttgggcagctgcaagatgagtacatctctgcatttcccaccagaatcttaaaagtttacagagaggcattaaaaaatttttttattggtatatagttaatttacaatgtagtattagtttcaggtgtatagcaaagtaaatcagttatatcagttatatactatatatatagtaatagtttagtctctaagtcacgtccaacacttgcgaccccacagactgtagcctatcaggctcctctgtccatgggattctccaggcaagaatactggagtgggttgccatttccttctccaggggatctttctgacccaggaatcaaacctgggtctcctgcattgcaggcagattctttactgactgagctacaagggaagataaaaaaaatacaatatttccaaccactgtacatactgtatgggaagtcgctcagttgtgtccaactctttgcaaccccatggactataaagtccatggaattctccaggccagaatactggagtgagtaaccttttccttcttcaggggttcttcccaactcagggatcgaacccaggtctttagcattggaggtggatcctttaccagctgagacacaagggaatcccatgtgtgtatatgtatgtgtgtctatgtatatgtttgtgttatatacacatacatatataaacacatagaaagatagtgaaatactgtgtgtatatatatatatatatacatacatatatatatatatatatatatatatattcactcttatagattcttttcccatataggttattacagagtattcagtagagctccctgtgctattcagttggtccttattggttatctatttcatatatggtagtgtaactggacaactgaattctgtcacatatgtttttcagatgttctcaatagcacctcactatctcaagcctttttgcatttctttttcttggggttggtcttgatcactgcctcctgtaccatgtcatgaacctccatccatagctcatcaggcattctgtctatcagatctaatccctggaatctatttctcacttccactgtataattgtaaaggacttgatttaggtcatacctgaatgatatagtggttttgcctacattcttcaatttaagtctgaatttggcaataagaagttcatgatctgagccacagtcagctcctggtcttgtttttgctgactgtatagagcttctccatctttggctgcaaagaatataatcagtctgattttggtactgatagtctggtgatgtccatgtgtagagtcttctcttgtgttgttggaagagggtgtttgctatgaccattgtgtcctctcagcaaaactctaagcctttgccctgcttcattctgtattccaaggccaaatttgcttgttactccaggtgtttcttgactttctacttttgcattccagtcccctataatgaaaaggacatcttttttgggtgttagttctagaaggtcttataggccttcatagaaccattcaacttcagctccttcagtattactggttggggcatagacttggattactgtgatattgaatagtttgccttggaaacgaacagagatcattctgttgtttttgagattgcatccaagtactgcctttcagactctttttttattatagtggctactccatttcttctaagggattcttgcccacagtagtagatataatggtcatctgagttaaattcacccattccagtccattttagttcactgattcctacaatgtcagtgttcactcttgccatctcctgtttgaccacttccaatttgccttgattcatggacctaacattccaggttcctatgcaatattactctttacaacatcggacattacttccatcatcagtcacatccacaactgagtctcttcattctttctagggttatttctccattcttctccactagcatattggacactgaccaacctggggagttcatcattcagtgacataccttttttccttttcatactgttcatggggttttctcaaggtaagaatactaaagtggtttgccattcccttctccagtggaccactttttctcagaactctctgccatgatccatccatcttggatggccctatatggcatagttcatagtttcattgcgttagacaaggctgtggtccatgtgatcaggttggttagttattgtggttttcattctgtctgtcctctgatggaaaaggataagaggctaatggaagcctcctgattggagagactgagggggaaactgggtcttgtactgatgggtgggaccatgctcagtaaatctttaagccaattttctgttgaagggtggggctgtgtttcctccctgtggcttggacctgaggccaaactatggtggaggtaatgaaaagcctgctagctctcttttgtatttgctcaattctttgttctgtgagcaggccaggctgtgcattagatttttaggttgcctttcttgggaactggaactgcctttctgcagttgtggttaggcctatattctataggttttttctttttttctctcctggttatgttgccctctgagattccaaaactccccacagactcacctgtgagagggtttcctactgtgtggaaacttctcctccttcacgaccccctccccatgacatgtctctgtccctaactctttggtctttctttttgtcttctatattttgtcctacctcctttcgaagagaatgggctgcctttctggatgcctggtgttctctgccagtgttcagaagttgttttgtggaagttgttcagcattcaaatgagcattacaaatagctgagaaaagaagagaaacaaaaggcaaaggagaaaaggaaagatatacccatttgaaagcagagttccaaagaatagcaaggagagataagaaagtcttcctcactgattaatgcaaggaaataaagcaaagcaatacaatgagaaagactagagatcttttcaagaaaattagagataccaagggaatatttcactcaaagatgagcacaataaaggacagaagggtatggacctaacagaagcagaagatattaagaagaggtggcaagaatacacagaagaactataaaaaagatcttcatgacccagataacatgatggtgtgatcattcacctaaagccagacatcttggaatgcgaagtcaagtggtccttaggaatcatcactatgaacaaagctagtggagatgatggaattccagttgagctattttaaatcctaaaagatgatgctgtgaaagtgctgtactcaagatgccaagaaatctggaaaagtcaacagtggccatagaactggaaaaggtcagttttcattccaatcccaaagaaaggcaatgccaaagaatgttcaaactactgcacaattgtactcatctcacacactagcaaagtaatgctcaagattctccaagctgggcttcaacagtatgtatatcatgaacttccagatgttcaagttggatttagaaaaggcagaggaaccagagatcaaattgccaacatctgctggatcttcaaaaaagcaagagagttccagaaaaacatctacttctgctttattgactatgccaaagcctttgactgtgtggatcacaacaaactggaaaattcttaaagaaatgagaatacctgaccacctgacctgtctcttgaggaatctgtatgcaggccaagaagcagctggacatggaacaacagactgtttccaaatagggaaaggagtacatcaagactatagattgtcaccctgcttatttaacttatatgcagagtacattatgagaattgccagactggatgaagtataaactggaatcaagattgccaggaaaaatatcaataatctcagatatgcaggtgacaccacccttacggcagaaagcaaagaactaaagagcctctttatgaaagaggagagtgaaaaagttggcttaaaattcaattttcagaaaactaagatcaatcacagcttccaaccccatcatttcatggcaaatagatggggaaacaatggaaacagtaaaagactttattttggggggctccaaaattactgcaggtggtgagtatagccatgaaattaaaagacgtttgctccttggaagaatagctatgatcaacctagacagcatattaaaaagtagagacattgctttaccaacaaatgtccatctagtcaaagctatgatttttccagtagtcatgtgtggatgtgagagatggatgagaaagaaagctgagcactgaagaatagatgattttgaactgtgatgtttgagaagactcttgagagtcccatggactgcatgaagatccaaccagtccatcctaaaggaaattagtcctgaatatacattggaaagactgatgctgaagctaaaactccaatactttggccacctgatgtgaagaactgactcatttgaaaagaccctgatgctggaaaagactgaaggcaggaggagaaggggctgactgaggatgatggttagatggcatcactgactcaatggacatgagcttgtgtaaactctgggagttggtgatggacagggaggcctggtgtgctgcagtccatggggtcgcaaagagtcggacaaactaagcgactgaactaactatctcaagcctaggtcttgggcatagctcccactgtcaatgaatggtaggcagactgtccattcctaatatgggcaagtagattaggagcttctgattgcctggtttcagctctaaagaagaacacaatagtcacatcttctcgatgacctccttcagcagggggaagaatttcacctccactcctgtcatcagacaaaaattaactgcctgtgggagagagctaagaattctgtcaccagactccatgctataactgatattagcacacccacacaacgcaaatctggaaacttgttctgatttctcttcccccctgaaataaaaggcactttgctgcttccgtttttaaggaaatgagactttttttagaaacgatttttcttttggtaaatatttctctctctccagataaactcctctgtttaaggatacagctatagaaaactcttttcattactgccatttttgacattgtgagtctagtaacatgtctttcctgagattccaacagattctcatcctcactgctatttctagactattgtgacatcttgtgcttgacaatagttatcttgggccttgttgacttcaggatggaaataacatttgtatcatacatccttggttttctctgttctcagcgttgccaatcctacatgcaaaaactttgtttttatatttccagaaatcttcatatcatctaaatcaccttaatgaaacaaatgcatatggtaaaaagacattttatgaataatttgacaaatgaggttctaaatgtagcatttcttatgaatagtttgcacattagttatcattctttgattaattttttctttgggaaaaatatgggttaatctcctctagatgactatcttttagaattgaaaccatccatcttttttctttattttttaaagcatttcaatgtgcttcatttcaatgcttttttcccccttatttccttagcaatatttcacttaaattataaattcaggcatgtatctcttactgtttgttaaaggaaagaaaagccattccaaatagatcttttttcttaatttttctcctcaaaaaaatttgtcatttcttttttagtttgttaccacatttaaaaaacattgacataatttgacattttcaattccttttctgttttcattctactacagttaagactatcagactcgactcaccacttattatgattaaaactatgctcccttaacccaaattcgtatgttaaagtttgcatctatagaaccttcagttcagttcagttcagttcagtcgctcagtcgtgtctgactctttgcaaccccatggactgcagcacgcccggcttccctgtccatcaccaactcccagagcttgctcaaactcatgtccatcaagtcgctgatgccatccagccatctcaccctctgttgtcccctctcctcctgccttcagtctttcccaggatcagggtcttttcgaatgtgtcatttcttcacatcaggtggtcaaagtattgggagtttcagcttcagcatcaatccttacaaggaatatacaggactgatttcatttaggatggactagtttgatctcctttcagtccaagggactctcaagagtcttctccaacaccacagttcaaaagcatcaattcttcagcactcagctttcttcacagtccaactcttacatccatacctgactactggaaaaaccatagctttaactagacatacctttgttggtaaagcaatgcctctgctttttaaaatgctgtctaggttggtcataacttttcttccaaggagtaagcgtcttttaatttcatggctgaactcaccacctgcagtgattttggagcccaaaaaattagtctctcactgtttccattgtttcctcacctatttgcaatgaagtgatgggaccagatgccatgatcttagttttctgaacattgagttttaagccaactttctcactctcttctttcactttcatccagaggctctttagttcttctttgctttctgtcataacagtggcatcatctgcctatccgaggttatttttgatttctcctggcaatcttgattccagcttgtgcttcatcctgcccagtgtttctcatggtatactctgcatataagttaaataagcatggtgacaatatacgtgacatactcctttcctatttggaaccaatctgttgttccatgtccagttctaactcttgcttcttgatctgcatgcagatttctcaggaggcaggtcaggtggtctggtgttcccatctctttatgaattttccagtttgttgtgatctacacagttaaaggctttggcatagtcaataaagcagaaatagatgtttttctggaactctcttgctttttctatgatccaaaagatgttggcaatttgatctctacttcctctgccttttctaaatccagcttggacatctggaaatttaagattcaggttctgttgaagcttggcttggagaattttgagtattactttgctagcatgtgagatgagtgcaattgtgcggtagtttgggcattcttcggcagaatcatagaatgtaactatatagagatagggtctttgaagaagtaattaagttaaaatgaggccattagagtggtcttttagccaatctgacttgtgcccatataagaagaggaaattaggacatggacatgtacagagagaagaccctatggaaatatgagagaagacagccatatacaagccaaggagacagaaactaaaccttccagtacagtaatctcaaacttctggcctccagaattgtgagaaaattagaatgtaagcatcttaatgtcaaagaccttgtctattttgtaattgtgtgccagcaacttgaatatgcatttattaaaaatataataataactattaaagctacaatttcagattgctaccaatattagcagaatttaatggctgaggaaagtaagacttagaggagaataaatagcttgccagagatgacgtagctagatgtagcagccttaggattcaaaatgtcacatacctgatgctaaaatctgtgaccttaatcacatgatttactgcctccgagtctcctgatttctgaccttttgataaattttgcagccctgttcatcccttgaatctgacatttggtgcaattttagcaagcctaagctttggatatctatatgattatggtgagtaccttcctatagtcacactacttctgccttctttggttaaatcttccctgtcatgttagatattccgttcttaccctgccccacaagaccttgaaacactcttccctttactttgcaaaaaagtgtgtccttgggtaagttacactctctgggcctcaatttcttaacactctctttcagatttaaaagttcagcaataatagtcacaactcatgtttctttattgtctttcatttgggaatcttaagttatcatgattttaacttccgcaatttaatttccctactaccaagacatactaatcctacaaagagttgggagattccccacattgtaggagggccattctttacgggtttagttgtagcacatggcctcttcatcaattaatcaagcacaacaatgctttcataagtatttcatgaatgtgctagggtctttgttaggtgtctggtgtgcgttgagatgctacagatggtcagtgcatagatgtgaccgtgtgtgtgcatgctcagtcacttcagtcatgtccaactctttgcaatcccatggattgtagcctgccaggctcctctgtgcatggaattctccaggcaagaagactgaaatcccctaccatgccctcctccagggaatcttcctgaaccaggaattgaacccacgtctcctgcattgcaggtggattctttaccactgagtcactggggaagcccagatgtggccttaaagttcaaaattgagtgggagatacagacaaacctatgatatgtttagtcaaagcaactgatatcagagttaaatccaatgataacagtaacaagaaaatcagttgtggaagtatggataagcatgactagaatggtataactgctatttgttctagggatttaagtccagggagcatctttaaagctggtagaatccaaaagtatgaaaagaaaccaagaaacagggaggtccttctctaccatctgatctgattcctagaggagaatttcagacactcctctggtttctgagttcacctccttccctaaccctgggatttctgtctttctaaccaagcttcagccttgcaatcaccagcaggcaggaaatctgctgttcattcctgaagcttcagggacctgccttctgcttggactatttctgagctaccatgttggcaaggcatttggtttgcaggcatgtgggtcagggcagccttcttagcaagatgacccaggaggggcttgaggaatagaatggaaaggaagcctcatcagcgatcacagccaagaagtcactccaaaagatatagttaatctgtagctgaggagtgaggcaggcttggcatccttggaatgttttgtttcaggttagtacctagctgggattccctttccctcaagagacagactacaggagaactgaggaagtgttgttgatcctagagagcccttgaaaatagagtaaagaacaaaagtagtacatatgcttcataaaagtgctttatactctactctctttccaagaactagttgtcatatgtgtgtgctcagttgcttgagttgtgttggactctctgcgaccccatggactgtagcccactaggcttctctgcccatgggatgctccaggaaagaatactggagtgaggtgctatgctctcccttcaggggatcttcccggcccagggactgaacccgagtctcctgtgtctcttgcactgcaggcagattcctcaccgctgaggcaccagggaagccctagttcttgcataatgcattagaaactgtaatgctactttcctatgagaagaggaataataccacactgtgagtgaggaaacagaggtggggagagcttcagccaccgtcccagggtcatacttgtatctcaaagcagagccaggatgcactcacaggccttctgctcccaggtctcgtggtccttctgctagaggacttcccatccacgcttagcatctaggaactatgctatgagattctagaggctgggcgtcccttcctgccttctccaacttggccacatttacttcctgagtcagtgcctgctgcctgctcagcaaagatgagccctacccacatcagaggagagtttaagatgaatgcataaagaatatgtgtttttatatatatgtatttgtatgaatatatatatatatgagacatatgacatataaaatgacatcttagatgtgtggaatatcatcaaaatagattacatgatatgccacagggtatgtccaagggatgtttgaataatttggagtctacattggaaatctttgcaaagttaaggataagttattctattttgggcaaaagctaatgtggctgcagacttctgtactatatatgtgtgtgtgcatgtgtgtgtgtagtatgggtttccctggtggctcagtggtaaagaatcacctgctattgcaagagacacaggttcgatccctgggttgggaagatcccctggagaaggaaatgcaacccactccagtattcttaatataatatatatatgtaataataatattatatatacatattaatatattatatcacacacaaagcagagagaggacttattgtttgttgaattaacagctaaatgaatgcatgcatgcagagatgtgcttgtttttgtccacttgagccctcctaagcaacgaggtattaaggaaaaggaagtatttctaaagctctctctctgtttctctgacagttatccatagagtaccctcaggcatcaatgttcatcttccttccggagaaacttatgggcataaacattccagattccatagctaaaaacatcagcttggcttgatgggtgctgtagtcttaggttgctttaaagtttcaaatgtctctgtccttagcatacccaaaatctgatcttcttagagaaaaagaataaacaacattccagactattcgcttttttaagggaatcactcttcaatcctttcttcttttgagaaagtcttttacatatctgagaacagcgtagagtcccttgtcagaccttaatctttatagcagagaaaaataatttatactataaactggacttatctgtttgccagttacctattaatcataactaaaagcatgattacaatgtcactaagaaacccgctaaagccctgtaattgtcctaatgcattctactgtcatctcatcaaaagcacattatccagaggactgtaaagtcaagaaagaaccaaggagtttgagatcagtccattcttttgacaaagaagaatactgaagaacaaagagttaaagactctgaagctataaacattgaatatgaaaaattatataaaaggtcatatattaacttctgaataccaagaaacatgccattaatatttaaatgacaattaacaactgcagaaatatttgtaagcttaatgacaaaaaagaccaactaagaaattatgaggagcctgtacaattcaacaataaaatgacaagttaacctaatataacgtagcaaagaatgtaaatagacacacataggaaacagaaaatacagataatatttttccacttgagtcaaaagaatattaactttgagaatagctagtgcaaatgagagtataggttggccaacacactttatttgtggaaatgtgtaaatagctagcacaaccagtttggaatggcaatttgaaaatattgacaaattttaaatgtatttaacttctcaccttcaattccaatatgaaaaatctattctttagctatactcataagtgtccaaaatcatatatacatgatttaaatttgtataaataaatactatattaaataatatatgtatattattttaccaaaaaaagatagaaaaaagaaacaatcaaaatccctgttaataagtgattgttgttgtgtttagtcactaagtcatgtctgactcatttgcaacctcatgggctgtagcccgccaggattctctctccagaagatttcccaggaattcccaggcaagagtattggagtgggttgccttttccttctccaggggatcttcctgaccccgggattgaatctgattactaaagaatgttgcaaccaatataatgaaattctattttttaaaaaaatatttgattgaatcacttaaacagtgactagattaacactgcatgataataacatcttttaaaatttttatttatttattttaattggaggcttaattactttacaatattgtagtggtttttgccatacattgacatgaatcagccatgacatcttaatatcataatgaaattagtgctgaccttgtggagtccctagaatctgtcttaaagtgccattttgttccaggatatgaaggagttaatgaaggataaattttgaaaagtgaattttatttataatacctgtttgtaaaataagttataaaattttaaaaatcttaaaatgatctcaattttgacttggcttacttattgacagacttatttacttatttatttactcactggcttactgctttacaacctttgcctacaatatatatgatttttaaaaaacctttctatatagcagatattttgtatctaactagaagaatttcctgagatttatgtagcctttactataatcttgactgtttaagagagaaaaaaagcaaatgtttcttgttcctcacttataaaagaaggaagattctttacaatcctgttaccatctttttaaattttttaaatgttttattgacactttgattaaaaatgtaatgaaatattatttctcagccatttataatcctacttactcatgcccacaattcctctttcgatttttgccttgctcaaatcagatgctccgtatagaaactgtgaaataaatcttgtagaatatcttttaaattaccttcgtgatttcttagagggttctcagaaaataacaaagttttgttgcttcaccctacaagaagagatgctataaatatttaggttcattcattagttacgtttgatgaattgcatgagaaacattctcaaataagaagctactcaggctgctgctgctgctaagtcgcttcagtcatgtccgactctgcgaccccatagacggcagcccatcaggctcctccatccctgggattctccaggcaagaacactggagtgggctgccatttccttctccaatgcatgcatgcatgctaagttgcttcagtcgtgtctgactctatgcaaccctatggacagcagcccaccagtctcctctgtccacaggattctctaggcaatactggagtgggttgctatttccttctccggttcaggctacctaggttaaattggtataagtaaatgccattaactttttcaaacttctgggctttatgacagtttcccagagattcatctatgcctcactgtccatgtcacatttctgattatcagagtcttgatggtgtattgcttgatactaggccacaacagtatattgcaatcagccataatttcagttatttaaagtgctaagttggctacaaccatacttacctctttttaaagactttttttgagagagaagttttagccttacaacaaaattaaaggaagacagtgatttccagatacccctacctccaccacacacacataacctccccctcatcaacatcccccaccagagtggtgtatttgctataactgatgaacctacaaagccatgccacaggcaagcagagtccataggtgaccttagggttcactcttggccttgtacgttctatgggtttggacaaacgtacaatgatgtaaccatcattatgctatcatacaaattttactgccctacaaatcctctgtgttctacttgtgttcattcctgctgctcttaaccctgacaacaactgatcatttcataatctccactgtattgcttttttgagaatgttctacagctggactcatacaatacatagcattttcaggttggcttcttttgcttagtaatatgcatttaggttgcttcatgtcttttcatgccttgatagctcatttctttttagcactgaataatatattattgtctgcatttatttatccattcacctattgaaagacattctgttggcctccaagtttggaagttggaagttgctatacatatctatgttcaggattttatgtacacataggttttcaaccccttcatgtaaataccaagaagcatgtttattcgatcctatggtaagagtatttttagtttatgagaagctgccaaaccgtcttccaaagtggcttgcataattttgcatttccaccagcaacgactgagagttctcacagctccatatcctcaccagcatttggtattatcagacgctcccacttcttataagtgtatagtactctctgtgttataatttgcatttctccaataacatataacatggaacacttttttatgtgtttgtatgccattgtatatcttctttggtgaagtggctgctaagactttgacccattttttacttgggaccattttcttattgtggagtcttaagaattctttgtgcattttatataactgttttttcccatatgtgttttacaaatgttttcttccaatctgtggcttacagtgaaattctatgaagcctttaaaaggaaagagataaatctgtatgtactgatatagaaatatacctgatacattattaaatagaaggaaaagtacagaatcaagacaactctgtgcatataaaacatatatttttctttctggaaataccaaaggaaaatggtgatgtgaaacttctattattttgttaatttgtttctttttctacttttaaaaattttctaaacatttaaaatttatttattctacttagatggtagtatagactttaggcaattttcttcaatttgcttattcctcaggttgtatgtgtgatttaatttaaaattaaggaaaaaaaaacatattttaatagaattttaaaggaagtccttcaaagaaatcaaaacatgccagtttccccaaatttgaccctagctttctcaatttttgctcatggaaaactattctccagccagcctggccaaatacctcagtttgctttcctctatcttatatttatctgttttgtttccttagtatgacatacacttccttaccttcctggcatgtctctaatttttcctcatctttaagaatcaatctaagcatagtctgatttcggtgctgaccatctggtcatgtccatgtataaggtcttttcttgtgttgttggaagagggtgtttgctatgaccagtgcattttcttggcaaaactctattagcttttgccctgcttcactccgtattccaaggccaaatttgcctgttactccaggtgtttcttgacttcttacttttgcattccagtcccctataatgaaaagggtatctttttgagtgttagttctaaaaggtcttgtaggtcttcatagaaccgttcaacttcagcttcttcagcgttactggttggggcatagacttggattactgtgatattgaatggtttgccttgaaaacgagatcatactgtcgtttttgagactgcatccaagtactgcattttggactcttttgttgaccatgatggctactccatttcttctgagggactcctgcctgcagtagtaggtataatggtcatctgagttaaattcacccattccagtccattttagttcgctgattcctacaatgtcaacgttcactcttgccatctcctgtttggccacttccaatttgccttgattcatgggcctgacattccaggttcctatgcaatattgctgtttatagcatcagacattgcttctatcaccagtcacatccacaactggtattgtttttgctttggcttcatcccttcattccttctggagttatttttccactgatctccagtagcatattgggcacctactgacctggggagttcctcgttcagtatcctatcattttgccttttcatactgttcatggggttctcaaggcaagaatccttaagtggtttgccaatgccttctccagtggaccacagtctgtcagacctctccaccatgcccatccatcttgggtggcctcacaaggcatggcttagtttcactgagttagacaaggttgtggtcctagtgtgattagatggactagttttctgtgatgatggttttagtgcgtctgccctcttgcaacatctaccatcttacttgggtttctcttacccaagtaagagaaaagctctatacagtcaacaaaaacaataccaggagcttactgtggctcagatcatgaactccttattgccaaattcagacttaaattgaagaaagtagggaaaaccaccaaaccactcaggtatgacctaaatcaaaacccttatgattatacagtggaagtgagaaatagatttaagggactagatttgatagatagagtgcctgatgaactatggaatgaggtttgtgacattgtacaggagacagggatcaagaccatccccatggaaaagaaatgcagaaaagcaaaatggctgtctgaggaggccttgcaaatagctgtgaaaagaagagaagcaaaaagcaaaggagaaaaggaaagatacaagcatctgaatgcagagttccaaagaatagcaagaagagataagaaagccttcttcagcgatcaatgcaaagaaatagagggaaacaacagaatgggaaagactagagatctcttcaagaaaattagagataccaagggaatgtttcatgcaaagatgggcttgataaaggacagaaatgatatggacctaacagaagcaaaacatattaagaagaggtggcaagaatacacagaagaactatacaaaaaagatcttcacaaccaagataatcacgatggtgtgatcactcatctagagccagacatcctggaatgtgaagtcaagtgggccttagaaagcatcattatgaacaaagctagtggaggtgatggaattccagttgcgctatttcaaatcctgaaagatgatgctgtgaaagtgctgcactcaatatgccagcaaatttggaaaagtcaacagtggccacaggactggaaaaggtcagttttcattgcaatcccaaagaaaggcaatgccaaagaatgctcaactaccgcacaattgcactcatctcacaggctagtaaagtaatgctcaaaattctccaagccaggcttcagcaatacgtgaaccgtgaactccctgatgttcaagctggatttagaaaagatagaggaaccagagatcacattgccaacatctgctggatcatggaaaaagcaagagagttccagaaaaacatctatttctgctttattgactatgccaaaacctttgactgtgtggatcacaataaactatggaaaattctgaaagagatgggaataccagacccccgacctgcctcttgagaatcctatatgcaggtcaggaagcaacagttagaactggacatggaacaacagactggttccaaataggaaatggagtacgtcaaggctgtaaattgtacccctgcttatttaacttatatgcagagtatatcatgagacatgctggctggaagaagcacaagttggaatcaagattgccgggagaaatatcaatcacctcagatatgcagatgacaccacccttatggcagaaagtgaagaggaactaaaaagcctcttgatgaaagtgaaagaggagagtgaaaaatttggcttaaagctcaacattcagaaaatgaagatcatggcatctggtcccatcacttcatgggaaatagatggggaaacagtggaaacagtgtcaagactttattttttggggctccaaaatcactgcagatggtgactgcagccatgaaattaaaagatgcttactccttggaagaaaagttatgaccaacctagatagcatattcaaaagcagagacattactttgcccacaaaggtccgtctagtcaaggctatggtttttccagtggtcatgtatggatgtgagagttggactgtgaagaaaggtgagcgccgaagaattgatgctattgaactgtggagttggagaagactcttgagagtcccatggactgcaaggagatccaaccagtccattctgaaagagatcagccctccgatttctttggagggactgatgctgaagctgaaatttcagtactttggccaccacatgtgaaaagttgactcattggaaaagactctgatgctgggagggattggggcaggaggagaaggggatgaccgaggatgagatggctggatggcatcatggactcgatggacatgagtctgagtgaactccgggtgttggtgatggacagtgaggcctggcgtgctgcgattcatgggatcgcaaagagtcagacatgactgagtgactgaactgaactgaagcatagtcttcttcagaaagcatttaattttcaggacaaagttaagttcttccttctctggattcacatacatcttacatttttttcatgggctttccaggcaattcagccataaagaatttgcttgcaatgcgggagatgcaggtgaaaatgttatattgctatgtatttttgtctcttgtctttttggaggattttaaagaaggttgagagccaaagaactgatgctttcaactgtggtacaggagaatattcttgagagtctcttggactgcaaggagatcaaaccagtcaatcttaaaaaaatcattgctgagtattcattgaaaggacttatgctgaagttgaagctccaatattttggccacctgatgcaaagagtcaactcattggaaaagatctgatgatgggaatgattgaggtcaggaggagaagggggcgacagaggatgagacagttggatagcaccactgactcaatgatatgagttcgagtaaactccgggagatagtgaaggacaagaaagcctggcatgctgcagtccatggagttgaaaggagtttgaacaactggactgctaaacaacatcaaagcatctggaggtcaggcctttttattcataccaatagataaaaaggcacagttgctggcatagtatctagaatatagtaaaaacttaaaatgcttgatgaatgaatgcatttttaaggaaaatgatttgtccttaatctaagagtagtcaagtcaaatctagtcaaggctctggtttttccagtagtcatgtatggaagtgacagttggactataaagaaagctgagtgctgaagaattgatgcttttgaattgtgatattggagaagacttttgagagtcccttcgactgcaaggagttccaaccagtccatcctaaaggaaatcagtcctgaatattcattggaaagactgatgttgaagatgaaactccaatactttggccacatgatgtgaagaattgactcattggaaaagaccccgatgctgggaaagattgaaggcaggaggagaaggggataatagaggatgagatggttggatggcatccccgactcgatggacatgaatttgagtaaactccaggagttggtgatggacagggagtcttggcctgctgcagtccatggtgttgctgagtcggacatgaatgagcgattgaactgaactgaacttaagagtagtcaaaaggaaaactcatctttggactttccaagaattctccaatgtggttaagaacatggctctttagtaagactgcattgtttaactctcagttctgctctcttatcagctatatatcttgggacaattacagaacttctccaactttcttttttttaatataaagtaaagataataatagaacattgcagacttgttgtggattaaacgaaataaaacttgtaaagagtttagaatcatgtctgcatgtgagcatgctcagtcggaagtcatgtacaattcttctgcaattccatggactgtagcccaccaggcccttctgtccatggaatttttcagataagaatactggagtgggttgccatttcctcctccaggggatcttcctgatccaggaatcaaacctgcgtctcccaagtctcatgcataggcaggcagattctttttgatggagccacctcggaacagtgcctagcacatagtaaaaactaaatgcatattatccttcagaattactgtattagatccattctcttatttttttagaaaaaatattcattacttttaaaatttttggctgagctggatctttgttgcttcttgtggactttctctagtttcagcaagaagggattatgctctcattgctgtgcatggacttctcattgcaggggagcacaggctctagcatgcaagggcttcagtagttatagctcaagggctcaccagttgtggctcaccagcttaactgccctgtggcatgtgggatcttctctgactggagatgtgacaactacattggcaggtggattcttaaacactggaccactacaggaatctcattctctgctttgcttttcttttctctctttctctctctctctctctctcttttttttttttttttaacttaaagtggttgaaagaattggaattactctatgtcttgagagtcccttgggctgcaaggagatccaaccagtccaacctaagggaagtcagtcctgaatattcattggaaggactgatattgaagctgaaactccaatactttggccacctgatctgaagaactgactcattggaaaagaccctgatgctgggaaagattgaaggcagggaagaaggggacgacagaggatgagatggttggatggcaccactgactcaatggacttgcgtttgagtaagctgcgggaattagtgatggacaaggaggtcttgcgtgctgcagtccatggggttgcaaagagtcggacgtgactgagcaactgaactgaactgaactgatgtctttatttgcccaacaatggtacatattggtggtaagccaatttgttcctggaatcttctcactttctcaacacatgtgccttgaagcatatgtccttcttttggaccctaatcttccattttatgcttcagttcatgtttctagcttgtgcctggtttcaatgaggtaagagttatttttcggattctgaatatccttcttgtcttgtaggcctgctgctcttcagagctccattcatgtttcctcctttttatgtagtttttcaagaatggctgtaatgatcgcatgaattataatatactacagttgtttgcttgtttgtatttcctactagactaagctttgctaaaccagtgaccttatctcattattctgtttagccaatgccaagaacaaggtctaatggtctagaaacatgctaaatcttgaagcaagtttatagctttgaatgatctgtgctttaccagacttacaaaaaatattttttagctaaagtgacttctctatagtttcggcaccccactccagtactcttgcctggaaaatcccacggacggaggagcctggaaggctgcagtccatggggtcgctgggggtcgggcacgactgagcgacttcactttcacttttcactttcatgcattggagaaggaaatggcaacccactccagtgttcttgcctggagaatcccagggacgggggagactggtgggctgccatctatggggtcgcacagagtcggacatgactgaagtgtcttagcatagtttcctttgtagctatgatgaaagtaatttgctaagatttttttcaattatttatttattttatgcaaattaattacagatcttctaattacaaagtagacaaatgttgtgggggaaaaaaaacaacaacagatataattcaagatgtgggtcctgccatagtagctcagagattagtggtagagacaaagcacaatcaataagaaaagcacacaatcaatacgaatgatacaaacgatgtgttgaaaataagaagtagagaaagtgatgtgagttaacagataggagcaggattatgctggccattattttaacaaccagctctctcagagtgaaagccttgatttgtagcatttgccagtttcctgatgtaaatactcctaccaatactggattttagctacgcttgagatcaccaaatgcaaaattgtgaaaatatgtacataattcaaccttgctagtgatttggggctggctccaaaatgcctttggatgggagaaatggttttagacagtcatggtctggtcattcatcatggaagagctacagattgaaaatagtcttgatgattgtatagaaattagattagtcatggaaaatacattccagatttggagactggtaaaagcaatgcatagcagcagtaatgagtgtggaacattcaggcaaatatactcagcacacagtaggtattcaacaaatatgtttgtaaataattgaacagtagtaaataaaccatctgattggaaaatgcatctctgtacgctgagaactaagaggacagctcagatgttgcagcaattcacaggtctctttcttcataaagatgcttttcagagatgattggatgacatcactgattcaatggacataagtttgagcaaattgttagatggggaaggacagggaagcctggcatgctgcagtccatggggtcacaaagagttggacacagctgagcagccataagatagtattaacaaataattctaagaaagaagaaaattttagttttcaaaggtgagagaggcttctaaacgttgtatatcttcataatagctttacttccattaaaaatgcctccaaatgttgaattaaattacagcattttctataaatatagatgaaggagggctagataaagatcaaccattttctctcacctggcttataaatatggaatttggtggttggcaggagtcaagaaatgttttttgtaaaggaccagaaactagatgttttctactttgtgggccatatggttttgtttcaactctgccattttaccatgaaaacagccatagacaatacgtagatgaatgattgtggttgtgttccaattgcatcttatttacaagtaaggtaagggacagatatggcctaaaagccatagtttgcatgtttcttgcctggagcatcaagagatctaggaaatttaggtttctttaaagttcatgggatggcaccaaagatcaaaaaaatgcccaaaattcacaaagataatatgacctaaaaatgactcaataaacaggatgagatggtgggaggcatcattgactcaatggacatgagtttgagcaaactaccggagacagtgaaggacaaggaagcctggcatgctgcagcccatcaggtcgcaaagagtcacacaagactgagtgactgaacaacagcagcaaagagagtttaatccattgtggtaggatattttcccaggactcttccttctgctttgatgtctaggtttggtggttttgatgttatttgctatcataattttggtacctacatatgttctcaaaaactgatctctgaataaaacttgatatgggatattacttaattcttataatattaaagttgccaagaaagcaataaatctgcttaataatcttccactcacttctttgataccatatccatgttcttgggaacatgagggaggtggagatggtgacaacttcttcaaccagtcatccattgatggatccttatgttgtgtccacatcctggttacggtaaataatgccgctatgaaggtaggagtgcccttttcgagttaagtattttgttttctttggatacattcccagaattgggactgctggatcatatgccggttgtatttttaactttttgaggatcctccctagtattttccataatggctatatcagtttacaaatttcaccaacactgcacagggattcccctttctccacatccaggccaacgtctatctctcgtctttttgttgatggtcattctaacaagcaagaagtactgtttcattttggttttaattttgcatttttctaatgactagtgatgctgagtgtctttttatggacctgttggctttttgtacatcttcttgacatccactacatttaaaaccaataagcacataatttatgaagtgccaaccaacctgtcaacaaacgcatgatgaagaaggaagatggggtcattggcagatcctggtacctgggacatagttccgttcatgtagatgtgcaaggcattgtgcatactgctttgagaggtatctgctatcccagtaagcggactagcaaatcctgttggcaaaaagaaaattggaaaaaaaaaaaaagtagtttgttttaacgattgaaaatctaagtgagtttctcatttggtttacaactgcgcttgaaaaataattgcctgattcaaaacaacaaagtcaatcataaaatgcattctgtattgggactgttcatattctagatacccagtgagcatttaataaatctttgtagagttgaatggtgttaatctggtcacaatggactgattagccagatggaattggctaagccagtctgtgttccatcctgttgcttctgcctactattcctcctttagatcctaaaaagtaataagacctttttgcaataatcagcatagtcactctcacttcattctgtaccacgacttaaaaacagctgtttccagctgttatgtgtcctcttgctttccagttctggtggttactgttaatttttatttctgattccagagaaaaattaaaacttgtgaccactgacataacaattcatctttgacagtctggaggacttcgggtaatgtgtttcattttgcaaaatatttcaaagttaattaggactccattaaatggctctattcattgcaccaggaataataattatgataagagttatttttttctgtatgttaattgacctaaatgctttctgtgacataagtccttcagtctttgcaacagctctactgattagaaatcatccccactggaaagaagagaaaaatgaagttcagaaaagtcctgagttttccaagcttgcacaggtagtagcagagtcagtattttaacccatatcagttagacggcaacatctgagttcttgatattccgtgttctctcccatacattaccagggaataggtgaagtatgatatcatttcagtgtccattcagggaaaacacaaaagaaaagtagaactcagatttaaaatcaaacaaagtgggaggaacagagttaaactgtaaatcagaaccaagctaaaggaaaatgccaaggacatattgaatttcaaaatttagcattatcaggaaaacagaaactgtgacgttataattttatttttaaaggtaggatagaaacagtgcagacaataggaggcagaggggaactagtttcctctcaaacaattaggattattttgttgtcagctccatttttaaagtgcagctcttgacttttgagttcagtgctttgcgttctcctgccgctgtggctgacagtatctctgcctcctcagctgatgtttttatctcctccttttcagttttacactcattctcagagacaatatcaagcccagctacctccggaagcttagcccaagaccacacacttctctctcccctctgacatcgcttgtgtatgacaacttttgtgattgtgtatgtgtgtgtgcgcttagttgctcagtcatgtctgactctttgtgacccatggactgtagcccaccaggctcctctgtccatgggattttccaggaaagaacactggaatgctttgccgtttcttctccagggaatcttcctgagccagggatcaaatccacatttcttgcttctcctgcattggcaggcggattctttaccacgagtgccacctgagaagcccaagactgtatgtacatggttcttaatatgtgcagggatttttctaaaagcttaacatgattattttcatgtaaccttcagaatgattctacaaattagatatcttcataatctctgttatgtagatttggataaagcagtttagagagattaagcaaactgtctaagattaaaaagcaaataacagaagctaaggttgggaccacaaacctgttttattccagaagttaagctcttaaatgcattggtttgttgcttttcctattagtaataagtcatatatcatggggggaatttctgtagagcaatggtctttaagcttttatctttgagtagaacaaaatgaaagctttaaaaccatcttttatgtatgctctcacatattttaagtagtttctaaattgctttaattataattgcaaatagttttagaggaaaaaattcaggggtagatattgcaaatagtataaattttaaaataaaaatttttaatcgccttataaaaaatgtttccagtgtaatgatttgatatttgccatcatccatatcaaaagtacctagataaactcttctattatagtctgaaattttataggattttctttttttcactagatctcatgttcttgttctgttttcccacaggagtgtgccaaaatgttatatattatgcttgaaatattttttaaaaattcatcagcctatcatacttttttgaaacaaaactaggtataagagttaaaattaccttttaaaaacttcatgtgacaatataatctagattgtcattaaaaattttagtaatacatattttattagaatgatgtaagactaaatattttataaataagttattaaaagtaaagttttattgaaaattcatttattaacaatatttatgaaagactgctatttaaaagggattctctggtggctcagacagtacagaatcttcccacagtgcaggagatcaggctcagtccctgggttgggaagatcctctggaaaagggatggctacccactccagtattcttgcctggagaatcccatggacagaggagcctggtggggtacagtccatggggttgtaaagagtcagacacaactgagtgactaacatccattagttaaaaattattgcagatatctacaataccctgcaatagtcgttgctagaaagaataaggctcagcatattttcaattctaaattaaaaaaaaaaatcatcagtcctgaaaactttattctcataagaaactagttggtaataaaaagatttttataggagtttcacttaattacttaaagtcttttttaagtatatgtcaaaaatgacatagctgattcagcatcaaaataatctaatccatcagtgacaactcaaacaaaaattctttgatgaaagtagctataagtgcttttatttataaagcacttaactttcaaggtactcgctactttttgttagagccatttattccagcaacactggcaccaatattctgagttctttgctggtttagtacctcgtatgattttaccccttctgggtgataagtatggatataggctagaggtacgcctttctttggaaaagttgaagggagattatgcaagggtaggtggtaaagaagaatctcaggagatttctcactcagactcattttagtaaagtatatttgggaaaaagatctggaaataaattttcttaaaactctctgtgccaggtaccctttaaagtgtcttagtgaacctgtagtggtgtttttagcaatttgaagatactgtttgcagagaaaagacttttagagaagagctaactgagttttaattctatgtttcttactgaaagtattacttgtctcaagttatgttttgtgagccttgttttcttcattggtaaaagagggaataattaatactcctctcatacccttagtcagtcagttcagccactaagtcctatctgactctttgtgaccccatggactgcagcacaccaggcctccctgtccatcaccaactcctggagtttactcaaattcatgtccattgagtcggtgatgccatccaaccatctcatcctctgtcgtccccttcttctcttgcctttagtcttccccagcatcaaggtcttttccagtgagtcagttcttcgcatcaggtggccaaagtattggagtttcagctttagtatcagtccttccaatgaatattcaggactgatttcttttaggatggattggttggatctccttgcagtccaagggactctcaggagtcttctccaacaccacagttcaaaagcatcagttggtctgtgcttagctttctttatattccaactctgacatccatacatgactactggaaaagccatagctttgactagatggacctttgtcggcaaagtaatgtctctacttttgaatatgctgtctgggttggtcatagcttttcttccaaggagcaagcattttttaatttcatggctgcagtcaccatctgcagtgattttggagcccaaacactaaagtctctcactatttccattgtttccccatctatttgtctatttatcaaacaatttctctcactattatagcaagtgtgatacaattaatatagaatctagcacaagacaaaatgcttcctgaatagtacctatcatttctataagtctgctgcatctgataaatcggtgcctatccagagagctgctaaccaagaatacgggccactccaactgcagaaaaactgcttttgctacaaatttccaccttaaggatccataccagcaccagacacttcttgactcgacccatgaactgtagcccatcaggctcctctgtccctggggtttaccaggcaagagtactggagagggttgccatttccttctccaggggatcttcctgacccggggattgaacccaggtctcttacacctcttgcactggccgcagattctttaccaccagcaccacttgggaaacccctcctaaactcgatttttctacgaaagcctgcctgcttgccctcagccaacaatagatgtgtcagggtgatcctgaaaactagattgctattctaagcatgttttcagctaggctagagtttctttactcatttttttttttttttttttgctaacttgccagatgatgcatctaggaatgtctccaatgttcttatgaagggtatttgaatgagaagcacgtggggtttgtcagaatatattgtgttatgtgctcagaaatagttcaaaggtataggttggacaaacacccaacctctttgtgataaacaccaaattgttaatacagacaactgattatattaacaattttaaacggactatgtgtatctaatctcttaaaataggactggaaagtcctcagaaacagagaccaaagatgttgctttgattttccatagtcagaaacagaaccttgcacatctttgtatttaaaagaaaatataaaatatttcttaacatatatatatgtatatatatatatatatatcagatacgtacaatgtatatatgtgtgtacacacagatggaatactattccagccctaaaaatgagagaacgtttgccatttgcagcaacatggatggacttggagagcattacgctaagtgaaataagtcagatagagaaagccaaatgctgtataatatcacttatatgtggaatctaaaaaatacactaaactagtgagtataacaaaaaaggagcagactcacatatatggagaagaatttaaaaactatcagtgaggagagaaggggggcagggccagtatagggatagatgaataagtatgaactattaggtgtaaaataagctacaaggatatattgtacaagacagggtatatagccaatactttataataactataaatgaaagataacctttgaaaattgtgaatcggtatgttgtacacctgtaatttatataatattatatggtaactatacatcaattttttaaaaagtcttaaaaaatactactcaattcttcactgataccatcctgtaaagatcgggaagaggaaaaataacatttctctccataaaatctacaagggacctttaaagagctctatgctcctacttaagtgaccaaataaagagaatgtcatagatgtaaataacataaaatgtgaataaattattttctattttacttcttcacacaattcattttttgcctggtgaatcaccttgaaaaatagaaaacaccaacatcagtagtttctcttgccaagattttattcccttttggaagagcgagtccaagaggaattctagtctatagatcaaacttttcaaacgtctttcatgtacatgatctcatttgaatcccaggagtgaatattatcactgtcccaagtttccagatgggaagacgtaatagaagttaaaaaacacacttaaattcaagctagaaaccgaggcaatcaaggaattgactatggttctgactgatttcaaatcccatgctcttttctgcccactaaactggggtagtgttcataccgacttgctgacacaccttgaaaaccttttattatgcagtatgagatgaatttagtgacttgctattttcatccgttgactatcatcagcaagtgcagagtgcattattgcctctctctcgtccaagggttcctcacgatggaaagtctaataagccagcagggaccttgttagcagtcacaaatgccaaaatggctcaaagttctttgtgaagggcagtgacagttgcccaaattactctttgttatgccttcaagtctgcgtgctacattcctatgggaaattaataaacacagtttcaggctgatgataacaataggaaatttcagcttgtcactccatctatctttctatttcgtttcttccccaatagcactcaggagagtttttttgtttgttcactcgttttttaatattgatgccaatctctgagccctggagattcagctttaattggtacagagtgggactcaggaacttggggttttaaaacaccccaggtggttctaatgtgcaaacagggttgaaattcaatgatttaggcaacattgctctctaacctctacacttgaactcatgctttaaaaactttacctctgaatatattattttattcacctaaaatattttcctcctatattgtgacagtctaaaaatgcttgggtctttaaaattccacatcatgaacttctaccttgaaatattttcatattgataactgttccaatgtgtacccatgaaaatgatgtttaaaaaaattgagcaactactacaaagcaggcactaggtaggtgttttcacatgtattatctaattcagtatactcctttctaggaagctgggctataagtgttacattttatcatgcctgttggagtctaaaatgtgaaaaaatacatggttaaatttttagaacagagtgactgaactgaactgaactgacattgaatttatttaattttaagtgcttctttaacctattttaacatttcatagagtttcagggatataactgaaggaaaaaaccaaacagaagatagaaaaatgtatattgatgcatgttaagatcaaagagaagggacagttgacagcaacccccctccccctgcccccagctatattctaattcactctcctggtgcagctttcttctggaactatgaaatacatagcctcacagggttacacacaatgattttatgaggttgtatttcacggttgagtacttttcaaaagtttataatttagatgacttgcagcagaaatataatactgtagatcaaaaaggatccttggatctatgcaagtccctagttacaatgaagcattaactttcatttcaacttcaaggtttcttacacaaagtgctagctctacagtcatagatataattaattagcatttatgtttattagaaaatatttttaatttgactcaggaagtctcttcaactatggggagcaaagcaatgaagcaaacatggttgtgggtgactgtttaccatgtaattgttatatggcagttaaaaggttcagatggtgcagaatccgcctgcaatgcaggagaccctgatttgattcctgggtcagaaagttcctctggagaagggataggctacccactccagtattcttgggcgtcatggcaacgcactccagtattcttgcctggagaatccccatggacagaggagcctggagggctacatacagtccatggggtctcagagagttggacacgactgagagacacagcacacacagcataaaaggtcacaaatgatccacaaattatgtaaatttcttagaaatgccaacactcaagccctaccaaaaactgtgattcagaaagtcactgggattcaccatttgtgttaaaaagtctttcccgtggttctaaggcacactaaagtctgcattagggaactgcggctctaattttcattgtttgcccaaagacaatggtgaaaccagtcaaaattatagtcatctccatgaactcaataaagaaagtagaattatttcctgtattatcacttgaaattgtttattttaaatatcagactgatttctcctcttggtaacaccaatgttcacgtgtgtatatatacacttgtgtgtgtgtgtatgcaaagaaaatgacatgtaatccttttgtttatatacatattatatttacacagtatacatgtgatttacattatccagtgattgtttcaacatttcttagatcttatctccagtttataaacatacctataaaattttcttacacattaatcataatggttcattcttcatttacaatttgtctgaaggttgttttaaggtaacattttaaatggcattccatattcttagacttgtgtattcaggaaaactcaggagtcatagtagaatcatttagttcactaaatggcacagactgaatcaagcaaacgtcttataggcaaagtgttattcaagctgtcttctcttccttgttcttacttataactgaattgatagtacctcctaccgttggtatacttcattaggtgtgataagtctttggtaatacattaatgttaatgctaactatttttgaagcaaaggtagagtcacaaccatcttagtctctgtttcccacagtctattctgattttagcactgaaagtcctgaaagtcctgaaagtcctaagtagagccagatttataggcatgcaactgagtgttcctcatccaaacctaaccatatctggtttaatgctttgctgctgctatcttgaaatttttaataatttttgaatgaactgcttcatgttttcattttgtgatatattctggaaattatatagctcatttcaattctggaaaaccccatagtcttgggcaaacagggatggttagtcacactgcaaaatttctatatataatattccttcatcagcttgatttgatagggcatttctatcatacagaagtctattaaatcacttaaatgtatcctaaaaattcatttatgtctttgctttttaatcaggtaagatcatttaatgatactttcatatgcaagtcacagattgtcactcatttataattttctgtaatgcatattataacatatttgcataacatgttagagttcataaagcatatttttttcacttgacattcccagtaatgcactagaaaaatattaatctgatctcagagggaaaatgagggtggtagtggagaatatatagacttgtactgtctgtcagtttccataatgtaaatagtcccatgattgtttctttcaaagtaccaactgggtctcactgagtaaagggttgggaaaagatattgtcaactctcaaagcagatatgaattagcacacataaaggagatagagtaaagctcagcatgcttattttacaaataaatttaatgagattgaaagtctagatgacacattacaagtcacatgtcttctgaatggctaattccaaaattgtatcgatcatctcatttcaaatcccatattttccccttatatcattctgtttttcttctctttcatatctataaacttgtatataagagttattgctatgaatgtgtaagagcatacatgtgcacagatgaaaaaaaaaattaacatcaaataaacttaggtggtgctagtggtaaagaacccacctgccaatgcaggaaacataagagacgagacatgggttcggaaaatcccctggagaaggaaatggcaacccgctccaggattcttgcctggagaatcccatggacagaagagcctggtgggctacagcccatgaggttgcacaagagtcggatatgactgaagcaactcagcacacaaaagctagccacaggaagtataattagtaaagattctatttatattaagggtaattatctttaagatgctttgattaaaatcacttgaaaatatgtttgaattttttcatagatgtgcttgcattcatcaaacttcaatttaaaatagagtcttccctaggctaacaaattacaaagcctcatcttcatagtttaattataaatggaaatataattcatatctttgttatgacttaattaccacttggcaactgagattactgcttttgctatgctctcaactactgtgtagtagactgttttattacatacttatgaaacaatcctcacagtaactctgtaaagaggatagaactgaagcaactttcaggtggtgaaactaatgcttagaaaggttcactggtttatccaaggtcattcaactggtaagtggtgaagccagaatctgggctagttatctatcagatttctgctctcaatcattctgttatacttccttacttggtgtagatttatgaattgtattgaaatataaatacattgctgccgtctatggggttgcacagagttggacacgactgaagcgacttagcagcagcagcagcataaatacattaagatgacaacagatctttttttctatttataacaatacccttaattcttttaaaggagttcccttaattctgtttatgaaaaaagttggaaaaaaaaaaaaaacacaaagcatcaaggacttccctgggggtccagttgctttggtcttcaccttccagtgcaggtgttgtgtgttcgacccctggtcagggagctaagataccacaagccttgcagccaaaaaaccaaaacataaaacagaagcaatattgtaacacattcaataccgactttacaaatgtcccacgttaaaaaaaaaaaaaaatcttaaaaaacaaacaaacaaaaaaaaaaacggcatcatatccagcccagttttctataaaatactctttcagcatagagaaggcccttgatattatggatattcccactctcttttagatgagtaccttaaaagctttgtatcatagaacttcaatatgtagtcagttgaatcaatcatgttcttgtcacaaaacacagagaagtttgaaattatttggtaatgccaccagtataaaaggttagatgtttatccagtgtttggctctgtcaaatgcaattcccttactgaatgtcaaacatttgtagactctatttttcctccttttcccttgatattcattgtcacttgctgctgttgtcagttcctcttccatcaccccacgccatccatcagcttcctaggcatttgctcttttcctttctgcttttctttttagccatgcaggatcctagttcttattttagagggctgtctaccagcatcaataccatgcaaagccatattagagtgcaaggtgaaaagaaaaatcagtaatactgactctgtctttatttaaatttttgatatttcattttaaaaaagtttctagagatataactccatctcaaagatggcttttatgagtctttctaagtagaaagtactatcattttgctccaagttggatatcagctcagcttagatcttatatataatgtttctgaaatatataatatataatgtttttgaaacattttttgtccactggaggtctcaaatattggtctattccattgtttggtatttactttctaaatggagttagaaactagactaagcagtgactttatcacttaatgaaatttttccattaatagataagatcatgtaaattttacaacgatgtatgaggtaggtattgtgattttccttattttgtaaatgaaggaattcaactcaagacaatgaccaaaggtcaactaattagtaagtaacagtatcaggattttaacccaggtaatctgttaaccactggagaaggaaatggcagcctactccagtgttcttgcctggagaatcccagagacaggggagcctggtgggctgctgtctatgggggcacacagagtcggacacgactgaagcgacttagcagcagtagcagcagcaatctgttaaccaggcttccccggtggttgagtggtaaagaatttgcctgccaatgcaggaaatggcaacccactccagtattcttgcctgggaaatcccatggacagaggagcctggtcctctaagtgttggatacaacttagtgactaaacaacaacaacaaatctgttaaccacaactttatgtttcctacaaaactctatttggaagacttggggatatgacctaccctggtgatggtctaactttactacctattagctgtgtaaccttgtcaagttaaattctctgaatctcagtccttcatctatgagtgaaataatgaatatggtattagtcatttgaaaggagtaattaagataatggatgtgaaaggctgttaggaactgaaaatgtagggctacattgatgtcagcagtggtttttaattacaagggactctaggaatttgcaagactattttttagcagactgaaaaaatttgctttttcccctttttttcctttggatcttacctgacattccagctcatctttgaggatatcagatcctcacagtttctctgacaataaacacttgtttaggtgccctctatttaataacactcataattccccctttttagtcatttattttctttagattacagttagttattcacggctcagttcttacactgtaaattccaagacagaaacatctgcatcatatttgctagttattcctagtgtcatatctttttgccttttcatactgttcatgaggttctcaaggcaagactgctgaagttgtttgccattcccttctccagtggaccatgttttgttagaactctccaccataacccatctgttttcagtggccttacatgggccacagtttcattgagttagacaaggctttgatccctggatcagtttgattagttttctgtgctagtggttttcattccgtttgccctctgatggatgaggtcaaaggagtggtttttccagtaatcatgtatggatgtgagagatggaccaaagaaggctgagagccgaagaactgatgcttttgaactatggtattagagaagactcttgagagtcccctggactgcaaggagatcaaaccagcccatcctaaaggaaatcaaccttgaacattcattggaaggactgctgctgaagctgaagtcccaatactttggccacctgaagagccaactcatcagaaaagatcctgatgctgggaaagatttaaggcaggagaaggggcaacagaggatgagattgttggatggcatcattaactcaatggacatgagtttgagcaagctccaggagatgatgaaagacagggaagccttgcatgctgcagtccatgaagttgcagagtcagacacaactgagcaactaaacaacaagaattcctagtgtatagcaaagtgcctgcacagagtggatactttataaaagtttgttgaataaatatggaatatttagttttctttctaaaaccatgtaactccagttgatagcataattttatttgaccttattttaaatttgctattgatttatttttacaaacaattttcaagtacaatagcataattataaaatcagttaggctgcaatttttggaacatgcctttagtatcccaaggtttatcattgagtaaaatggatcttggccctgaattggctctcaggcttttatttaataggtgatcctatcaatagtctcctgatggaatcattaattacatatagagaagaccctgagcttgtctgaaaaataagtatggtgttgctcaccttgtagatgatagtagatgttaggagagaagagataagcaattctgttctcaaacaaaccacattaatataaataattattcacccataaatagtggaatatattttgggaagttccataggaaaaaaggacatggaatggctgaggaaaacagaatttcatagcctttttattcttgttggaaaatgagcttaagtgggaaaattttatagaaaatggagaaaagtaaataacggcacgtgagagaaaataatttactttttctcagttaagaattgaggcttcaacataaatgaggcatcctagaccaaaactaaaatcccaagcaattactagatcctaaaatgtaaaaaaactgaaaaggctcaaacagaaagacctaacacacatctgttaatatgttcagtaaatccatttcctcaaactcctactcacaaccaaactcatactcagctgtggccttgtcaatgaattgtggacagtagaatgtgggcagtagggaggtagatcacgtccaggtttggcccatatatccctcttctaggaccctccaaatacgcttttcccttatcttccagaagacgcagaagaccatcagggagatggggtttagagaagccattgaaatggtcatgtgaaagactgctcaccaatcattaacatccacactggacttggcatgagcaagaaatcaaccaatgtttattaggtgaggccactgggtttgtttgttacagcttctacgacttgtcagtttggactaccataacaaagtacaagagattgactgttataaacaacataaatttatttctcagagttctggaggctgaaagtctgagattagggtgcgggcatgatccagttttgatgagagcactttcaggttgcaaactgctacattctggtataccctcacatggcagacagcagagaagggaagcaaattgtgttgtcacttacaatggcattgatcctattcatgagggctccacccacatgacctcatctaatcccaattaaatcccaaaggtccaacttctaataccatcacattggggaggagataaggtttcaacacaagaatttggagagaacacaaacattcagtctataatatcctagcatgtttctcttatacattctaatttccttttgtaaaacaaatggtcataagtttaataacttgaaaagtctggagtaaaagaatattttgacacttcatttacctgtagagaattagttttgttttaaacaaaacccagacataatactgtggtaaaggcatatgattttaattttatgcacttcaatgaacactaggaaaaggcactgtgacagaagctgctacttttttttttttttttttaccaatactaattcctttcttttccaaataatgactatacttagagctaagtgtggccatgtctgtgtgaccatggggataaaatagaactgataaaaagctcttccagcgtaggtctttaaagaggactgggcatgtgctcctttccccattttgtgtgcttactactgattcgagtgaaggcattagaatgccttctagaggtggaagttgagaatcaaggaccatagaattgtactaccagttctagatcatctacctctgcattgtttcatcagagcgaaataaacaaccactttttcagagccacattattttttttttttccttacaatgttttaacagaggagaaatagactaactcagcaatgtcctatgaaactcatggcatatggaaggaatctcagaagggctacttaaaatcacagttgctgttggtgtatatacaaatggggcttcttatcctgattaatcaccatgcttcaagtatttattacaactgatcctttttattaatatattcttttctacctttttaaacaccaaagttataatttcaagttcacgagctttcaaagcttttattttcaagtcacctactgtgaagtcactgtcacaagattctgaatttattctagtatggaaaagaaaaatacagataaggttaaaattaatgaccaaaggtaacaattctaaaacttcgaataaatcctaaacagtactttcttcattgtaatatttaacagttaacaaacattgtcttatttgattggaggaagaaatggcaacccactccagtattcttgcctgcaaaattccatggacagaagagcctggcaatcaacagtccatggggtcacaaaagaattggatacaacttactgactaaatagcaataatcttatttgatacatggacattcagagataatacagaaatattatctccattttataaacgaaaaagatgtgctctgtgaacttcattgacttacacaaggtctcaagtcttgagctcaagacagcgtgtgacaggagcagctgtcagtgtgcgactgttatcgcgagactggccgtaagccgtcccctccaccaacggtcagatcgcggtggtccccccggcagcagtctcccagggtggcagtctgtggaccccggcccagttgcctgccagcgctgacaccgggcagggcaggggcccttggtttggcttgtaaaaactgcgaaacagcggcgccctcagtgacagccagcgagcatccaagcgggagtggcggcctgtgggctactgtgaggagtgtcgatggcgaaggggacctcccgcctggcctcacaccagctgccccgcaggtgcgaaaggagcctgttctgacatctgagggaggctccgtgagccccttctctggctgttaaactttaagagtattataattttagagtataatactaaagttatactctaagtatatatattataattttaaaagtattaaaatttaatactctaaaagtatagtatagtatacttttagagtattaaattttatcttccctgggttgggaagatctcctggagaaggaaatggcgcccaactccagtattcctgcctggagaatctcagggagggaggagcctggtaggtgacagtctgtgcggtcgcaaagagtcggacacgactgagcaacttcacttcacttcacttcacttcacttcatacttttagataaaattttgcggaatagacaatagcatttgttgttttggaggtttacaggaacatcgtgacctgacccacatggtcagctgcaagaacaagaagtatgcaacaattaaccacacccctccgtcagttcagttcagttcagccgctcagtcgtgtccgactctttgcgacccatgaatcgcagcagccaggcctccctgtccatcaccatctcctggagttcactcagactcacgtccactgagtccgtgatgccatccagccatctcatcctctgtcatccccttctccttctgcccccaatccctcccagcatcagagtctttgccagtgagaactcttcgcatgaggtgtccaaagtactggagctttagccttagcatcattccttccaaagaaatcccaggactgatcaccttcagaatggactggttggacctccttgcagtccaagggactctcaagagtcttctccaacaccacagttcaaacgcatcaattcttcggtgctcagccttcttcacagtccaactctcacatccatacatgaccacaggaaaaaccatagccttgactagatggaccttagtcggcaaagtaatgtctctgtttttgaatatgctatctaggttggtcataacttttcttccaaggagtaagcgtcttttaatttcatggctgcagtcaccatctgcagtgattttggagcccccaaaaataaagtctgacactgtttccactgtttccccatctatttcccatgaagtgatgggaccagatgccatgatcttcgttttctgaatgttgagctttaagccaactttttcactctcctctttcactttcatcaagacgctttttagctcctcttcactttctgccataagggtggtgtcatctgcatatctgaggctattgatatttctcccggcaatcttgattccagcttgtgtttcttccaatccagcgtttctcatgatgtactctgcatagaagttaaataagcagggtgacaatatacagccttgacggactccttttcctatttggaaccagtctgttgtcccatgtccagttctaactgttgcttcctcacctgcatacagattcctcaagaggcatcttaggtggtctggtattcccatctctttcagaattttccacagtttcttgtgatccacacagtcaaaggctttggcatagtcaataaagcagaatagatatttttctggaactctcttgctttttccatgatccagcggatgttggcaatttgatctctggttcctctgccttttctaaaaccagcttgatcccctccgtcacctagcctttaaaaggactttgctgaaaggcttctgggagtttgggggttgtttttttattgcagaagaggggtgaaccacccctcttctgcaataaacctctctctcctccaaactctgatgttttggtatcatttggcctcactatgcactgggcacagggacttgaggtaacagtcatttttcaaggatcagagtatctttataataatctaagcatttcccaatgagattatgagctcagaattcagcatttgtattcaaggttttatgatctacgtttggatttcagctcttatgatttatgtgctgcaagcagatggcttccagcatgcttttttttaaaatctatgaaatggggataataaatagaaatcaaggctgataccagacagataaattgtatactaaaataccttatttagtaataacctctcaataaatgttagctgttagttctttttgagttttaatttttgagacagaatagatttataggacaataaaaatatgaaaccctagggagtaccatttatgttgtattttatgataattgcattccctagcacaatacaataaaatttggatattgctcctagagttgtacaatgtagtaaccttaatgaatttttttaaaacaattgaatagcttttatcttgaggaaagtggtatctcaccacacactcagcataaaagataagctcctgtttcacatgtattccctttgatctggctaaagctgtgatataaatttctgctgaaattgacctaagtaaataaataatcactttcaccctcttaaatttcacttttgaaaggataattattcatagtctctggcatgaaattgattggctctaaaaagatggagactagagttaacccttggcatttgtagctgtgatattttaaaagaccagattttcctaagtaagtttcttgaaatttaaaagtcaaaagtttatttaaaaaatttttttaaagtaacattggtttgtgatgttatatgtttcatgtgttcaacattatattcaacttctgtacacaatacagcaaaagtttagttccatctgtcatcatacaactgactccatttaccctttctgctctctctcaaccccttcccttctggtaaccactattctgttcactgtatctatttattttccttttgtttatttatttgtttttttttttagtaaaataatagaatatctgtctttgtctgacttatttcatgtagcctaataccctcaagattcatccatatcttgtaaatggcaaaattttctatttttttaagggtgagttatataccattgtgtgtgtgtgtgtgtttatctcatctttacttctcatccactgatggacgtttaggttgttttcatatcttataaataatgctgtaatgaatatatgaacacaagtagtgttagttcctcagtcgcatccgactctgcaaccccatagactgtagcctgtcaggctcctctgtccatagaattctccaggcctgaatactggagtgggttgccatttcattctccaggggatcttcccaacccagcaaatgaacccgggtctcctgcatagaaggcagattcaggggatatattttttcaaattgatattttcttattcttcagataagtatgcagaagtggaatagctggttcatgtagtaattctattcttaattgttttgaggaatcttcatattgttttccacagtggctgtacaaacttgcacgcccacctgcaattgtagagggtactttttttctccccatcttcttcaacactctttattggccaagttacagtatttgtagcatctcagttccctaacctgcaactgaacccatgtccagtactttttatttcttgcctttttgataaaagccattctaacaggtatgagatgatatctcattgtggttttgatttgcatttccctaataattactgatgttgagcatcttttcatctgcctgttgaccatctttgaaaaaatgtctatccaactcctcggtacatttttaaattaggttctgtgttttttgttttctttttgctgttgttgagttgtatgctgctgctgctaagtcacttcagtgtgtccaactctgtgcgaccccatagatggcagccaagaaggtgcctctgtccctgagattctccaggcaagaacactggagtaggttgccgtttccttctccaatgcatgcatgcatgctaagtcacttcagtcgtgtccgactttgttcgaccctatggacagcggcccaccaggctcctctgtccatgggattctctaggcaagaatactggagtgggttgccatttccttctcctgagttgtatgaattttgtgtaattgggatattaaccccttatcaactatatgatttgcaagtatcttctgtcatttcattttacttttcttaactgtgaggaaggtttttagcttgagatagtctcattttttatttctgcttttgtttcctttatctgaggagacacattcagaaatatatcgctgagactcatgtcagagaacaaagaggaatagggaaaagtatatctaatctactttctcagaagtggaaatgtatacttttattagtgtattgactatgattcttctatattttagggcatctaaaatgtccaatgttttcacaaaagaatttcttctaagattcccacatagagtagagtgattagtgctggaccatgaaacagatgcaggattagaagtgtatcagagctctaagttctgctctgccaacttagggaagccagaatgggatacacatgtaatattttacatatgttatatttctgctgcattttgaaatatggtggttacctagagaaaaagcacttgtgcttgtgctgaaaactgaagtaaccatatacagtaccttccaaggaatgccatttttacctgaaggcacaattgagaaattaactataattattcagaattaggcagtttggtagacaatttattcaaagtaaatatgttacttactacaactgataatattttttgccaatgagaaaattttagcttacaagcaaaaattagaattttggaatgttttattccataactataattttgtcagattctcagtatttaaagacattcctcatgagattgttggtgatattaataaatttgacatttagtattgtacaatgagaaatgtcagcatttgaaagatctacaattggagtgaacctgtattttgcaaatgatccatatatgatattacaaactaattatgaaaatcattcataatgtaagatagatcaacaaattttaatataacaaatacaaaaagcttattaatctgctttcagctttgacagtacaactgaacatttaagaaattatactagttaagttttggtagagaaagataaagaagatccagaattatcaaaaaatatttttaaaacactgttcttattccagttttatatgtgtgaagatggattttcttcaaggtcttcaattaaacatcttgtcataatatgttgagtgtggaagcagacatagaatccagatgtcttttttttttggcaaatatataaatcagtgtcatgccactcactacttttttgaaaatatattgcaattgtgttatttatactagcatggaatgactaatattattttataaatattttcaaatcttatgttttagttttaaaaatggcaagtagctatcaacataacccacattaagaaaaagctttttggagttctccatacattataagatgtatgtagatgtaagtagatattgaaaccaaaatacaggattttagatcaatcgttgtagaagattataaagcagtcgtacaaatacatgaggcatagccaaattgtatttggttcctcaaatctcccaactcataatttttaagtgaacaaatgcataaaatagaattctaatttttctttgcagtgtttttattgctaatgagtggtggcattttccccaagatttgtcccaaggaagtgaaatctccacagaccaaatgcctgactctacatttagaaaagatacattgttaactttctccttaaagatctaggcccttaagttgaaatatttattggaaaaaaaaaattatcctgtggaaaatggctatttgccattttttaccttcaaaaggtaaaaaatctaaatgaaaactattattagtaaatacatatcattaaactagtaacctatgcttaattataagggaagttggggtgacaaatgagattgcaaagaagacaggtgtgggggggaaggaaacatgtcttgcatacacagttggaggtacggatgtgtacatcctcacaatagcctcgatatgtaattattaaatacacttttaaatgagggagaagacgctcataatgttagaattgatgctcaagtatattgctacatgccttcaaaattagtatttcaatcccttttaaatggccctgtcccaatatgagatatttttcctctgaacttcccagatggctctagtggtaaagaactcacctatcaatgcaggagacagtaacagactgtattcgatccttgggtcggggagatcccctggagaaagaaatggcaactcgctccagtattcttgcctggagtatcccatgaacagaagtgcctggcagactgcagtccatggggtcacaaagagttggacacaaatgaagtgacagtactttctctaacgtagcactccatattatttcaggctttttaaaaaagtaacattaccttctaataaaaagaatcccaattcaaagcaaactcactcagacaatagtatccaggatacttatttaaatttcttacatataatagaaaggatcctatttgcactgagagtttgaagtaaagagaaaaaaggatattctttgggtcaaattagttgaatcagctcattcaactagaaggagacaggatgtctcctaaactcattgaaataattagttcactgaagatggtgcttcagcttaatttgtgaatattaaatattgcaatagtgtcacaaggattaagtgatataacatgtgggaaatgagaagtctggcacaaagcagattttattattattatgatcaggatcattgcatgatcagaatatcaacaaagttggattttattgttattattatgatcaggctatcataataatcattcttgttgttcagaatatcaacaaggttggcaaggtgataattctggggttaagtaatccaggcaaagaaagactttcctggtctgcatgaactctttctcaaaaccttccacctcattctaagtcagagaacaccaatctataccaacctacttagttttttgatttcgatggcaccccactccagtactcttccctggaaaatcccagggacggaggagcctggtgggctgcagtccatggggtcactaagagtcggacacgactgagcgacttcactttcacttttcactttcatgcactgaagaaggaaatggcaacccactccagtgttcttgcctggagaatcccagggacgggggagcctggtgggctgccgtctatggggtcacacagagtcggacatgactgaagcgacttagcagcagcagcagcagcattgtaaacaagataggtaaggaagagcttgagccttgccatcactagaatggctcatcacacttaaccaatctccttggcattctggtttacatagtagttctcagtttaatttatattttgagtttgtgtgaccacttctggatatactaagaaagtccatttctcaggcagggagcctggaaactagaacatcctttgagatgtcattgtgacctgtcactgacctttctcttctggtatgaacactgttaccttaagactttattcaaaatttcaaaattcccattatctttcatgaaaacccagaactgacttaccatttcctaaactggcttccctggcggctcagtggtaaagaatccacctgtaatgcaggaggccgcttgcaacacaggagactcaggttggatccctgggctcaggaagatcctctggagaaggaaatggcaaccccctccagtcttcttgcctgggaaatcccatggacagaggagtctggtgggctacaggccctggggtcacaagagctggacatgactgaacaactaaactaccactagactgctcctcaaaaaattctggcaaacaaaaaggtaagatactttccaggtagttacaatataatagaaagggtggatagactgcctgaaaaaaaagattccagagaaacataatcgaagggatttttttaagaagagctgctacataaactagatgttttagtattgcacagcttaagaggacaaaacaaggcccaattattagaactcaatggcagaagtttcataattctcaatctgatgcttacctttctgcctcctaaaatagtcaccaactgtttatgatactctgtattctagagtctacaagagtttccatactccaaccaactcatcttcatctccttcatcttaccttggataaagtcctcaccattcatcatcctcccacagcttattgattagtatattctacaccttctattgttgtttttgttcagttgttaagtcatatccaatgctttgctaccccatggaatgcagcaggtcaggcttctctgtccttcactatccctgagttttctcaaactcatgtccattgagttagtgatgccattcaagcatttcatcctctgtcacccctttctcctcttgccctcactctttcccagcatcagagtcttttcgaatgagtcaactcttcacattaggtggccagagtattggagcttcaacttcaacattagtcctttcaatgaatattcaaggttgatttcctttaggattgactgttttgatctcctggctgtccaagggactctcaagagtcttctccaacaccacagttcaaaagcatcaatttttcagtgctcagccttctttatggtccaaacctcacatccacacaagactactggaaaaccatagctttgattatatgggcctttgccagcaaagtgacatctctgctttttaacacactgcctaggtttgtcatagcttttcttccaaggagcaagcatcttttaatttcatcttttaacggtggctgcagtcaacatctgcagtgattttagagcccaagaaaatgaatctgacactgtttccatattttccccatcaatttgccatgaagtgataggactggatgccatgatcttagttttttgaatgctgagttttaagccagctttttcactctttcacattcatctagaggctctttagttcttgtcactttttgcccgtttaatggtatcacctgcatatctgaggttgttgatatttcttccagcaatcttgactccaacttgtgcttcactcagaccagcattttgcatgatattctctgcatataagttaaataagcagggtgacaatatacagccttgatgtactcctttcctaatattgaaccagtcccatattctatgtccagttctaactgttgcttcttgtcctgcatacaggtttctcaggagacaggtaatgtggtctggtattccatctcattaagaagattccatagattttgtgatccagtcaagggctttagcatagtcaatgaagcagaagtagatttttttggaattccctagctttttctatgatccgccttctttttctatatccgcctttgctatttctcactataaacacgggcttccctcatagctcagttgataaagaatccatccgcaatgcaggagacaccagttcaattcctggttcaggacgatccgctggagaagggataagctacccactccagtatctttgggcttctgttatgctcagcttgtaaagaatccacctgcaacatgatcgatctggcttcagtccctggattgggaagatcttctggagaagggaaaggctacccactccagtattctggcctggagaattccatggactatacagtccatggttttgcaaatagctggacgtgactgggtcaatttcactttcactataaacactattctacccatatatattttctccttttgttttatctacacttatgttttcatacttctatttcactgcataagttgtttcctctactagaaatgcttttccttcctttcttttcttggtgagaaattactgatatttcaactttcagttccagttgcaccatcttgggagatagttctggtttagctctgggttcctatctcattttattttgaccatcatattgtgttttccttgtggattcgtgtgatgttttctcactagacggtgagcttctcaaggtcagaaagtgtgtaagagtcatgtttgtatgtctttgaactttcataatttcccatagtaccaggttcatggaggactctttaagctgaatgcaattagatttcatcttaacataaagaaattccttttttccctaatgagacaggttgatctgtatccttaaatggccacatagacataccattagagtggacatgtcagcaaaatgcgagatgttgaaacgaatatgttgagaagagtcttcaaactataagtcccatggttctatgttgcaatgtgcttgaggctgaaacataccattcaattagagttgttccttgttcctgcaccttcttctattttaggtaacagaagctgcttttgctcttttctccttgattctgggaattcaccctgaaaagcaatagcttttatctccagaaatgctccttccctgagtctatctcaagaaattttcttttctatccttgctcctctctgtttttctctatacctcacacatcataatctgtttactcaggattcagtctatactttgcttctaagctaattgtcagaaaaattaatgaatgataaccaagttgtcaaaaactaattccagtttaacataataatagctgccatttattgaagaaatcttatatgttccttacatgtattatattattaaatccttatatgaatgctgtaagttattattcttatctacattttccagatgatgacattaaagccctgagaagttaaatagcttactaaaggtaacagatgtaggaagtggtagaatttaaatcaaatcccagtcaccttgattgcctttaactactttgctaaactgccaactcatactcatcctctaatatacactccagtatgaattttgcattaacattattataaagtgtgcaatgcaacacaccatgggtataagagatttgcacatgagaagattcttctttgaatccatagcccatactccatagggaccacctaatcagaagactaccttttataatgcatgctaatttttctttgctttctgggtatctttcatgcaattcataaatcgcacatcttcagtctttagcatttaaatctaagaggaaagctgcagttcctccatcccaggactgaccgggggaatctgtttcatggggagcacattacgtacctctaacaagacccaaaagaaaaaagaaaaggcagcaataattgtgaagttcaatcaaaacccagagttcacctccacctgcgtgagttgagggagcagagagcagggtttgccggtgctcctgcttctccagtctcgtcttcctggcagctgtgcccacttgggcactctctgaagtccaagacacctctcacccttagctcctattccggttttgagatgaactctgtctctccagtgagcaaactattctctcgatcttgatctctgtctttgtccttccccactgaaaggaaccaatgtttcttggagatatggctgattccagactttgggcagtgtaggcacaagatgaatctagaatattttttttgcaccagaaaaaaaaaggctaaaaatgataggtcatgaaacagagacacagagtcacaaaaataagcttaaaggcatgctcagtggtgaaatctggaatggtcactgtgcagtggggaatctgggccacacctagagcaggtgatcaaattaatatctcctaagtgagatactcaccatgcgcatgttcaccatgtaccttcagctgtcatactctcttagaaagacacaaaaccacttctagaaaattctggctaagaatacactacctggatccattctgttaaaaattctatttaaaatatgttgtgtgcatgctcggtcatgtccagctctttgcagctccatggactacaaccaccagggctcctctgtccggggagttttccaggcaagaatactggagtggttgccacttcctactccaaggggtcttcccgacccagggactgaacccacatctccagagtctcctgcattggcaggtaggtgttttaccactgagtcatctgggaggcccacccactaaaaggaggaacattttatttaaaattggaagactatattctttaaaagttgtgaatctcctttaagaaaaggttgtgaaaatatttcagattaaaagaaactcaaagagacagaacaactaaatgtcacctgaccctagactaaagcctgttacagagaagaaaaaatgatatcaaggatattattagtgaattaaaaatattacaatataaacagcagattagacaaaaaaaatgatatcaaggatattattagtgaattaaaaatattacaatataaacagcagattagactaaagcattatacctatatagaatttactgaagttgttaactgttctgtgcttatataagagaatgatacagtgaaatatccaagggtaaagtattttttacccttgcaatgtatctatgcaatttatcctcagatggttcagaataagaaaggaaaaaaaaagataaaatgtaaacagtaagcaaatatgagtagaaagtatatgtgtgaatgagagaaagaaaacttaaaatgtaaacagtaagtgaatctgaatagaaagcatatgtgtggttttttttacagattttattgttgtaatttttctgtttaagcttaacattgtttcttagtaaaagtttaaagataagaataaataaatgtgtcccttgtaaggaaaaactcttgctggtggctgagatcaatgttttgtgacatcttgctcccagtaaataagcttcataaaattggtatagacaaactaagtgttgggttaggtgcaattggaagagttttagataatatttatgttttcatcatcaaacacacattgaatacttattaatattatattctataatgtcctttctatcctcaagaaagaatactagattgtgtgtacataagaatgctttataggaaaaaataatttacaaacataacattagtattaacaaattatttataataagcctgatgtcctctactgattctgcacattagaaacttatttgaaagccactggctctgttgacatgacttaggccacttttcttttttgacttgagatccagagaaatgaggatccctatgttatttttaagataagcctaatttcccaataacaaagttcatgctttctcactgttagaaaacatgtctgaataacctgtaaaggtcttgatccctgcctgctgtataatgtcacaaacctctgtccatagttcttcaggcactctatcagatctaatcccttgaatctatttgtcacttccactgtataattgtaagggatttgatttaggtcatacctgaatggtctagtggttttcctgactttcttcaatttaagtctgaatttggcaataaagagttcatggtctgtgccacagtcagctcccagtcttatttttgctgactgtatagaacgcctccatctttggctgcaaagaatataatcaatctgattttggtattgaccatctggtgatgtccatgtgtagagtcttctcttatgttgttggaagagggtgtttactatgaccagtgtgttctcttagcaaaactctgttagcctttgccctgcttcattctgtactccaaggccaaatttgcctgttactccaggtatttcttgacttcctacttttgcaatccagtcccttatagagaaaaggacatcttttttgggtgttagttctagaaagtcttgtaggtcttcacagaaccattcaacttcagcttcttcagcattactggtcggggcatagatttggattactgtgatattggatggtttgccttggaaatgaacagagatcattctgttgtttttgagattgcatccaagtactgcatttcagactagacatggaacaacagactggttccaaataggaaagggagtacatcaaagctgtatattgtcaccctgcttatttaacttctatgcagagtacattatgagaaactctgggctagatgaagcacaagctgaaatcaagattgctgggagaaatataaaaaacctcagatgtgcagatgacaccacccttatggcagaaagtgaagaagaactaaagctcctcttgatgaaagtgaaagaggagagtgaaaaagttggcttaaagctcaacatttagaaaatgaagatcatggcattcggtcctatcacttcttggcaaatatatggggaaacagtggaaacagtgactgactttattttggggggctccaaaatcactgcagatggtgactgtatccatgaaattaaaagatgcctactccttggaaggaaagttatgaccaacctagacagcatattaaaaagcagagacatactttaccaacaaaggtccgtctagtcaagcctatggtttttctagtagtcatgaaaggatgtgagagttggactataaagaaagctgaattgatgcttttgaactgtggttctgagtagactcttgagagttccttggactgcaagatatccaaccagtccatcctaaaggagatcagtcctgagtgttcattggaaggtttgatgttgaagctgaaactccaatactttggccacctcacacaaagagttgactcattggaaaagaccctgatgctgggaaagattgagggcaggaggacaaggggacgacagatgattagatggttgatggcatcacccactcaatagacatgagtttgtgtaagatccgggagttggtgatggacagggaggcctggcgtgctgcagtccaggaggtcgcagagaatcgaacacaacttagcaactgaactgactgaacctgtactggactataattcccttaagaatcaagccctgctttataatgtatttaagtcaacatctggaatctagctattaacccctacaaaatccaacagtgtgcccagtcctctcatgtggtgaccagcaacttgtctgtgttcctttctcttagcttataggttcagactcttgtacaccatacattgcttcctcatgttatattattctaggaccagcttgatattcagccttcaagaaatagtcaactcactcagggtcatcagagtgcaatagaaaggactcttggattttggcacttggcaaatctaggaacatatttagctctgccacttaccaaatggatggtagccaaagtacttaatatctctgatcttttttcctctctttaaattggaaataacaatgctacttcctcagaggatggttgtaagaactgagacagtgctacacagaatctttggcatggtgccttgcacatggtgattattggaaaacattaactgctaacactatttaaggaaaataaacaaaacttttattttaatagctgcaccatgttctctttagggtgatactctccttatttaaattcttctgggaaaaagcaaggctctaaggtgttcggggttaaaagaatacaggaaaatgaaagagacaatgaaactattctgtgtagctcagcaacagaagttagaggacacagcagaaaccacaatgacgagaatcaagcataaagttaaggaggttaaggaggaaataggaaaagagaaagtttcatctccacgataaggtgccaaagaggtacaatatctagtggtaaattttgagtatctgccttaccacgaattggcagcctatgacttcctggaactcaaattaaatctgtatgaatctgagtgaatgttcctgttttctctttgtttgtaggtttgtttccacagtgaaaattgaggtggcggagatgcattctcaagactaagatggcgctgagcagaaaaggatgaacaggtacttaagggaaggtgcaaccgaggttgagagctttgcaggagaagtaggctttagaagaagctgtgagaggggatctctgataaagcacagaaaacttgagggataacaggatgggaccttaacctgacctctggattttatccttattatagttaagaacatggacttgtctcaaagcagcttgtgttcagaatattgtaaactagataaaaatactaaaagttagaaaaatgtgataggtccacagtcctctatctatgattacaaaatacaaaaattctaacaatgtgttgttttgtttggcacccatatattttagtggtgaaaccagactttattctccagtaggctgcctattgtttctgtttactgccacggtaggtatagtcatacaatttgctgaagatttattcatgttttggaatatgtgtgccacccacattctgctagagtgattggatatatttatattatcatattctcaaatatttctgggcccagcattttggataagagtttgtaaacataaattcagaaaaaaagaaaatttaaatgagtgaaaaaaaatgataaagcgtttaccttccagggtatttctaaagctgaagttggcagctttatccatggaatctgattcatactgggtcaaactcaggcaaaactccacatcagccgaggaagggagcctcggggtcctggctttgtcgtggtttccaggattgcgcagtaagggcccctcaggcgtcccgttgcataaagcctggcgactgttgtactcctccagtctgctgcagacgatctgcacagaacgcctttgtgttaaatgagtgttgtaaaagggggaaggtagggaggttgggattcctcatttggattttggatatttggatgtctaatcatcaggagattcatgtcttaaatcgttgaaggaagcagctttctgacgcttgcagaaaaactaacctatgaaagttacagttcagaccacagttctagtcttgcatctaccacttaagaaaataaattccatagatctcatctaacaaataataataattacttcatataattgttgtcaggtatttgttaggaaaattaatttgacaaacatttgctaaacatccattgtataacttcactgggcatatgcctgtgaagctagccgtggctcagattttaggtctgtaccttcttcttttaattctttctctatctgcttccttggctataataaccagtttcatggcttacatgccactgcatgataagaactttctgattcctatctcaagttcaaaagctctcttctgagctctaaccctgtatatccatctctgacttcatatttcagtgttatctcacaagcatgtcaaatgtagtatttaaaaataaaaaaaaagttgtcccttcataatagctaataaggggaaaactctgaaataagatatatatgcacgtataactgaatcactttggggtacacctgaaactagcacagcattgtaaatcaactatgttatgattgtttagttgctaagtcgtgtttgaatctttgaccccatggactttagcccaccaggctcctctgtccatgggatttcccaacaaaggatactggagtgggttgtcatttccttctccaggggatcttcctgacccagggattaaacctgtgtctcctgcactggcaagtgtgttctttgccaccgagccactttactataaaaagtaaatttaaaaagaagttaaaaatgaaaaaaacttgaaattaaaacaaggttaaaaaattgtattcctctccctatacttccagtcacatcaactatcctgaaacttaaaccagaagtccataaatcttcattttataaccaaatactgttatcatctgtattttgttcccctttatttttcacattgaaatcatcagccaaacttgtcaattctacctccagaatacaccatgaatctctatttgtttacaaattctgtgatccagctgaggaagtcagactggctactcttctctgtgcatcacctgtgcttctccatccatgcctttgtttctgcctaagcacatccattccttaccgtttatttgatattctacttagtcttcaaggttaaaccaatattttggaaaaaaaaattaaaaagtcaactgtgacttaaaaagtaattcagaattgtctgactctaaaatctgaagtttgagatccttcgccaaattattttgcttacaatttcatttatatgtgaaagtcactcagtcatctctgactctttgtgaccccatgggctgtagcctgccaggctcctctgtccgtggaattctccaggccagagtactggggtgggtagctattcctttctccagggtatcttcccaacccagggattgaacccaggtctccaacattgcaggaggattctttactgtctgagccaccagggaagcccaaaaatactggagtgggcagcctatcccttctccaagggatcttcctgacccaggaatcgaactgaggtctcctgcattacaggtggattctttaccagctgagttacctcacttctatgctggcagaagaataaactatgatcaaaatatttgacaagtcaaaaggagttctttcaataactacaaaataaaaatgctaagtgattaaaaatatcacattataatttaattagcagattttttttctcagtggtatgtaaattaattcctcaactgaaaatcatcgatgccttgagttccatgagggcaattaaacaggtagcaagataacaaacttatattgaagcattcagtacaggagagctcaccttgccatttgtgactattcacaacagcacttaatccataagtggcctgtgcccactgagcaaataatagggttgtttgtcaaactcaaacttgactcattttaatctcccttgatagtcagtagcacctcctttttttagaaaactaatatctccatgaagataactttctttctttttttcatttttgttcatccccagaatctagaatagagactctataaatatttgatggaataataaaaaaaatatcaatgttcatcacagcactgtttataatagccaggacatggaaacaacttagatgtccatcagcagatgaatggataagaaagctgtggtacatatacacaatggagtattactcagccgttaaaaagaatacatttgaatcagttctgatgagatggatgaaactggagccgattatacagagtgaagtaagccagaaagaaaaacaccaatacagtatactaacacatatatatggaatttagaaagatggcaatgatgaccctgtatgcaggacagcaaaaaagacacagatgtgtatagcagacttttgaaatcagagggagagggagagggtgagatgaattgggagaatggcattgaaacatgtataatatcatgtaagaatcgaattgccagtctatgtctgatgcaggatacagcatgcttggggctggtacacggggatgacccagagagatgttgtggggaggggggtgggaggggggttcatgtttgggaatgcatgtacacccatggtggattcatgtcaatgtatggcaaaaccaatacagaattgtaaagtaaaataaaataataaataaataaataaatatcaatggaagaatcagtgactcttcaactaccaacatgtgttgaacaccatttttttcctagttctgttattggtaccaacattggccctaaaagatattttcaaaaatgtatcatttgtgttaaacatatattgagtcctcactctcaacagaagggcatctctgtgtatattctctaaaattcacaaatgaccttgtaggttgatatcattttattcctattttaatgacaaggaaactgagtgtggaagagtgtagtaaaaggctggtaggatctaaagccctatatcatgattaatttatggcaacaggcaaggtacatggaacaatattttaaaagtgagtcttcttgcttagctgtttatatcactgttaagaataatcaaggcaatcctatcagtgtcctactccagtgagttggcaatctataagaatgtaaagtcaagttatgttgttgtgctcagtcgcttcagtcatgtccaactctgcaatgtcatggactacagcccaccaggctcctctgtccattctccaggcaagaatactggagtgggttgccatgccctcccccaggcaatcttcctgaccagggatcacacctgcatcttatgtctcctgcattggcaggcaaataccaatatttaccacaaataccatcaagtaaaaccaccatcaaatagaactgaatgagccttgctccccaggaatgggtgctgctatgttacacaacagacacttggagaagcttttaatttccagtcacaaagatatcacttattaattcaagggttgcatgttagaaaaaaaattaggttccagattcacattggtgtgggcttcaattctggttcagtgacttactagcaatgtgtcaaatatattatttaggcttgctaagtctcaatttcttcaactgtaatgtgaaataataaatataatgttaatatatatcatatttacatgtgtttattttaaaaatatacttaaacacattatttatatttaaatatgcattaaatatatataacagactagttcgaaattaggaaaggagtacatcaaggctgtatattgtcatcttgcttatttaacttatatcagactatatcatgtgaaaaaccaataacctcagatatacaaatgataccacccttatggcagaaagtgaactaaagagcttcttgataaaggtgaaagacaagagtgaaaaagcttacttaaaactcaacattcagaaacctatgatcatggcatccagtcccatcacttcatggcaaaacagtggaaacagtgacagactttattttcttgggctctaaaatcactgcagatggtgactgcagccatgaagttaaaagacacttgctccttggaagaaaagctctgacaaacctagacagcatattgaaaagcagaaacattactttgctttgggggatactgaaggacagggaagcctgatgtatggagtccatggggtagcaaatagtcagatacaacttagggatggaacaacaatttttgcattaaatgtaatacattggatccctttatagtgttaattaactacccatcgcagcatgtatatagatggaagcattttcattcctgtttgaaaaataaatcatatccagatacttttaaaagatctaaaaaatcctactgcctagaagactcctgcagtagactcagttaaattagagaggtttgaatgaaactattttgcttaaatcacaactgccaagtaattaaatgttcagatggctaaatgtattagtaacaatgagtaaatctaccccagttacagaaataatttgaaataaatctcaaattattgttcttatatttgatatagaaggggaggcagagtaggagaaagcattagcactagctatcatcatggagattgcaattagacatggtttccaaactgagcaaattacataatctcctactatcaaggttttttatctgtaaatggggactataacaactttttatgaaggatcaaataattttacttatgtaaagcacttagtatataatgccaagtagagagtgtttaataatgacagctattatattattgcatacaagactactgggcaggccaccaaattgttaaccctgactctattacacaggatgaataatcattattataatagctatcatcaatatatcatatgaggatatattgtgataataattccatacttaaaattcaaagaatatgtcagatactaaactagtcattttacattaacagttttcattgaatccattcagaataatgctttaaaatatattattctaattttcagggggaaaagttctcacataattaagtaacttctccaggatcttggagctaagtgagttacaaaagtcatgtttttatggctcaaaagactatccccttccacttcattaatttgctttccattcagcttagtattttcattagtacagaaagcacacatatatcttaattgtaccccaaaggtcaaagattacaaataacttgtccaatatcatctgataattggcagaggtagaatctggtgacaaaagtcttctgatgaggaatttgttctttttctgtttcaacaaaggtgacttatataatgtagagaaaaatcaagtgtcccaagtcaaatgaaaaagaaaaagaagaaacggatgtattaatggagaaggtgagcttagtgttctcttaactttaaagaaatagcaggaaaaaaaaaaagcccagttattaaaagctttaggagcaaaaattctattatggcattagaggtttatctaaaagaatgtaaaacatatgacattccacagaatctttttcataaagaaaaagagaagctgttatttcacctagctgttgccatggttacctaaaacccatgactctctgctgaactgtaacttttttcttcctcctgtttgcttccttgtgatgtgcttttcacctaatgcgtgaattccctggccatacttcacgcatgcccatcatcttggaaatgttttgttctctttattttgatccatcataacagctattcttgaaacacctcttcttacagctagctcacctgctgcttgcataacattgggtctaagtgtgttgagcatagttcgcgccgcgccccaacctcccaaatcagtgaactgctttcattcaggagcactgtaaacatgcttctagtttaaaagcttttggaattaaacaaaccaaacaaataaataaataaatgaacaaatatacaaaggagatacgaatactgaaaataagctttctataaaaggtaacatttagtaattaagtaatgctttttaatgtattactttatttaataataaaccttgtcagtaaatattattagtctcacttaaaactcagattgggttataacatgcttgatcttctctatgtgtgctttctttttttgcacacacacacacacacacacacacacacacacacccctagagaaagctaccaaaaatgttttattctaggttataaattgctgcttatttttggcatcattgttttcttggccttggttatccagtagttaaggttatggttatggtttaagattctagaaatctagctatgtctatacagaatttagttttttatgtgttaacactggagctaatgtttttatggttttcaattttgttcaatttagcatatactgataaagcccattctatgtatgtattatgttcctgggttctgtggatataaagataaactagaaatggtttctacattggaacagctggccgtctattagacaaagacaggtctgaaagcctgaagaattatgggtactatgttataaaatctatacaaagtgtaatgagagtccacaaggggaagatcagttctacctgaataagggctgtgagtaaacacctaatggaatattttcactataacgtgaatgaaaaggactacttcaaaatatctgctgcagttgtctgtgcaagtgactttgagagttaaagtgactacaagttagaatttacatccatgaattagtggctcgtttgatcctttttcagcctaaatggccctttataaataggaaactgcatggttgacttgaaatagcactggagtcagaagcactggttttttttttgtcctcagctgtgtcaccttaggcaaattattgtacctttgggggcctcactatgttttacaaaatgtaggtacaacactacagactaatggcagtctctcagctaagagttaataaattctatgaatttctgaaaactccattatttgtgggtgaagtaaaagatatttgaaatcaagaaaaataaggaggctttttttttttttttttaccaaaggggctgagtataactacttaggaaaatattaaggaattcaccaagtgtggaagctatttagtctcatcatctcacacagtctagttttttatttgagtgttcaattcaggcaaaaacatttaaattagtgatatgtttattatagaacctaagtttgtaaagtgaaagagataccaacacaatttccatattaattaaatcagtcattcttagggctggctctgcattagaattacagtagaaggttttaaaaatacagatgcttgaacttcacagtggacctcctgaatatgattttctggcagaaggtagatggtggagcacataaaaaattttaagttcttaagtgagtgatttagaagatactgagaactgctgcgttgttgctgtggttcagttgcagagtcatgtcccactctttgcgaccccatgggctgcagcatgctggcttccctgtccttccccatctctcggagttaggtcagttgcattgatttaattgcactaaatcgatataaataactgatcttcatttttaaaggactttaaccaaaaatgtgcaaaggaatggaaatagccagctagaactgagtttgactgtaaccacacatagcaacactgctcacagccggtggacataaatgttcactcatttcaccttccttacttaaattgtttgctgactcttcttcagtggtctttgtcccctgtatttcctaattttgtttttaacaccagttactccacagtggtttaatcatagaatgatgttaaatctaatgttgcaactattttaacccagtgtttacatactagacacacaaaaaattatttagaagtaaagttgaatacaatcataaagaaaaaagagaaaaattccactcaataatcaataaatgaatagaagaagttaacataatttggtacttctcatgtaattaagtggcttcccagatggctcagaggtaaagaacctgccagccagtccaggagatgcgggagacatgggttcaatctctggggcaggatgatctcttggatgaaatgaaaacccatgccagtatttttgcctcaaaaatttcatggacagaggatgctggcaagctacagtccatggggtcacaaagagttgtgcacaacagagcacacacacacacacacacacacacgtaattaaatatcaattagtatttgtctataaagcttcagtgtggatgttgtaaagttttggtcatttagataatccaccggtttttctagctcaagaaaagctgtacagttaaggaaagcattataactaactgaaaaatcccatgttcaagcttaacagtattttaagcagtaacagagtatgtgagagttagatgagttttgcactatatagattaaggcaggaggtctgaaggcttattgaaatagatttttttgaagcacatttttccagcctttcctgcacaaatacactccttgctcttggtaaatagctgacattagtgacaccagatattacagtggccattttcaatgagtttcaataggtcatttggaagttgtaggaacttagtgtggggtttgggggtgggagggtgggggaggaggggtgtttgggaagcagttcacatttcaaaattgcagagttccaggtgagaaggcaagattcttcccatcttatttaaatattgagcttatttccataaagcacagctagtcaaaagtgctgtgttagaaatggttggaacataggcagacaagtattccttctaccttatagttttaaaataataaataattaaaagcataattctttggctaccttttgcccctaatccaaagtgaaaaaatcagaataggaaaaataaaaattaaatttcaaaatagtgatctcttatcctatacctcaaaagtttacacatgtttagagaaaatgctcattttttctgcatcctgttttaaaaagtgagtcaggatgggtcagatcctttggctaaagatatcatcgcagatatgtccttggaaatattatagagtggttgtacaaccaggctgcctgagaacaaattttgtctctactacttactagctttgatatcctttacaagttatgtaatatctctaaacctcaggttttttaaaaaaaaatctttaacatggggaaggttagtaagattattaaatgaattaatgcacaaaaccactcagaacagggcctcacacttgctaatcaatcaatgaatattagctattttcattatttacctgtttaagcctgagtattcatatttttttttaaaagaagatttagtctaagtaataatcccctaaattcctaatggtaataatcactatagacatttactaaatgatgtcttcccaggaccctcctttgaatattcttatcaataggattcctgggatatggccagagatttgtattttcaatttatacactgaattttattgggaataaaatttcagaaatattgacctaaatcatttttttttacttaatcatctaaatactcattcatccattggttcaacaaatacttcatgagctcttacaatttgcctggcatcgtattatgtgctaggagatagagtgatgaaccaagtactttttattcattagattttaggacccaagtacaggatattggacaaagaaccacacaaatctccatggaactgcaattgtgaagtgtgctataaaggaaaattacaaagtatgttgagagctcttgacaggggacatttttctaggcttggcaggagaagaacagatgggaaaggaggtttctgaagacctgccagaagtgatggctaaggttcttttaagctttgatattgtatgtcctgcacaccttacctgccaagaggagaagaaggatgctgggctgagtagattagggtttgcagggttgcgacctcccatgtactcatctgtgcaaacgtcacagttttctgcatctctccagtcccagtatggaatcgtgaagttctcatccccgctcagcttctggatttcctgttcccacagcagcaggaagagtctatgccaaggtaggaaacccggggcttcatgagcaaaatcaatgtctctccagacttcagagtccccaagcagcgtgtcccttgacacataataatgcatccagacaaagaggtcataaacactgacgtcattaaacaggggtgttgttccatgattcatttggccataggtgcccgtggggatgacgtagtctgggctggtggtatgttttgccaaagtgagataggcaagaaatttgttcttctctgggacactcaaatcaaagatgtttcttctcaccaaaagtcgcctttctgtgcagcggggtccccgaaatccaaacttacaacttccgcaattgaatcccatgaagttgccaaagcactggcaggttctgttataaaagatggtgggccaagactcccggtcgtccacccccatgaaggggaactgaggtccgagtggtgctgtggacagaatgacgtcctggcaggagcccctgcccgagagccggccacaggggctcccgtcgcccgcccagggtgggcagcactccttctccatcaggctcttggaggaggcacaggctcgagggaagtggccagcagaggtccggaaactccatagcaggcagtacagggcagccaggagcatttttcctccggtcctcacacggtctgcctgagctggttaatggagccacactcttccctttccagctccccactcagtgactatcacatgttttggctaagatctatataataccactcccacctccagcattaaaccctctcagcctttatctaagctttcatcttctgaaaaccacatgactaacttttctctggagttggcatatatcccaccagtgggataggcctatgttaaagtgagaaaccctattcaccactaacagtttaagttttatggttagaataatactaataataccatctgatctgcataaacccagttaatttactatataactagtgatatttcaatttgaaaataagaagtcatgtcaggaatagagcctctttattaagacaagtcaggtagtgttagagattttggacataagattgtttgtttctgaaagaccataaataataaataggccaaggcattggtaggatttggcttttcag

SEQ ID NO: 99 - DNA, 17506 bp, Hippotragus equinus
  source 1..17506: mol_type = genomic DNA
ctctctggacacattaaaaacagcagtatctgtttgcaagatgaaacgtagtcaaaagctaccatcaggtacaaacactagcctagccctttatcaccaagaaagaggtaaataatctcatttcatcctttaaaggaaaaaataattgccaaaggaaaaaataaaattatcttcaatgaaaacaaaagctctctaatttctctgatttgtattccaaattcatggctctgaccttttcttaaaactttaagcatcacaaggaaatcagtgggaaggcaatcatgtgctatccaaatacttaaagggcagaaaaactcactgaagtgaaaaaggattagtaaagggtagaaaagaggactggcccctcccagttggggtgcactgatttgggattagctatcaggaagaaaacccacaagcaattaaaagttctgacatcagggaacaagcaaatataaaacactcagctctaagcaaggttcagcagagaatgccttcaggagttcaaggtactggagagaaactctacagggagtgggtggattcccaccaaaactccatgagaatatggggacttgaagtcctggaaactaacttgctagaaatctgcccccaattcttctttcagctccatggataaatgtaattaatggtgctgacctgttaatgagtatttttgataaatgacatccataagaagtactttttatataaatagaaattaaaatgaagaaaattaaatgactaggacaggggatttaattacatagatactctacctgtcaaatttttaagggtaaattactatttttatcatttttgtaatgtcatcttacagacatgaaaagcattttgaagatgggttgggaagggcctcatgccatttataatggtacaaaaaaacttgcataatttcattttgctattttcttttcagcttgatttttatctacgtgcctcggtctctacacaaagggctgcaaaccagaagctgtcctgcattcttgcttcaagcagaatgaaatctcctacactcctctctctgggttacatgttcctggtcctgctttttttccagcaggcctgggctcagttcccgagagagtgtgctaccattgaggctttgaggaatggcgtgtgctgcccagacctgtccccactgtctgggcctgggtctgaccgctgcggtttctcatcagggaggggcagatgtgagctggtgatagccgactcccggccccacagccaccactacccacatgatggcagagatgaccgagagggctggcccacacgcttcttcaacaggacatgccactgcaatggcaatttctcaggacacaactgtggaacctgccgcgctggctggggaggggctgcctgtgaccagagggttctcacaggtaagtggagactaaatggatgcacagtcctgcatggaactcaacacatttaatattgtagaccttctaatcagttgaggtttaagaactcctagaaattgtaaaactcaagccttacttttcatagctgaggaaactgaggcttagagaagctaagaaatgtatttaaggagttgaagttgaaactcaggtcttctaactaataacatttcctttcaaaagatttgttgagcagcccctttataataggaacaatgctagatgtttatgactagacctttcagtaactttgcaaggcagttatgttaattgtgaatacatattagagctcagaaaggtcaactccacataactggtatgtgggaagcctggagttcacactgagatctgtccagctctaatccatgagcttcctgcacagccctagctgaccacaaagatgttccccactctgatgatcaagttcagccattctacagggtgagcctggccggcagccgaaacaacaataaatgacagaaatttaaatagtaacagccagcaatactggattgttctctctgtgccaaacatgagatcaagagtttcacaggacacttactgagctttctgttttaaatttacattattgtgttagtttcaggcggactgcaaagtgattcaattatgcatatctatttctttcagatttttctcttataggttattaaaaaagaacgagtatggttccccatgctatacagtatatatttgttggttatctatttcatatatagtagtgtgtacatggtagtcccaaactcctaatttatccctcccacctacccctttggtagtcataaatttgttctctatgtctgtggtgagtctttattatgaaccaggctctgggccaagtgctttttatgtgtgtcctctttaatcattacaactctataaagcaggtatttctacacatactttacagatgaaaaactgatgcttagagaaatatgtgccaagtaacagaattagactctggtcctaaccactatgctaaaccacatactatatttttgcaaaatttatggtattaaaaggcagaaaattacaagaaatatgcaaatagtgagcagaaatctacaacaggatcatagaatcataaagtccatggtaagattaaggaaagctcttactctatatagagtaagttggagaaagagggaggagatcagagggagaaagcagacatgaagaagggattttagcaagggatattttttaaagtataatatgatgtgagcacagatgcaaattatcattcatgggttagtgggacatggggttacaagatgattgagtattctctatccatgctcacatggcagatgttttcacatttgaattttgtgtccctaaagtcaggagaaaccttctggacttaagcacagaagaaaagaaccgctttgtccgggctctggatatggcaaagcacaccactcaccctcagtttgtcatcgccaccaggaggtcagaagaaatattggggccagatggcaacacaccacagtttgagaacatttccatttataactactttgtttggacacactactactcagtcaaaaagactttcctgggagcaggacaggaaagctttggtgaagtggatttctctcacgagggaccagcatttctcacatggcacaggtaccacctgctgcagctggagagagacatgcaggtatgcatgagacatggccacattcgtatcctttacagagaggggaccttgtttgtacgtcattaatttactgtgtcctgaatgatcaaaataggtgatgacaaggcaatttcacgttattaacctgcctttggtgttctgttaagtctctccctatgctaatcacttcctcatttattaatctttatcctttgtgaagtgaaaagaaagtcacatcaatggtcaggaagccaaatgaggtatttgtaggtatgaattaaagcattggacatagtctacaactctgtcattgaaaaatgaccctcatatagtttgaaacaaaggactctcatttgatctgtctcccttctgaaatgtaaaccaatagcccctcctggtttggatgaggaaagtgtatatgacttttcagtcttccaagttccaaatgtatagctcattttataagttgatgattttgtatcatatatacaggatttaaagtacaaaaataatacttttcatttaaattggcatattctaattgaactcctgtgtttccatgttctccaccactttgaggctcatagcagaaacctactaacaatatccaataggtcagacatcattttaatctaaagacattggcttttttagcatgaagtgaaactaaacagttatttccagtttatttttaatcagataaactaaaatcacattaaagtagctgttaagatactttcttattgtctcttttactatttgttctattttaagaaaagtattgtcattttgaaatgaatttaaatttttttcattattgaagtacagttgatttacaacattgtattaatttctgctgtatagcaatatgattcagttatatttgtttggccaaaagtttcatttgggttttttagtaagatcttatggacaaacccacacaaatgttttgaccaacctaatacatatctatgctcttttttatactttttccattatggtttattatagggtattgaatatagttctctgtgctatacagtaggacactgtttaaccattttacatataatagtttacaactgtcaatcacaaaccaatttataaccctttaatagtcttagagctcaactaggaaattgacaagttgaatctgtcttctaggtgaaataagagcaatgattccctccccacaaattaaaatctaaaaatatctgagggcaggaaaaaatatctgggggcagactcatgtattgatttgcagtatgcttattcccagcattatccgagaaaataaatggttagaagggagagatttaaagcactaaaatacagaaaaaaatattcatatgtacgtactccatccgtatgcagtctgagagtgattaaatgaattcagctgctactctgaacttcatattttatagctctgatttcacataagacatttagtagattatgagtagataaatctgtcatttgtaatcaactccagatcttcttgccttcaagtcattttcccacgagtgcatcaaaatgaaagggcaggtgttaagtatctaaaagcttcaattgtgcctgtgtaaacttcaacctctatgacttacattttcaaaacccaacttcacaagggatccaacaaattataatctaaatgtaatgcacagttgaaatgccacatgaatatgctccagctcccaaatgccagttgctgaaccacaaactgactcttaatgatccctcagaagctgtcactaatctttgtgaaccaggacaatggctgctcaacaaggcctctaaagccctggagatcaataagaagggatgcactggaaagcttttgaccctctaaaataccccaaggacaaggatatgcttcctagaaagggtttaagagaaaaaagcagaaaagtactaaatgtttgcaaggtgagattaaacaatggcaatccctacatttatcccacactctaaatatagttccccaaaggcctaaaggaatgagaaataataagtacaataaatatatctttaaaggaacccaataaaataagcatatgatcttgagcccagcatttttttatttgttgagatcagctctaaatggaaactaggtccctgggctaaagaacagcatgctcagaaaaatattcagcttctgttaagcatttcctctctatattggtttctggcaaaggcctgaatcttcatagtttagattctgaagcagaggtctctaagtaaaacaccaggcgaagcctctatagtgtgtggccaaaatagaatctaatgcttgaagttgattcagttaaattaaaaagcagaaatgaaataaaaagcactgcttcacataatatatctcaaggctggatccagctccagacaggagtttgtgatgcttcaattagagataggaaagtggaaggaagtgaaaatgtcagagagtagaagttattgttgataatttttagtataaccaacttgcctgaaaaagaaaagacacctccccaaagcatttgcagaaacttctgtataatgaattgagtttcattccctctagtgcctaagtgacttcttgtagtaaatcaaaagctttgttaaataaggtatctaagttcactagccctgcagacacctctgacacactaactggttcccaagtggctgagaaaactaatagaagcagactgccagggagtaaaccaagcaaagggagaattttaaacaaaagcagggcatgctaacagagtctctgtgatctaggaaatgttgcaggatccttctttctccctcccttactggaattttgccactgggaagaacacctgcgacatttgtaccgatgacttgatgggatcaagaagcaactttgattccactcttataagcccgaactctgtcttttctcaatggcgagtagtctgcgaatccttggaagattatgataccctgggaaccctttgcaacagtaagttccaaatgacaactaggatttggaattccctattagataaagagattaaatgtactgcccaaaggcccttcattctcttaaggacttcagactaaagttcacttttattatagagaatggatatacagatattcactaagtacctaggatagaacagacaagctggggtgctccagggaaaaaagaaagtgcctatacatttttccattgctttttctgaacaacttggttggtgcattgcttgcattcttattttggaaatgtctatttgtattagttaatcctcttagtaagcccagcactgctttgtggtcatgtgtcttgtgctggaatttcacagaaaatgtgtccctaggaaatgtgaaatctgcagaaagaattggaagtaccttggggagtaaaaaatatacatttaataataataattgttatataaagattagtattatattattatattatttttactattatgtcactttgatttccaaccttctgactagattaacaaagagaatgcttaaccagctgtcctaacatctttctccagtggtctgaatgccctctgccataggtcacgtttctgacttttgtggaacagttcctgtgaagctgtctgttctcttccttggatcttatttttaccatctcccttgatactaacacaaggtcttaattatcagagtctttctatctcactttatttttcttcttcaggcatgtctaaatattttgaacttttgttcttccatataaaaactagaagtattgaatttttttcattattgtactcataacatttattctgcacatatttttaagcaccaaatattaaattacactgtaaacttagaatattttaaatagaacaacaaaattaagtaggctttttaccattagattatttagctgtatacaggaataagagaagttaccatatataaaattttattctatataaatataaaattagaatttttgtttggtgaaatgagatgaaattgaggattggtgtatatttgggtaccaaaacattcatctctccttgtgactttttttttaatttacttgcacatggacaacttctgtcattgcaccaattaccttactatagattagagtcctgtgggattcccatgcaggaatgaatgaaaagttcagtttctgaagtagaaagtagatttgagaagaattgtaaagaaaaagaggatctctttcatatgataaatcaaaaatagtttagtggccggatggtttagtggctagaagaatattcagttcagttgctcagtcgtgtccgactctttgcgaccccatgaatcacagcacaccaggcctccctgtccatcacaaactcctggaattcactcaaactcatgtccatcgagtcggtgatgccatccagccatctcatcctctgttgtccccttctcctcctgcccccaatccctcccagcatcaaagtcttttccagtgagtcaactctttgcatgaggtggccaaagtactggagtttcagctttagcatcagtcctttcaaagaacacccaggaccgatctcctttagaatgttaggtgtcaataaataactccttggtggtggtttagtcactaagttgtgtccaactcttgtgaccccatggacagagcagcctgacaggctacagtccatgggattctccagggaagaatactggagtgggttgccatttccttctccaaaataactctttaatgtaccaagtttggtacattcctggtaaatggagagagactgtctagaaagcatatgagaacatatgcatgggatgtccaaggaagttttgctctaaagatgtacttgtacgtgtgtcctgtaaaagatgaccagtgaaaccacagggatggataattttattggagaagaaaagtagagggaggaaagaattatcatgaggattaaatattttatcaatgcatttggcatcatatcagacacattaatgggtattcaataaaatgttatttttccttttttctttcatgggcctgataaataaaatagttctggtctaacttcctttatttcctgccatccactacccgcttccattgccacattctaggctacctgttcacctaacactctctcatacaaatcaaccttatcttttcataagtcaacatacaccaaacaactatttagcttcaattatttgccatccctggtggctcagaggttaaagcgtctacctggaatgagggagactggggttcaatccctgggtcgggaagatcccctggagaaggaaatggcaacccactccagtactcttgcctggagaatcccatggagggtggagcctggtaggctacagtgcatggggtcgcaaagagtcagacacgactgagcaacttcactttcactttcatatgccatctacttgatcaagactggaggacatactggtgatcaagaacagagtttgtgctctgatggggcttatattatgcacagaaaaaagcctgtcatcctttattattatctctgcttaaaaatgtttgacttgtttattttttctcattttacttctggcaatttttctcagatcttcagggctctttgcaaatctgtttacccaatgaagtcttcctgaagctgcccaattgggaagaattagtattctctctttttttttccctctctttttccttccctccctccctccctcctttccctatttctttctctccctgcctgtctccccaaaggcatctttatattcctagggatatatattttccctagtattgcagccctttgtttacctgtttatcttactgaccttcaatacttttatttttcaccttatttgctgaaaaatatgtgttgattgaaatatagatcacttcccaaagagagttaaggttgttttaacattatttctttgaaagcttgaaacaacattcaagaacaaaattccatgtaatgtgaaatacagatttcagtatagaattttggtttatgagattatattcacaaaatttaatcttccacagaacttctgttttaacgtgttctcttgaaaaaaagagatttaacatatactgatatgttaataacattatactgatttaacgaatacaaggacctctatctgtttttacaaccatttttttcttcagatgattttatcacatattttcccttttcacagaagttggacatgataacctaggttttatcactttaatactgcagaatatgcatttgaaatttttttctcttctacaaaggaaaacctgtctttctgtgttcaagaccccatgtatacaaatttaataaggaaagctaagatctctaaatgttctatacgtgttcacataccccatctttttcccaggcactgagggtgggccaattaagagaaacccagctggaaatgtggccagaccaatggtgcaacgtcttcctgaaccacaggatatcgctcagtgcttggaagttggttcatttgacacacctcctttttattctaattctacaaacagtttccgaaacacagtggaaggcaagtaaacaaaactggtgctatgaattgatctagttgttacaggaaaaatccaagtgttcaaatcaaatctctttaaaaaaaaacctttgaatgccgtatggaatctgtgataggtatgtgatatgaatagggctgcctataattatatgttcacagtcctctgttcaatagaactttcttaaagaaaagcgtaacccctgaaactctttttatcacaagagaatcctttggaaaggatcctccattctcttaaaatacctaaaaggtatttaaactcaaatttctattaggtggctggccaatatggatataactatatcaaattctagtataggcaaataatattcaagacttggagatattttttttttttcttaaaaaaaaaatcctgcacatccaatccgttcagttcagctcatttcagtcgctcagtcatgtccaactctttgtgaccccatgaatcacagcatgccaggcctccctgtctatcaccaactcccagagttcactcagactcatgtccattgagtcagtgatgtcatccagccatctcatcctctgtcgtccccttcttctcctgcccccaatccctcccagcatcagagtcttttccaatgagtcaactcttcgcatgaggtgcccaaagtactggagtttcagctttagcatcattccttccaaagaaatcccaggactgatctcctttaggatggactggttggatctccttgcagtccaagggactctcaagagtcttcttcaacaccacagttcaaaagcatcaattcttaagtgctcagcctttttcacaatccaactctcattgacatcagataaaaagtctggtttggacatatgtatcatcttgaaagttttgttaagatccacaaaaaatcaaactagcatctagagatatttaatttgattttctttaaataattcaagtattttaaagttgagagaccgagttcaaagaagtgaaaagatatctagctagttagtaacagaacacagattcaaatcaaaaatttctatgtcctctaaaaattatatcatttataattattttataaaaaaaacttttatatctctaaattattcatgatacatatttaaagtcttaaaagaacagaatcatgtttaattttattataaacttgttcttgtcaaatttaaccttaaatacagtattgtacatgtcagaccaccctccccccaactgaaaaaggtaatagatctctctttcccttgatctaagatacttgatatatagatctgataattattttcaattatctcccttttatcatcaaaattagatgccattctttcttatttttatgttaattttaataactacatatgaaagcactgatttggagattcctcaataatcagcatattttgactaagctggtatttataaactaatgctgttaaatagctattctgtaaagaatttaagaatataagagtgtattttattgatgcccaatcaaaagacaaattatactgattcccagacagaatgtacaaaaaggttagtgcctgaccatgtacaatgtaggcaatctttaaatgttttatgagtcaaaaaataatagaataaacatataaaaaagaataatgaataaatgaatagatataattacactactgagttaatgcatttcaaattctaatattgcttttataatatacaggcataccctgctctcccatctctgatcttcgagctaaccacacacttataactgcatcccacatcagagactccctaccttcatttgtgatctatccatgtcttctccctaatacacttacatgaacaatatgtgatgagagtatatatgggaagtatatatcttatatataacatatgggaaatatatatattatatgtaataagtatgcaatatgtggattatatataaatggggatatgtatgatacacggctttccagggggtacaatggtaaagaatctgcctgccaacacaagagatgtgggaggcgcaggtttaattctgacaggaagattccctcaagaagaaaacagcaacccactccagtatgattgcctggacaatcccatggacagaggagcctggagggctaccataatgggggtctcaaagagttggatgcaattgagcatacatgcacatatatgaaacatacgtgaaatatatgtagtgcataatatggaaatgtttttggagaagatataaatatatgtgtgtgtgtgtatatatatgtatatatatatatagagagagagagaactagagagcattctcaaaagttctataaatgttttgacatcagtcttttcagatatttaaaactagtacagagatgataaaaaaagctctgagaaattctaacttctccacagaaataattgtctaaaaatagacatgcagacagtctgaaggagtaaggcaggagactaaagtaacatctggcaatttaagttcagggcaatcagagcagtgttctcccaactgtatcagcagtttttgtagaagctagagacttccattgtctttatttccatgtagaacaatgttgctgctgctgctaagtcgcttcagtcatgtccgactctgtgtgaccccatagacggcagcccactaggctctcccatccctgggattctccaggcaagaacactgttaagaacaatgttagccttgtcacaatagagtgctttatatattttgactggtatcctttgcaggtcattatttttaacctagaggctacacttagaatgtcatgccaccagcttcaaactaacctagctcttactacagcaaacaaatgtcaccaaccacaggaacagagaagctgtgctattacactaaggtaaaaattggcctgacaagctcaggaaaaattgtttcccaatataattaccactttagacttaaaaagtcatatatttgtaatggattttactattctcatctttatttttgtatctaggttacagtgatcccacaggaaggtatgaccctgctgtgcgaagccttcacaatttggctcatctattcctgaatggaacagggggacaaactcatttatctcccaatgatcctatttttgtcctcctacatacattcactgacgcagtatttgatgaatggctgaggcgatacaatgctggtgagactctttcatatgctttttgcaaactcagcaaacaagactgttcagatggtatagttatcactttaggctaagaacttgacacatttaaactatgctttacaataggataaaatagctctaatatttagctatttccaaatattttaaatcattcaaaaggcagataagaagtctctcagtatagtaataaaaagatgagacttattaacattcactaggactaaaaactaatcccttcacctctttaccatgtaaagatgactaactaccatgtttccccaatttttctttctcatatcttccagtgaacatcctcattgcttttcatatgaatgtgaaaaccttaaagagctcttctttgataccccaaagacagaaaaattatactcataaaccacagttctgatttttattactttacagcctctcacaaatggaaattttattcaacttgaaaagttaatgctagtttttatatcacaccatagaacatctcttttaagttcattttaatgcattctttaaaatgttatttagaggctactttctcttcactctgctgagagggttatattactattcaaactatgaatgtgcttttactggttaaaacatcataaattttcacatttaaaattgttctaaattttggctcatgtacttttatttcatcaaggacataaacataatattggagattatctatggattcatctattcattcagccaccttttacttctgtgcttgcgtgtggtgtgtgtggggggtgtgtatgtgtgtgcgtgtgtgtgcgtgtatgtgtatgcttgtgagagagagaaaatacagtagtggattctaatctaacctgatttggactatgaattgatgagttggtcaagagtttgtttcaactgaaaagcatttaagaaataaatagcctaaatataaatatttatctacttataaatcttctatgaagtcactgattggagttccacctgatttttcatgtatttttatatgtatacatgccaccataatgaattatctataatttgcactgtctgtttctttaaagtgaaacaagaaattcacaacccttgtgatgctgagtacagcattatcctaaattttcatgtttccctaacccgttatagtcatagttgccactcctaattctacagcagtgttatagccagtcattcttaataaatctttccaaaacattccatttgtttattataaaaacacccttctctttttacctttataactatcagtttatgaatgttttattatactacttttatttcaataacaaataacctgaattaataggtttatggatgaacaaaacacacttttattagacatttacgtctggtaactagacagcaatgtataagctgacaacaagcatatgtaaatagatacagtgtatgggggagagtttctttgtagacaagtaatattaggaaaggggatagggaggactgtgtaaatagataaagaaagatggtcctaagaaaggaacaaagcagccactgttgctggagcagagtaaggagggggatgaaaaatggagggagatgacaaggtcagaggaaaaactggagcagatccttaaaggcatgggatttaattctgtaagagatggggaggcattgaaggatctgacatagggaagtaatattgtaatgcaattgttactttcattagttttttttcctccatttattttaatggacataactttttgatgcagctgaaactgagctgagttgaggctgattcagtaaaaaaaaaaataggaagcttaaaaaattatctaagttattatctttaatatctaactttaataagtaattagtaggagtgctttgaggtcaggaatcctgtctttggttcaatgctatagctcatgtgcctaggtcagtgcctggcatgaggaggaacacaataggctttaatggatacatacttaattaccattaattcagagtacatttaaaatcattaaattttaaagtaattaaatttaaatttacaaaaatataaacactacctgccatttctatgatcaatgtttcttcagagtagatgttaaaaagttctcctatgcttcacaggattgcagtgactgtcccggtaatatacttcttgcaatcagaaaatctaatacttaactagccttctcacatattttagctcttctaaacttatccccactaatgtcttgcccaaacccacttccaattctgattttgtgacattccacttggcatttaattgtaccaacataaatataaacaacaacaacaaagaaagattttttgccacaaacagcatcactcattttatctctgataacaacaactcactaataacataagtgcctatgatttgtatttaagtagaaagatgaaaggtggcaagaaacaaatagtattataggaccttgattcgataagttaaacgctttttgataacagagtaagaatccagggaataagctcacatttattgctctaattaaacagaaaaaataaaaagtactaaacaaaaatatgcatagtcaaggacaaacctccatcagatacactgcctcctaaatttaaacaatagatgttgctacagaaaattacaggttcaatctttctttagctttgaaaagtaagtttaatgaattttactgaaaatagtttctgtaatttaaaagtaaaacaactaatgattatcatagataagaaaatactaaaacttccttacttttaaactttctttttctattggatgacatgttactattgtactcaaaacgtttgagctctgtttcatgcaattcccagttctgctgttataattttttatgtcattattcagtataaaatatgaaagaacttttattgttacccttgaacaatttaagtcaccttcagaacataataatatattaatacaaacttattatgtctattaacaaggtgtctttgacatattttagatatatccacatttccactggaaaatgcccctattggacataatagacaatacaatatggtaccattttggcctccaattaccaacatagaaatgtttgttactgctccagacaacctgggctatacttacgaagttcaatggccaggtgagtactgaaaatgtatttttactgtggaaatttccaaaatcaaacttgctacctttaaagtaacctcagttttctgagataaagtaacccacagctttccactatgattaaatagctttgtttgaatttttatttggggataaagagaatgaatttaaaatttgtcgggaccctattctgacctggttgagctggttacctagcacactatttcgtttaatacttacagctctctgaggaaggtattaaaatgctcattttacaaataaggaagatgagatgatagtaattatcaaagatcaccttcctagaagcacagagaatgaattctgagcttagccctgtaaaatatgccctgtgtaatatactcttatttttctactacatgaatgtgcttctagttgtttatcttaaaagagatgaagtgagacactctgagctgttttttgagaggttatgaaattcaaaatctcctcatttaattttaaatccttttcttaatcaaggcaatggggtacagtgggagagcacagaatttggatcctgaaagatctgggctccaaaaccagctccaccatctattaaccaaatgaccttgggcaagtgatttaaacactgagccatcatctcctgaccttcagaagagatataataactatcccactaggatgcagtcgttatgagaaactggggagtgctttgaaagttcccaggtgctataaaggcaatgtggccaataaaaattaaatacaaggattttgtcaagtgcctggaacaatgcctacatttagggtatccaattttggcaacgattttactatttattttttgttctcattttattttcaaacaggtcggagttttagtattcctgagattgtcatcatagcagtagtggctgcattattactggttgcagtcatttttgcaggcgcctcttgtctgattcgtgccagaagcaacatggatgaagcaaatcagcctctccttactgaccagtatcaacactacattgaagaaaatgaaaaaatccataatcctaatcagtccatggtctaatgacaagtgtaaattctcatatgcatttgaatcataaaaaccacacacttagaacataataggtggagttactaactgtattttcttttactctgttacttccttccttgtgcatgtccatattggaattataatctccagatattattttccagaactggggaaactcacaatcttttcaatggtttctatttttcagttctacttaaaaaaaaaaagaggagggtgtagggaagggaggcggagtggggcttccctggtggctcagctggtaaagaatctgcctgcaatgcaggagacatgggttcagtccctgggttgggaagatcccctggagaagggaaagactatccactccagtattctggcctggagaattccatggactacagtccagggggtctcaaagaatcagacactagtgagcaacttttactttaaaatggtaggttgtaccaattccatggtatttaaacaaatatgaagatttggggcatgtt

SEQ ID NO: 100 - DNA, 77996 bp, Hippotragus equinus
  source 1..77996: mol_type = genomic DNA
gaccgtctgcagaagcccaccaggtgccaagcctattatgtgcaggcagtggagtacattgtacacgtgccgctctaagcaggcttcaaacacggctcccgctgtgggggcctgcaggccagagtaggggcggggagtgcagccttgcgggggcgtggccgacccgccgggggtgtggccggcgaggggcgggcccagcggcggaaggcggaagctgcctgaggtcacctgactcgggaaacatggccgccgcccctggcgcccggcaggcactgtttctgtgagctgctggctggcccggggcagggggacggaaacgaggtccacgccggggctccgaggcggcgcgcggccccgcgagactcgggctgaggcggcgtggcccatgagccgacgccggaggcagcgcggagccgcagacgcccctggccccggcgcggccccggctgccgcgggctgaggagcctcggggctccgggaggcgcacccgcgctgctaccatgaacccggagaaggatttcgcgccgctcacgcccaacatcgtgcgcgccctcaacgacaagctctacgaaaagcggaaggtggctgccctggagatcgagaagtaagagccgcgggcccgggcgcggggagtggggccggggctccgtcctggctgttgcggggtccgctcctctgggagccggggctccgtcctggctgttgcgggtcccgctcctccgggtagctgctgatgcttttgcagccagtgttgctgccccaagctttaggccctcagtgccgtgcttaacagcaggaaatgggcagtatctcaaaggggctgcggtgagagtgaagcgatattgtgtatgtacggtgcttagcccagtgcctggtgcatgatgcgtcctcagtgtggtctctaccaaaacgagcaaatccgagagtgatctccgatgggaaggaggtgggaagcgtgagagtttgctatggatgttgatctgcctcatttcttacccactttttgagaagtgaaaagacaataagttgaccaaatgaagaagtcaggtcccaaatctcaaggctcaagagggctgattgttttatctctgtcatatcacccttctccaaaagtggaagcaggaataatttgtgtttctgcagtcttaattacatatgcagtagcactctcttgtttgtgggggatatgtccccagactcccagtggatgcctgaaaccccttggatggcaccaaattctatatatgctatattttctcctatacatacagatgtatgataaagtttaatttatgatttataattaggcacagtaagggaatatcctgtcagcatcactactgttgcactttagggctgttattaagtaaaataagggttacttgaacataagcactaccatatcagagagtcagtctgataactcagacagttactaagttggtgcgtatcatatacagcatgaatatacaggaggaaggggtgattcatgtcctggtgggacatcacgagatttcatctcaacactcagaacagcgtatagtttaaagcttatagattgtttatttttgaattttccgtttaatattttctgaactgctgttaaccgttggtatctgaaactgtggataatggcattccactatatgtgtaaccatgacctgacattttgcttggttatttttattacaaagcaaggtgtttaactgggaacattgagatttttctactgttattttacacgtgtattttttttccagccaaatctttgtgacaaagtcaggtgggtaggtaatttcagaagagtgggaagaggcaggctgtgaaacagaaagaatgccagtttaagcatcaggaaatagaggttttagttctgccctgtccagtaaggtagccactggccatgagtgactatttacattgaaattattaaagataaaataaaaattttaaatatagttcctcagtcattctgcctgtatctcacatagccacgtgtggctgtcggctgccataatggacagcacagattttcgaacaattccatcactgcagaaagctttgtaagggcctagtatagtctgttgtgtgatgctcattctgtaaccgctggcaaattccttaactaagggtttcttaacctcagtgcttttgatatttttggacaggtaactcttggttgtggtggactgtctctgatctttacccaatagacatcagtagctttccatcactagtacaaccaaaaatgtctccagacagttgccagatgtttcctggggatgcagaatcaccccagttgagaaccactgccttaactgctttggtttcagtttcctcctccactaaagggtttggattttgccaagatgaccctcccgttcagctctaagattcagcatgtccagaaccacgcttctctcatcaagcaccccttttcttgagtgccgtctctccccaccgctgcttgttgttgccctagctttcgccattgccagcaaactgtactgatgagtattgctctagtgagtaggagactcagaactgatgtacagacttggctccatgtctgtggttttattggctgaaggtacagtgacactggttttgtccatcacccgctctgcttctcagaaatgtttgctattttcatagcttgagtcattggttgagtccttgaatagaggtgttcatctcagccttatcgttgcttccagcacatcctgtcactctgtaggctgtgctggaaggattttgtctttaatggggtttgtttagtgtttgacattgcctttggcttgtggagctgggaacgtgaaacgtgtgagaaagaattcatgacattcgatgatgcggtggtgagcgcagaatgcagcgtccagaggaggagtggtccttcctgagatggtcagcagaagcaggggtggattggagctggcgtttgaggcctggctaggcttgcctgtggggtggcctggacaggaagtgtccacggagtagactagcagacccagtaggaagctggggctggctgcagggaggttgcgcgtgtagccagtctacagactggagaggcagccggccctgtgttgaccccctgtgtgtcaggtagagagtgtgggcctgatttgtgggacaggtcttcctgctgtggccccagggtgaccccaagggcccggcccagtgctctacgggtggatggatttgctgaccacctgttctcagggtttgccttccagaagaaaccactgtttgtcttgttctcctggctatggacagtattctcccgacaagtgcaggggtgcagacagcagagacttggggttccagagccttgggacttgaaggggctattgtgtctgtagtgacctgggatgccctgagctacatcctggtgggattcagggtgaggggccttccagctggtgtgaagcaaacagtggggtcggggggtgttgtccatctgcttccgcttccggaggccccattgcccttgccagcctgccccgacatcggtgcccgttcctcgtgctttcccagcacccggtcttgcagcctttccagtcttcagcactccctcagtgcaggtcagaccacactgcccaccgctgcggaccgtccctaccatttgtggctgctcacagaacaaaggacacctcctctgccaagcccgtgagtgggcgcagcctctccccaacctctgtccttccaagctgccaaaccgagtgcccctgtccttcctctgagccttcactcatgagcttccctctgtctgagcttcctcctcccgcacgaacacctactcatccctcagaacccctctcagaagctgcccctcgtgaaaccacatcagatcccctctgcaccagagatgcttcacgctctttctctcctgccccctcctcaccttgcacggtcctcaccagatttcttttctcttttgcatgaaagtcctcatggcctctcgtttcccacccaccggattctagcagaagctcctcaggcagggaatgcaccctgtttgctggctctccagtgggccgggggaccccttccagtggctcagcgaccgtttgtgacctgaaacaaggagatgggccaggaggtggttccaggaggggctgtgctgccggccgggctgggtcttctgtggctgccctgccagagcctcatggaggacgttactttgcgtcctggggctgcgcttgtgtgggctgagcagaagctcagcctggttccccgggagcctcgcaggcagaggccgcaggcagcccgtctgggcgggagtgggaggacagctgttcgcagtggctttggtgacccctacctcctggactcctcaggaacgagaagagaacgagctagatctctgtggaatgtaggagacaggtgtggaaaatcaagctagaaaaagtcattctcaggtttgcagagtgtatcaccaacgctatgagtggtgtgaaatctcaaatccagtctcttggatttttttttttttaatgattttttaaaaaaatgtttgctgctgcattggccgggaatcgaacccgggcctcccgcgtggcaggcgagaattctaccactgaaccaccaatgctccagctgtcagcagctgtgtgagcacctccctttaaccccaggaccagcctccttgtccacacactgatttccagaatccgaggccatgctctgaggctgccacatcagtaccgctgcagaagcagaagcttaggctccagagcaggagagggtgtgtgtctttgatttgccttcatccatcaggacagaaaccacctcagatccttccttctcagtagcaagaagccgactgagactccaggggcttcttctctgaagtgtggttcccactcccctgtccacatgcatgtggagctgtttcacagctcacaggcttcatcacagcttcctgctggagactggccagggctgggggtgcacaggagtcccctgacggctgcagggcacgcgggccttggccccgcagccaggaagtggcgcatgtgtgggaatccagctgctggacacgctcaccgggcagggaggtgcgctcggcttcacagcagccttggcgtggttgaggagctggctcctgtagcaggatctctgagggagtttgcccagaagaggccaaaaaagcagccctgcattggccgggaatcgaacccgggcctcccgcgtggcaggcgagaattctaccactgaaccaccaatgctttgctgctctttggctcacctgcagggcctttctcaagggactgttgtctgtggacactcagagagctctgacatcactgagacgcgtctggctggggtcctgtttgggaatccagcgggtttattgcactgcttagaaagtgtgggcacctgtggaactgccttcctcccgaggcccttggtttgtccacacccctcaggcgccgggggtgggaggggggttggtggaatcacacgctataacaggcaaagcaggaggccccccacaggccattcatgcagccttttcccggcaccccatctctgctagtcccgctcacctgatgagggaacagtctcctccccccatccatctcatggcgtcttaaaacacaagtgtctctacccttcttgtcctctcccctattacaggggatcctaatgcttttctgtttaatttaaaactatccctccgtgctccttcccactgcctccgccatgttcaagctccctctttcggctaaagagctggggtgctctccttctgtcaaaccagccccctcccatgcggcgcagcctctccaggtccaaacagaggcctgcaggcgccaccgcatcactgtaaacctttcaccagctcctctgtcctttgatctgccttcagccgctcctcccacaccctaggctcctcaccctcctctaagtacaccgtgtgttttcagggcccccgccgttagccaggctcttccctgtgcctaaggcgcccagccttcctttcttcacctggaaaatgccagctcctgactctaaggtctgactcagttggcagcgccctggccgcccagggagacttccctgcagcacctggcttctgtggtggcgcctgtgtgctgtggccacacctacttgttgtgtgtggatcctgcctgttggacgggggcccagttcagccccgtccctggaaataatgacagagaagcgcctgagtgcctgaatggagggctgagcaaagggttgaatgaaggcggaggatcactgcaggttttggtccccagcacaacattcgctgccttctcagaattggggttgctcactgttctttgttccatcctcaataaggggaaacggagaccagaaaaggggaagggaaagccagcctcccccagtcagcagcggagctagggcaggacccatgactccggttgctttttctgggcaggtcctctgcacccctcatcccggcgccaggccccggggccagcagcaggagcaggagcagcctgatcccactggcctcagaccctctcttctctctctccaggctggtccgggagttcgtggcccagaacaacacggtgcagatcaagcatgtgatccagaccttatctcaggagtttgccctgtctcagcacccccacagccggaaaggggggctcatcggcctggccgcctgctccatcgcactgggcaaggtatgcctttctcctggagggatgcacacaccagtcatggccttgactgcccctgcccccaacacggggttgcagacccgtgttttccgttgccatccattctctgcacaccccaggccagcaaggctggcgctgcggcctgctccctggttcctgggcgtggctcctaacccaagaggccgacttgcctttgagcccagccctcagtcgaaggtctcagcatctccgagggagccgggggctaggatcatgggatccaactgtttctgagtagcgcttgtgctcccgccccgtcacaggactcggggctctacctgaaggagctgatcgagccagtgctcacctgcttcaacgacgccgacagcaggctgcgctactacgcctgtgaggccctctacaacatcgtcaaggtggcccgaggcgccgtgctgccccacttcaatgtgctcttcgacgggctgagcaaggtgagccctctgcgctctggctgctctgagctcctcccccgcctcctgggcctgaccctcggggccttgagtgccggctgcctctccccagaggcagggaagcagataagcacgtgcggccagggatgctccttatatgttgaatctgatgatacgttgttaaaatgggcttgtatttgcttccccccgcatctcttttactttaatattactgcactttacaaaagcatcagtccaccacaagttggggggaagacagtcatttgagagcactgacctccctcgtaggaggcgagggtggcgattccatgctgttagttgcacagttggtgcgactcttctgcgaccccagggactacagcctgccaggctcctctgtccatagtgcagactgcgtttcccctgtgaggagagcatagcccgtgaactctgggaaagctccgcttagaatggctctggggtccctcttagctcatcagcgcctctcagcatcaccgagtttccctccatcaagtcatttctagagaatcagtctcgaaactgctccggcccctcctccaggagtggggagaggagccggcattgttaggctggaatgccctggggaacaccagcgggaagcagccgcgctgccagtggcagcaggccctgcaggctcctgagcagagcagggcccccgagcgcatctctgcgccttccccagttccgcgctgcctccctgcctcccctaccttccttctgtctgtgaacaggctccccccaaggccttgctataggattccagtggattctttgccttaataaattgactgtgatcctttttccacctctgtgtctcccgtagttggctgctgacccagaccccaatgtgaaaagcggatctgagctcctagaccgcctcttaaaggtattagtacttggtccccacttttagcatttccttcttatttctgtctgtggaactttgaagcactatcattgggatgttcttcctaattaaaataatttacatgcagtaattgagataatatacagttctgagtatatagagtcacatcagcagcagggtcaaaatacagagccgtcatcgcccctagtgttcccacgagctggcccaccctgcgccccgtgtcaggcagcgtgtgctcagctcaccggacattcggtccagaccgcagagatgtaggaagggttttgccttttcattgcttctgttccccttgattccctctctcagcccatctctgcttgtccctcggcctgcctgacgcaggctctgtcctcctctctggccacctgacccctggagtcaggcactcggccaggtcaggctccccagcccccagcagctcatacgcctttgacccccaggacattgtgacggagagcaacaagtttgacctggtgggcttcatccccttgttgcgggagaggatttactccaacaaccagtacgcccggcagttcatcatctcctgggtaagacctggccctgacgctgtttctggctgcccgtgagcctgccctctggcccaccggacatgtcccaaggctgtggaggtgcctcgctgttgctcgtctgggagccccgatggcacgtgatcccaaaacacgtttcctcagctctgcccccagagcccatcacgttcgcctctgaagcagatggggctccttcctcgtctccggaaacacccagatttctctttgaagccagcctctcctgctagttgcctgcctttcccacgggttcccttctcctcagggcgtctgagctgcctgggggtgagagcgccgttttcctgcacgctgaacaaaagccactgcagccagcacgccctcccccatgggacaccgcagggcgcctcctcgtcagcggtcagaggaggcaggtgctcaggccgtgaccttccctgacggtctccttcctggactagatcctggtgctggagtccgtgcctgacattaacctgctggactacctgccagaaatcctggacgggctcttccagatcctgggcgacaatggcaaagagatccggaaaatgtgagtgaggagaggagcacggagctgcatacgcgtcccccacacacacccacaggcgccaggaggacgtgagattcactctcctcttggcgcgtgagcttcccgctttgggacgccaagagcgcctcctcctcccgcctctgaagttatccctttgacccggacacccgtgccaagcggagcagaaatagcattggggaggctccccggcccaggtggcagggctatttcccttctccttcgctcactgcaggtgtgaggtggtccttggggagttcctgaaggaaacgaagaagaacccctccagtgttaagtttgccgagatggccaacatcctggtgatccactgccagaccacgggtaagcacgtggtggccccgcggaccccctcctcctcagaagccccctctccccgtcctggacagagtcctcgaggcagtgagaggccctgtgacagcggggcccggagccgtggggccttgtgggagagattcaggttctgtcagcatggaggccttttcactgggtctggccctagagaggggaagctctggaggccttgctggcaggcttggcatcagcaccgtgaattgaaatgcttggaggctgggctcgcataactgtttgtttctattgagtatcaaaccaccacaaaatgtaactccttcccatcgcagtcccttgttactgacctcaggcttcaggtcagctgtgccaggccagggctggggggagtcccgtgcctccagtcctctggagggtgggctgaggccgatggtctgtcgtgtccctcgtgtctggctgtccagctgtcacccatggccagcagtgacagtcgttccaagcgtctcgtcacccagtgggctagccctggtgcgttcacgtggatttggtggattccgggagacagagacatcagcgaggctgaggctagacccatcctttctcccaccttctgttggccagtgtcacaaggccagccccggaccgggagtgggggaataaactcccactcctgatgagaggagccgcggtgccccgctgcggggagtggaaccaggagggcagagagccgtggctgctctcacgggcagccgcaggactattggccgtgtacccctggcgcccacgaaggagagggcgagagcgcgggagtcccggggggccgggagccatgccaggcctcagccccgctgcagggctccagcgcctgtgggcgtgtcggggggcaccgccgcactcaccccagaaccccgtccccatagatgacctgatccagctgacggccatgtgctggctgcgggagttcatccagctggccggccgcgtgatgctgccctattcctcggggatcctgaccgccgtccttccctgcctggcctatgacgaccgcaaaaggagtatccttcagcccggagagcggagacgagggcagccctgaggggcgtgaggtcaccctgggtgggcagggggcccaggacccaccacgcctgcagacagccctggagcaggaggcagagtggagcgtggcctgggagggcccaggcggcccgggacggggctggcgccgcgtgctggaacgtcagctgcatcctcagagatctaagcggctcacccaggcccgggctgctgagtctctgctcccctgtgggctgaggggtcagggaggtgacaggacaaccccttggggcagcagagcgggctgtcagtccagcctggctgcagccgctccttacatcggcgcactcagacatcaaggaggtggccaatgtctgcaaccagagcctgatgaagctggtcacccccgaggacgacgagcccagtgatcccaggccagtggtgcagaagcaggcaggccccaaccccgaggactacgcagcaaagcaggagggggcagccagtggtgagtgggctctgcctcccgcccgcacctcccagcgagggcccctggggcccagaggtcagagaacttgacatggggtctccctcagccagccagggctgttcccaagtctcagctcctaactctgggaacagcctggcaggtggaaactgctgccttcctcctgcaggtgggcacagagcagaggagtcccaccaccagcatccagcagctcccaggggcaggggtagtgtttgaacccagcagctggcctccacaactgtagctctgagccctttctgccccagagagcattcattctttccttagtcttgttctgagcttaactgcagtcgaggtagagaggcgtggagcctggcaggagggccgttgagtctgcaggctcagctgagtctcgggtggacatccagtgactcaggaaccgcctgccttcctctgccactccttctcagggaggggggttcagaccaacccagatgtggttcattcagtccttggaaattctgctcctttcctttaacgttaatgtcttgtttatccttcacatggagaaaactgcttttatgcctatcgaagtctagagttggaatctctaaatgtagaactctgagacttttttccatgtccctgaccctgtcctcaccaagaggtccccgatcagctctgggatgatgttctcctttgcaaaatcagccgaaggctaaactgatgcagaacctacttaaatctttaaggctaacggatggaggtctggagcttggcccccaggagccaaaagagttcccagagcattttgtccctttggtttctcttgaacctcagagcagaatggcaggcacgcgtgtcctgtgggcgtcctcagggggctggccttctagaatggagcagcactgagtgctggaccgtcccaggtgtcaggttacagcagtgcccgtcaccgcgagccagcgcagcagaacagctggggaggaggagcgctccgctggagcattggtggttcagtggtagaattctcgcctgccacgcgggaggcccgggttcgattcccggccaatgcagctcgcttaacctttttgacagctttcctaagccttcctcaaacagctccctgctcaggagaatcttggtcctaaatcaggacacattcaggcagcttggttccagattttactgcctcgtaaacagcactgcagcagacgcagagctcactttatagtagttcccagaaatggcaccggcgagttctggggctccacagccactccagacccgctcagctggtcaccaacccccactctcccagcgtgccagcagaaggtgccagcagtccgagagagtcagcgtttctttcctcagtccccggcttcaaccagcgccgacgctgacgctcactgcccatctcttccaacccgcaaatgcagcagcttcctgcctggtctctctcacttggtgcccccatccccccccagcctgcgccgtgcaccccacggcacatcccgggcgagccccccagtgaggcctggcagccaggccctctgcacgtgagtgcacgcacactcacagacccatgcaccccgctgtcacgtgcacgtgcttctccttcgcccctccccgcagggctccggtcagggcggcccttgttcagttggctgccccgagccccctctgcttgccctggctccctcccctgacccttctgcctgaggagtccagggcgcagggtcctttctctgagtctgagctcccaggcacttggtgcatcctccctgtcccccatgacgcttcctgattgtctcgggcatcacagtctgcactctgcggtgagacctgcctgcctgtgcatcctgccctgctgacttcatgtctgttgcccttggacaagccacttggccttcctgtgcttcagatttcttactcattgactggagcaacagtgacagtgcggaacctatggtgtggctgtgagtttcagagatttttggcatgtagagctcttagcacatggcgtgggtcacactcccagtaacaggtgcttccgtgtcgagttgttttaaggtctgtttataatgagacccaccacttagcaagagtgtcaggggcaggactttggctcccttgccttttagcattagctttgcccaggtggtaatgggtctctgatgggtcctaaatgagggactgtagtggtttagggatgaaagttcaagcggtgagtgaggaacacagctataaatacaatttccagtggaggaccggtgacctccgtgggtgaacatgaaatggagtccacccatttgcaaagctttgatgggattgggtgttatcagcactgcctatccaagtgactcggatccaggacctgcctgcagagagctcaggtcggatccttagaggagtgatcacaggacattgggcgtggccacagcggactgggggcgcccagccaggcttcgtggagggtgtctgagctgactctcttctctctcgttcccttctgctctcctttaccaccctcattttccactctggtcacgagaaatgcacattccctggagagattttggaacaaccagacgctcctactgggagaaggtgaagagtaaacaccttaaatacattcattgtttggtagatatcaatacatttggcagcatgtaccagaacatttaagaatttatcctcaggaaacagagacatgggtcaagttttccgttttaacccctgaacacacattggctcctttattgttttcacaagactctggggaggccctggcctcagcacattacacgggtgaggcagtgaagtgaaggcaggtgacctacccagaagtcacacagtgaggaagcaggggagtcaaactgagacccgggcccaggggctcctgagtctggagattgaaacaaaagggcaactgaagatgctcagcttgactgggaaccccagaagcacaaagtaaaacagtctcatttttactcatcgatttggcaaatactgtaaatatcactagtatcccaaggcttccaggagggtgggctgaacaactgctggcatgtatgtggacccttcctaaaggccagcctggggaggtctgaccctcctactcagcagccccctctaacggggttctagggaagtgcccacacttgtgcaaaaggaagcagctgtgaggtctcagagtgaaaatagggaacaatgcaaattcatctgcagccagtttttaacattgtatcatttcatctgtaaaggcgttcccagcaggtgggagggagggagtcctccagcagcagggagccccagcacgccattcctggcaggcccacccagactgcccaaggtgtctgcctcaccttcccccaggcctgttcaggtatttggactctttgctgaagcagctgcaccatttcccatttctaccagcagtgtataaggttccagttcctccgccttctcaccatcacttgctatcaatatgtcttttatctaatgggtgtgaaatggcatctcattacagttttgatttacgtctccctggcggcttgtgatgttgagtgttcaagaagtcactcttaacatctgttgccctttaggcagcagccccttctgagatttcccagatgcagtcagcactgatacccctgcttgtgaggtcactgtgcctgagaacctacaaccatgcataccatccagaagcttccgggaaccactaggcattgggtcttcaggtccccaaagccacattcctctccaagagccagaatcaaggtgtgggatactagagggtctgtgtgtccttgtgaacagggcccttgttcttctaaaggccccagtgacctttattgtgatgcctcattcctcattctctccccaggagggcctgatggttcttgcgactctagcttcagtaatggcctcagtgtcttcactccagccaggtaagtggtttgttatggccagagttgtttgtggagagctagcaacctacatcttttctgggcacgagagaccacagcaaaccctgaggcagactctgctgagggccagcacttgcaggacacaaactgtctaatgagggagtccagaggacactaaagagcccaccccacctggttctgggggacatattgcctctttggaaggactggaggctgtgagagatcagtaaatacaaggtataagagtgtagctctaggcaactcaaggtaaagaatctgcctgccagtgcaggagacccagcttcaagccctgggtcaggaagatcccctggggaaggaaatagcaacccactccagtatccttgcctgggaaatcccatggacagaggagcctggcgggatacagtctgtgggatcacagagtcagacaggacttaagagactaaacaacaataaagagtgtaggtaacgcatggtgaccactgggggaccttgcagatgcttttgcccagccccctttgcttgtccaggataatgtgaggccgatgcagctctctggggaaggccattcaaggagctcagagcacacgcggtgattgagccggagtgtgcacaggctggggcgcgctggctgcagtggcgctgccttccacgggggggcggtgcaggccaggcagggaggtggccgccccaggcagccactgcactctgcaggcggatgacggtctggggaaggactggtcaccaccatgtcccagcctgagccccaggactggccctcggccccactttgttgggcacagctggctacggggctggagtggatggaggtcctcctgtagggggttcttccctctgaatccaaccctgagcacgggccctggggacacaggtcactcacaagagaaaacgtatactcatccccaggagactctcttctccgcagactctgaggctcttctctccgttcacatcgttttctcactgactcttccttctcaggaccttgggggtgttttcagagtattgactgtaaatgtggactcttcctaggatttctcccacattgttggagcaagccaatgaacaccattcgtttatttgtttttagtttgttgtcacatatccagagcttctgttcaaccctgcagtttccaagaaaaagacgtggtccccgagcttgaggttttccagtgtgggggcagagacgtaagcaggaagttatgggaaagggtggtgacggttgtgtggggctccgaggtcgttagggccagtgctggtgccccgccgaggcccgctggagcaccggctgccaacctcgagcactcagggaggccttcctgggcccggccatgccccgcactctgggtcgcatcagcgggttctgtggatgtttacatttaaaccccacaatctcagtagcagtgctgtctccacgtcaggggtgaggagggaccggaggtcggggctgctctagagactgggtttaggagggtctgaggtgggcgcaaggagatcagccctggcatttctttggaaggaatgatgctaaagctgaagctccagtactttggccacctcatgcgaagagttgactcattgaaaaagactctgatgctgggagggattgggggcaggaggagaaggggacgacagaggatgagatgactggatggcatcacggactcgatggacatgagtctgagtgaattccgggagttggtgatggacagggaggcctggtgtgctgcgattcatggggtcacaaagttggacacgactgagtgactgaactgaactgaactgaggtgggcacagaccagtcagggtcactggcacatcccatttagatagggtggaggctcaaactgaagaggcggcaggataaggagaaagttgataggctggagatgttttgaaggtagaattgacagaattgtccaacagatggaatggagtcgggggcggggggggatgaggggaggggacttctagattcggggttgagccagctcagggcatcctggtttcgtttcccaagctgagcaggaggaggatcgggtgtgagtgggcccgtcgagagcagagatcggggcagctctgggcatcccaccagagcaggtcaggaggctggtgtggatatgggatgctggaactcaggggagaggtctcgatggagatgcaggcaggctcgcctgccctgcggaggatccgctctgggaatcggagggccctggcagggagggccatgtggtctcaaagcccctccggtagtgtgagagaggacagatgcgggcagggggcaaagctggcggcaggaaggcctggcgcagcctcgtcactaatcgaggccaccaggagggggcggtccaggaggaccagagatcggctgtgactgatggccccgtgcagggggcacagctccccctcctcactggggagacagcggttcctctgcccaggggaggccctgattcctgcactgtggccgggaacgcctggctggaaccaagccttgctttatacccgtcgttcagcaacaaatgctaaaccagcctttgaaattaaaaagccaacggagaacacgctatctggcgctttgtttccctcagacggaggtttcctagtggcagctgccagtctgagtcactggctatgccagagacaggggcggccccagagctgggaacctgagcccagcccctcccactggaggtggcagccgaggacggaggctggggtgcctgctctgggcggttggtgctgcccgaagctggcctctcacagggtccccgggaagcgtaactcgggctgcggggttccgacgcacgctcaccccgggcactgcctgcacaggcgggccgctcccaccgcatccaggcccaccaagggcagtggcccagtggggacccctccagtgacaggagcgtacccgcctggcagacatggtcagtgaggtgacagtctggtgaaagctctgggctctgtccctgtacacgagactagatgtggtgttagaggaccagtgtcatccggggcattcagtataggtctcctggtatagctggctgccgcaggcaagcagaaagatctagaaatcagtgcttcccaacgtttagtacctgctgattgaaagatgtgataaagatcttttattaaaaaaaaaaaggacagctctgaattcagaaacagttccttttttagacttactttcgttctaatttgattagagctgtaacataggagtgccataaagggttagatgttacagaaataaagtgctgcttcccacggagacgcactgggctttgtcaggattagtaatatcagaacctttattcctgaagtcagtattttaacagtcacagtagcgccacacatttggacgtcatagtacatgtacacgtatgatcttcattatgagatgctttatgagaaataagtggtgagaatagggttttgcagacaccatgtaataattcagaagcccccagggcctgcaatgcgggagacccgggttcaatccctgggtcgggaagatcccctggagaaggaaatggcaacccactccagtactctcatgcctggaaaattccatggatggagaagcctgacgggctgcagtccatggggttgcaaagagttggacacaactgagcaacttcactttcaggagtaactagactctctggaactggtacagaaatatgttctaagctttgagtgtgctccgttccgttctctgggtagggtgagccagggtagagggtgcacacctctggctccaaaccagcagctcagaagctgagcaccgggcgcagtgtgccgcacgcggaagagccccggcttcgcacggagcgcacaccaagcccagagagcgcagccagcccccccgggggggaagctgagagcgccccgcggaggcgggatcatccgctctccctgtccccagcaccctgggctgttcggcctcccgtgcccttcacctccagccagccaagggacggggagcccgggagagcgtccccggctgagggaggggcgtgccaggcctcctggccttgggcaggtcctgtagtgttccatctgtgcaccagagggactgcctcacatgaccgagggcctgttggctggttgaagccaacgcccacctcaccgtccgtgtggggtgccccttgtctggggagggccgctgtgggcacccagggtgccgcccgctctcacgccggctccgtaacacccttccttccttgtctggccccagggcagcgccagtcacaggcttgccctcagtgtctgtgctcggtaagacacacttagctggcccgcagcacctcgggattgttgtaagttaaggagcccagctgcccaagggactgtctaccctggctacctggggccactgggatttggcccaccgacccccccgagatgagcagcagcttcctcggcgtcccgctccctgggaaacagtgctgccggagtgcttcagtgcagcgcgttaggaggcagagccgtgcggtgggcagggccaccctggactcagacggcgcgttcaaactgctggctccacactccgcagccacgtggtgtgcccgggttacttagtgcctccatgctctgattgcctcgtctccagactgggagtcacacggctgtgggcacagggccctgggggacataagcagggctctgcgggcacactcctcagcacggagtccaacacagggtgctcacccagaacctgagctctcgctgttcccagcgccaccactgcccttcctgctcagtgttagagcctgacccccaaggttcgtacaccccacggggctcggcactgcctcccgccccccagcagctcagggcacagctgtgccacgtcccaaggaccctccaggcctccccccgagggctgtttcagccaggaagcggcagcaacctgccgggtttggggcccttgtggcagcttctgctatggagagggattccctggggccctcggctcacagggtcaggaaggggcttctgatcattccccactgctttccgagctcatttcattaagacctcgggctccaggaaggtgtctggagtgtctccagctgtgggttcctgcccacccaaggagagcttacagagcacaccaggaggaggctagtgcgatggggcaaagcaggaccgggagatcagacagggagggggacgtccggaaattgttaagagaagacgacgaaatgcatgggcagccctggatggccactgctgagccgtgctgtgcacgctaggcccccctgcccctcgtgactactgcacgcgccacggccagtctcagccgaggatgctgagggcaggagacacgagggctaaaagactgaggatgctgcgaagagtgtgacagagtctgtcactaacctgtgtgttgacttttgtattgatcgtgcgttgaaatgacatttggggcgtattgcgtgagtgcacgctcagtcgcgtccgactcttcgcgaccccgtagactgtagcccccacaggctcctctgtccatggggtttcccaggcaggagtactggagtgggttgccatttcctcctccagaggatcttcccgaccccgggatcgaacctgcgtctgctgcacctccttgaaatggcaggcggactctttaccactgtgccacccaggaagccctgggggtatattgggttgtttaaaatacattgttatatttaactttacctgtttctttatactttttaacataaaaccaaaaaacatgaaattccatatatgacttgcattatatttctaatagacagtgagaaagagagagaggtgaagagcagcgggttcctgggtggctgagactgtctgggaacctacctgtgccaccctggacttgtctgtctgtgcgtgagtttccccatctgtccaggctgctgaagaacccagatgcttggctgtcctcggaagaccccagcacttgcagccacatggctctcggggagcctcagtggcagcccctccccaaggcttggtctgctgggcggcatccctcacgcacccagcccccaggccaccagaggctagaagtgcccgctcatgcccccaaaacgagctccatggggaatcatcaaaccacattaaatagcacttccattgagcacttaacagagctcagaaccctgccctttaggagttcacatcaaatgagcttcagagaggctgcaggcgaattggaaagcaaaggcattgagttcctgacgcaaatgaataattgagcaatctggaaataccacagaagaccgttttgtacaggcaggcgatggcgtcctgcatcagaggggaagggagcccctccgacaccctaaggccccctgtcctccccagccccatcctggagagccccagcctctgtctgggggccccacttgggtctgttctggtggcgcccagccttcctggggctgcttggcgggacttttctctgcctggagaccagcaaggcttcgcaccaggggagcagggagcctgcaccccgtcctagagcgcagcccttctgagcagggtccaatctacaggccgagcctgtcaccaccttggtgcctcagatgagaacattaacaacttcagaggtgactctgaaggcccctcgcccaggctggctgctatgccgagggccctgcgtgtgaccaggtgaagcgccatgggtcctcattggagaagtgggcttcaggtgcctggggcagggcctgtgttacttagaggtgtccctggggcctttccctggactctttggacagggaggttttgtttcattgacaggctctggacgtaatgcgctgagggcgctgaactgcctttcagccatgaggtctgctggtcccaagcttgacatcagaggtgtccacccttctgcaccttctctggcgcagcccagtagtagaaagggggccgtgggtggctgcccagcgtactggccctcctgccgcagcgtgggtgtccacgctcccgcctggcagagcagcacccgggcaccctgtgtgggggatgcggggccagggcgtagctggggaggggcctgtgggcctcagcccagctccctcctggtcacccccgcagcgcggagagggccccagtcaccctccacctggacgggatcgtgcaggtgctgaactgccacctcagcgacacggccatcggcatgatgaccaggatcgccgtcctcaagtggctctaccacctgtacatcaagaccccccgcaaggtgagccctcgggctggggtggcgctccggggtgggctgcagggcctgcccgcgcctggcagggtcctggtcgttcccgttctggggaagccctgagcagcaggagcgtggcatggtcctggggtgggaggcccctgccgctgagcactcacacggcccctctccacagatgtcacggcacacggacagcctgttccccgtgctcctgcagacgctgtcggacgagtctgacgaggtaggtccccgccctcctccgggccctggccgccagcctcccctgctgagggcacggtgtagctccgaggggcttattttgctgttttctcttaagccagcaccccgaaagtccccccgttgctcctgtgtggtgaggagcggccatcagggagaaagccatgtctcctgtcctctggggagtaaaggctcttgctctgcgggcctttctgatgagcgccgggtctgagcggcgaggaagccagtccggcagggagcccccggtccccatgaggccgaaaggaggggcggcaggaagcccctgcgtctcggtttcctttctccatccagtggggtagtgacagcacggaggggtgtgagaaatgtctccaaaaacgccaagtgctgtgcctggcagcgggtgagccctcggagcatcagttgtgattcctttcagctggactcctttctggcctccagtttgaacttggaccctgagtctttgcttttgttgggggtcaccacaagctaaagagagaggctggccccctctcaggcagtgccccgagtgtggagaccccagagtagggtgggcaagggctgtaccctcagcctccctgcaccatgccagtggcgtcctgcccagggaccttcttggttggatgtcccacctcccggctgaggggcagggcttgcagccaggcatcgccttctgcctggggggcatccctgccctccacccatgcccgctctgggcttcgtgctggatgctggcggccccggccctgacctgcccgtctcctgccctcacctgccctcctctgggccccatgaggcagcaggcactcgcatctgcagacctcccagtgccgagcaggagggggcaggtgctggggaagaaggaagcgggacacagacacacacacacacacacacacagacacacacagacacacacacacacacacacacacactctctctctctctctctctctctctctctctctctctctctctctctccccacccccccctttctttctctcaggtcctctgtttttcctgaaaactcaccctcccgcctgtccaccacgtacccgtacacacacacacacacaccacctccccgctcccctgcccacccccccgcccactgcagtgcaaggcccacacacgcacacacccacacacaaaccctgcctcccgccccgccgctgcagtgcacggcccaggtggacatggcccagttctgcgtgaatatgactgactcactgcacactcacggccctcatttcagtacagaaagggagaaaagaactttgctgattggttccttccccaggactttggtggaagcagctgagtttccagtcctttaaatcgagttgtttaatcccatccagccttcttcacccgcggttggttcttgtgtgcttgtgcgtttaaatggagccggaggaggtgcagtccattaaacagctctgttcaggctgcggctgtggaaacgcgatttgctgaggtgccaaatggtgccgggttttggggtgcatcttgtgggcctccggtggagaggaggctgcagctgctcttggggacagttgccaggggtggggcgggcaggcagctttgctgttagcagcagttcagcgtccccaccatcccattgctctcccggggagggatttgggaacccagtatcactgctgagtcgtgatcctgccacatcctggttcttctccagaatcctgttcctaagtagcccctgctgaatccggtgaccttgagtgcgtcctaggtacttggcagtggaaatgcagccacgaacaagacaaaatccctcttctcctggcgcgagcttccattccagggcgtccagaaagtgccctctgtgaggtttccccagttattttcaggcacggccctgatctcagattgaagctccgggggtgcaagaccctgaaagcccgttgagtcagatcggcccacagccagagtggcgtgaggggaggcccctcgctaatagaacgtaaccatggcctgccccacgcagggccacacactcagcctaggtgcctcaacacccgggttagcccgttaataaccaccagcttgtctgaagtcatcccagggtcagggaatgtgcttagacaccttccctgtagtgcccagagatccctcgacagttcttctatgggagaatactgttgttatttccatttggcaattcaggaaataaggctggggaggtgaagtagtggcaccgactgatggggccaaaaccaagtctgtccccagagcgctcagttgctgagcctccatgcctgtgttttaccatgtgtggcccccaagcttgtgcttagtcatcatatcaccatccccagcatctggcctttttctcttgttccgcacgttctcgagaagactgtccagtccggtatggagagggctgtggggctttgggaaaagctctccctcagcaccctgacccattgcccacctttctgttgatttacgggagctcggtttatccagcacatcccagctatggtctgtgttgctcatgttttcctcccccagtgtaatggtgacagacctgcatacccgtcccccggggagaggcactggccccgggtgacagagtgcaccaggtgttcatgatgcaggagctgggcgcaaggagagcccgagcctcagagccccagctccaccgccacgttccccagcccctgggcacgtggcctcacgggtgtctcgcgggcccttgtttctctgcccgcctcccccgccccttccagggacagctcagcagtccacgcccctctgggatccttggttgtctttgcttctcctaattcaggataagtggctgctccctcagtaccgcctgttcctcacagccttgatctgaaattcccttttgtcagaaagaattttgcaggtgtcaaattaatattcttggcactgaagtagaaattctcccatcagctagagatccaatgacttgtttttaagtgaaaatgcgaccctgatcccacagtctggaacacaaggcatatccgcagagcttcctgcaggacccacgggaggcagggccgctctttccctgcccgaaggtgccagtgttggccacctcccgagcccgcagctgcccgggcgggctctgcccgtgatcccccagacgacggatgggtcctctccatgtttcctgtggcgtggccagcccggaggggcctcggtgtttcccatccccaccccagcctcaagcacagctgcctccatttcagatcctctgcaggtcacggcaggcacgtgtcatcatacacatgcccagagtgaaccccagcgtcagctgtgggcttcagaggtgatgtgtctcagtgcaggcacactgattgtaacaggcacattgccgtggtgaggaagaccggtgagggagaggctgtgtgtgtgccgggccaggaggtgcgtgcgaaacctctgttaccttctgttcaggattactacaaacctacaactgctctaaaaatcgaaaatctattttaaacaaaaatatgtataggattaaaaaaaaagtctaagtttcagaagaggtctggaagggtggtcaggtggccctcctccccagggacctgggccaggagcctgactgctccggcctgcatggagagcagggtatctccacatgccctgccaaccgctgtttcaggaggcggagaaaggctccccatctgagcctggcccttcctaacaacctgtccatcaccctcagattatttgggggcagatcatgcccccaggagggaaggcctgctgcaggaaatgggctgtccctccgtgtccgccccagaaacaagggctcccccttgttgccttcatctgagagcagcttagagaggcgggggtgccctgtctgacacccccttcgctggcttctttcggaaaccgtgggggtgctgtgtgctgaaccccgtgtctgggagaaggagaggcggaaaccagtttatggggtcgtggcgctggtcagagtgcatcgcaccctttgtcttcaggaatctgcctggtggtccaggagtagtttcattatcctccgtttgacatgagaggaagctcaggcatgagggggataacttgccaggagccagccttggaagctgggtctgtcagttcccagatcatctaaaccccacgcgaggtctgccctcactcacctcagtgagagtgccgctgggaggagtactgctctatccaggctggatgcacttggctctgacctgcccccccgggctgccccaggtctgctgagccccccaggccccaacccaaagcagtgagccatgccagggatggctgagggtggtgtggcagctgcccggtggagagaggatagcctctgccccgtgctgcccccactgcatggtaaggctgaggcacctccccacctctgctctcctccccggaacgtgctcaggctcagttcacttctgtagctcagtggtgtccgactccttgcgaccccatggactgcagcacgctccgcttccctgtccatcaactctgggagcttactcaaactcatgtccattgagtcagtgatgccatccaaccatctcatcctctgtcatcccattctcctcctgccttcaatctttcccagcatcagggtcttttcaaatgagtcagctcttcacatcaggtggccaaagtattggagcttcagcttcaacatcagtccttccagtgaacacccaggactgacctcctttaggatggactggttggatctccttgcagtccaagggactctcaagagtcttctccaacaccacagttcaaaagcatcaattctttggcgctcagctttctttatagttcaactctcacactcatacatgactgctggaaaaaccatagccttggctagatggacctttgtcagcaaagtaatgtctctgctttttaatatgttatctaggttagtcatagctcttgttctaaggagtaagcgtcttttaatttcatggctgcagctaccatctgcagtgattttggagatggaaacattgtttccccatctatttgccatgaagtgatgagaccagatgtcatgatcttagttttctgaatgttgagttttaagccaactttttcactctcctctttcacttctttcaagaggctctttagttcctctttgctttttgctataagggtggtgtcacctgcatatctgaggttgttgatacttctccctgcaatcttgattccagcttgtgcttcattcagcccggcatttcgtgtgacgtactgtgcatgtaggttaaataagcagggtgacagtgtgcagccttgacggactctttcctatttggaaccagttccatgtcatctccattttcctccctaaaacgcagtcgggctggatcctgttaagtcccttccagccctgactgtgtggtcctgactccaccgcccggaatactaatgcagcctgctcaaaagtggacagtcttccgtaagaatggggcttgttttcccttctcatatccttgcctcagtttttattttgctccaattttcattccatccactctccaaaacaaacaaaaacaaccccgccaccccacgcttcagttctgagtgtttctgtacgatcggatcacatggtcaggtcaggcaccagcccagagcaccgaagggcgagacagcagcagccaggagctcagttccgcctgcggagggcccaccccacgtggaggggcgagccgggccgccgctcgatggccaggtgaggacatgcgggccctcccactacaggcctcagggctggtcctctcctctcccaggtggaccctgtggcttcctgcagggcttgggagagaaaatgaggggcagggacagatgagcagggagaggagctgttgccagcaaggagataccaggcctgcagccacacgccccggggacgggggctcccagcccccgcggcccagcagaggcccttggcagcggactgctgccatgcatgagtggggccctgtggtgtcaggcccatcattgcgctagggggcacctccttggtgtgaggaggggccctcagtacccaccgttggctgccatcacctgctctaggaagacagtttgtgctgggagggtttccagtctgtccctgtctgaattccctccactgatgggaaggtgaggacccagagctgcaccataacgggagctcagggcagaaggctccccagaggggaggtttagttcccaaagcaggaaaagtagggcccagagaggagtcacaaaggggagggggcaggaaccaccttcctctggacagggctggggctcccgggaggagccggccaccttccccagcgcgtctctccctgagctccagtgatcaggcgtctcacctagaaaggctgcgtccaccaaccctacagagtaccccaagggagccacgcacaccagcgccgccgtcagatccctcggagctcttcaatacccagctgcctgggccgcagcctggacctccatgagctgctctctccaggggggccttgtggcctgggttccccacaggccgccagtgactgatgctcacctctgactgagagcctcggtgtgggcccgccccgttctgttgggagcctgggggccccgtctgccagttcagtgccctctctccctgccgtcgcccaggtggccgggccaggccctttttcacacacacaccccaccccacctcacttggggcatcagcagcagccaagatctcttctaggacgtgtgtccatttttccttctccggagatggccaaagcagagttggttgcatttgcctggcgtcttcctgttggcagtttgcaaggcccgccgccagggcagggagctgctagagatgctatggacaggagcacgctgggtgctcgctcggctcccagcctgcaccaggcctcaccgtctccacagcagccctcccaagcagaaaccggctcagagaagtgaggtaactaggtcgggatctcggcctgatgccccgtgagtcagtgaaggtcagtacaccacccgctcctctgcccctccaggccggccaggtccctgtctgtgtcactgcagcacccagtaccccagacgcgtttcatgactacgtgcataagcaggaggcgggcagatggcagcagagcacactgtggcccgttctgccctcttcctcgctcgcgggggcctgggcctgcccacttggacagagctgagtggggctcacacggggctggggttaagcagagacccagcagcagccgggaggccgtgctgctgtcctggtcgtcgcgggccaggccctgaagacagcggcccctcgggccgttgcctggtgactgagctgccccaggctgccctgcgcagaggcccctccccatccctgcccgctcacagggagagttcatctcctgcagggcacctgccagtcagagctgcaagtgagcgagggcttcaacaggaagccccggggtgggaggcgaggggggggcctgtctccaagccagctcactacgggaagttgggggcctgtctccacgccgtctcaccctgagaagttgggaggcctgtctccacactgtctcaccctgggaagttgggaggcctgtctccacgctgtctcaccctgggaagttggggcccctgtctccacactgtctcaccctgggaagttggggagccttatctccacgctgtctcaccctgggaagttggaggccctgtctccacgctgtctcaccctgggaagttggggggccttatctccacgctggctgacccgggctggccttttccccctctcccctcagggtggcggctggacggttccaggtgccagaacccgcacttgctgtcaccgaggaacttaataagcatcaggggctgccctttggcagtatggcacggaactggcgccttggaaggacttctgagtccactcgaacagaagaaaaaggaaagaaaactgttcctgattcctaagggcttgcgttcaaagtcaggcaacaaaccaagacaattcttgtttcttttattcaagttgttttttgctttaccgaggcgtacaagggcttaatcagggtggtttcctcagtaggaaaataggtctaagtctgagcagtgcccttgctcccacccccagatctgggagtctttttggcagagctgctccgatggtgtagaaggcaaggctgtgggccgcctacccagggtgctgggcccagcctgcctctgcccccttagtgggaagctgttctgggaacactgccccctcaggccaggccggggctggtcactgctttcttcagcccaggtctgctgtgtcaagggccagtgggtgccagctgccgccccccagagcggcacgggggctcgggcccacaggagctatgccggggcccgcggacatcctccccctactcccggctccctgggtgcccctcctgggctggcggcccagcctcctggactggactctctggatgagtccgccaggcgtcggggctccagagacctgatcccctgggctgcagcccttgtgaaggaaggggacaggctcctgtgcggaaggaggcaggaggccacaaggcttgccttgcaggcccggcctagctccccttcgtttgctctcagctccgttccccaaaataaggggtaatccaaccttcccaggatctcagctatggccctgcagctgccctgttctgggcggaggcatcagctaggcctgggcggtgcccgcagacctcagcctcgggcctccagcctgtgtccccttccccaccagccccgacggaaacttgcgtggctttctgctggccaggactgcggagggcccagcccagggagttccttccctgcttgtgggactggaaggctgagcctgttgacatctggggcctggtcagctgatcaggggcctagccagactctggactgagtttcttagagacatgtgggtagataaatggaaggttttcccagccatctcttggcagaagctctccaaaaccatccatcttctgtttcccgcccagctctgcagctgccgggtgcctcgcctgggactccctgtccaggggtctgggtggaaggagaggacaggcctgggggcttagccttgcaaagctctgggtttcccctggtcgtgaggtggtgaaggggcaggcaggagcatttccaggagacagaagggcacctcctgcagcaaggggttctccagggctggtctgtggacatgttgcagggacagagtgcctggatacaccagtcagtgaggggtggaaacagctgctgtccaggtgactgtccttggcccgctggagggcaggggctgacagcctgttgtggcccatctagacagtgactcccctcccatgctgaaacgtgccctttgctactgtctggtcgcctcctagaaggcaggccctcctcactttgctccccaagccgtggagggtgtgacacccggtgcccctcaccccggccgccttcctcccggagctgctttgtcagatgccttcttccccagttgcggctgaccttttctctccatcagtggccagctcgctcagggaccagctgatgcgcctcccccccacaccccccagcccgttgccttggtaaccgcaggccctcctgctcctgcagaatattgctttcttgtaacctttttccctccctctccttccccccttctttctctcacacaaaaagaaagcacaagtgttttatattcattctgcgaaaagctgtgtagcgcatactaattggcgtggcttcctcctgctttctgtgagcctttcccatcctctgggccaggaccgcgggccagcaccggcatgggcccagccagcctgtgcgctgccagggggactggctctgcatgtcctgaggccgcgtggggcatttctcccctgggtccaggccccgagtgtgaccaaggccgctgagaccaccgtgtccttgccgagggccgtgaggtcttcagggacgaggcgcgctaacagccttgctggcacagaggccagagccaggtccagtggagggtggctgctgtggtccccgctgctgtcccaggctccccattgacgccgtcccccggggtcgccccccaactccgcatgcagaggcagagtcctggcctaggcctgcatcaggatggtggttacccatagccacgttcagcttggactctggttttgctggtccactcggggagagtcagtggctgcacttgatgggctggactgagaacctcgaagtggctccccaccaactccccatctcctcttcacgccattccttgccctccgttttggcaacccctctcaggtcctttgctctagaggctgaaggagagtgttgctgttctccagctcccacttaagggggcttccactagtgtgtgtatacacaaatacacatggttttgctccaagctgacctgtctgttggctttagcccccaggggaccagagacaaatcttttgatatataggcttgagaggggtggccaggattaaaggaacctgtagacaacatttccggctctaattgtacagaagtgtctggtctgcgtttgcgggtcgatgttaaactataaaacgagaggatgcagaatatgaagcacagctttgctggccgtgtggtcctgtggggggaggaggcgtgcggggatgggcgacgcagatgctcctgatgcagaggtgaggccagaggctgggcgtgtgcgccgctggccctgtcctgtccccaggcagggccgccggcaggctcgaccccgagatcctcgcgcagaagtcatgcaggaggcagctcctgagatcggcacagcgccctggtgagggcgagtccccagggcacacaggaggagcctgagccccctggcccactgcaaagctgcgctcagaccgcccctgtggccgggcgacagtccttgatgacctgccctgcccggtgtccgcccccacccacaccccactccggggctgggctgcagctcgggttccaggaatgtgcctctgggtctggtcccgcgtcagtgaaaagcttctgctggttaagagaatgctctgagtgcctccctctacccccggttccctggcacacctgggctcagcacttccgaggcccggcagcccccctcaggccatgctgccggccccgggggcataggcaggcactgctgtcgcagagcttgtgggccgcctgtctccccagggtcactctcacggggacaaggcccagggccctgtggccttgcctctcctcccaccagtgcgggcctggccctcagcgggcaccactcagcagaagctggggaggcgggtatggtgggttcactggtccagggtcaggcgactgatgtccgggtcgagagtgaagccaggactgtgagcaccgagctccactcgtggacgagagctggctccttgaggaggcacctgtaggcaagaccaaggacaggcaagggctcccctccagctcggagccgggacacctgcctcctctggcctccccctctttcacggggccactcggtgcggacatctcacgggccaggcctctcaggcgtgttgggtctccccaggcatattttccgattgggagggaaataacccactggacctggtgtgagtcactgtggtcctggtggggtcagcatctggctgagtgctggttgacatcgaggcctggccagcctggggcccccactgcataggttgggccctgggcctgagaccctcatctcctggggaccagagagcagtaatcactgaaagagctgaccccaccttctctcccccactccctgccgtctgctgtctgcctctgtgcttctgagtccgtatcctttgcagtagtctgtgagcgctcagagccataatccgggtggccctcagcggcctggtgcccctggaggcagctctccatccgcagtcacggcacaggagggggctgcttgtccatcatcctcttcttctctccctaggttatcctaaaggatctggaggtgctggcagaaattgcttcttcccctgcaggccagacagatgacccaggccccctcgatggccctgacctccgggtcagccactcggagctccaggcgcccacccccggcagagccggccagctgaacacacccggtgagtcttcccttcccggatggttgtggcctcggggaccctgggcacggcactgctcggtcttacctgggaccggctgcttgtgagccaccctcctgatcgcgagagctcccagggatgagggccagtgatgtgccaccctgtaggcggcaggcagcctgaccctcccgcctaccgctgcagcagcccccagcctcgcaggagaccctcacagccctttccctcatctccctgccactctcggccctttgagccactggctgaatgtgaaaccatccgagtcagcaatggtcttttcccctggggcgccgtcacctggtcaggaatcagggagcccagagcttgggtctcttgggtgaaagacctcatcgagaagctaaaagtaacacgccaggcgtcccaggccggagagtggataactcagacaggtttccaggcagtcctcagacttgaaggtggctgctacgcccctggagcccccacctcagggtccctccagccgcaggtggctcttctcctggggccagcgtgactcccgggtcctcccttgcagggagatgccactgccttccagcaacacaatcctggaaaatgcccagggaggcagcttggaaggagcataccgggagaatgttgggcgtttgcctggggtgtctctatcccctgagcagctcttgacatccagatacgaggtcttagacctcctctgatggaaaagccaagagtcagatacatctggggccttttcagtggtggcttccccccacagccccactgcaccgtccccaaaggcatcccagtccttggccctgagggcacctgctcggtagaagtaggggccagggctgccagccaatcccagaaggcccgtgcgtcaaaaactgaatgaaaatcactcagtcgtgtccgactctttgtggccccatggactatacagtccatggagttctccaggctagaacactggagtgggtagcctttcccttctccagaggatcttcccaacccagggatcgaacccaggtctcccgcattgcagacggattctttaccagcggagccaccagggaaggcatctccctagtgacacctgaagtcaagccccggccacggggtgtcccacagggcccaggctgtgacctctgtgcacgccccgcctgcagctgctcttgtttccagctgcttctgactgaaggcaggaaggagtcggggccctcgcggcagcccagcgtcctcccctggttccgcaggatgcagcggtgtccgagcccgcgcattgcttcctctggacgttgggctgcagccaggaggctcccgcatcctgaccgtgcgcccccgtggatgcaagtgctcccctctgttctccatcctaggtccccagaccagcacctgggcgccaacctgccgcctccagacgggtagcagggctgccagaggctggctggggggctcactgagaggcagcggggccagcagctgagaggaggtttcctgagggtgggggcggcccccagagctccctgcccaggaagccgagaccgcacgtcctcggagagaggctgtggtgacacagcgctgggcaggaggcgcgtaccctctccactggggctgtctgatctgcccctcctctgtaagggagggagaagggcacggagaagtagatgactgaagcgcttcctggctggcggaggcgtgggccggaaagcagctgtgcacagcccgccctggaggggcagggtgggagccccaggctgcagggcccagcctggggagctccgggagcacgccctccactgctcggagcaggagctggagcagcttgggtggcaaagagctctgcgccccagcttctggccctgtcaagacgcctgggcctccagggaggccgaagtgatgaagacttgccccagctcccaaggctgtcagactggctcacatcagccagggcctcgccctgaattcatagaaaacaactaagtgtgccagacgggaagaaattccatcctggaaagagcaccacggaagtgtccgcagccagtgagactccctgctgcaggggtttcacggcgccatgtgccctgcgtgccctatcagcgggtggcatccacccagcgcgcggtccacagctggtctgttaggcgggccgtggttctcagaggtcaggctcatggcagtaaccagaagtagggctgtgccctgttgccgtccgcctcggccaccttggggagggcaggaggtgggcgctggtgtaggacacaggtcagagggcacctggagacgcattcacactccgtcctttctcctatggcgtctctgcacacgtggggttcttctgtctgcttctggctggtcacgcacagaggctgcgaggtaaaccgtcttccagtttggatctgccttcccctggctcaccagggcacagctctgagaacttgcaggtgcagggctgtgtctctttaagacggatcacccgccctgccacccctaccaagggaatttggaaaactgaggaggcagggagcctagcaaagatgagaccagtggcacggtgcctgcatgtcgggcctgtaaactcagaccgtgcagactgagtgcgtcggcgggccgccaccggcctggacagctgctgtgctggcctcggtgtcagtgcccggggccgcaggctgcgttgcccactggggacggtactgtagcctggcctggcagggacagccctgcctgcagtgcagagcggtgtgagtagaggcggtggtctcccttctgcccaaccctcttcactcctggccccagctagagcctcgggctggggagggggccgcagctggcacattcaggaggaccatgagctgccctagtgggtggccctgagggaagccggtggagggctccgtctccctaacatgagcttccatgaaatgacatggaagtgcccagttgggtccccctgtgacttggcagtgtttgtgcctcctctgcccggctccacacggctggggccctgccagattccgaggagaaggcctgcagggaggagggctccgggtcgaggccctactgcagaaggggaggaagctgggccccacacagccatgtggtgatgtgcgtgcgaccaagtcccccgggacggatgtttgcccccaaacccagcctttccgactttcctttccgcccgttctcgggatgaaactgctcaagtcattgcgcaaggctgtctgctcccacctccaaacatgtaggcaaagatgagtgttctgattcagtttcattgcttatggcccagcctggtatgaccaaacgcagagataaactctaaaggcattagataaactctaacccggaaggccgtccctggcagctccccgaggacagcggtgactctgaagtgctgagctctcgtttgggaccggactgtgttttcggcactttccccatgtcagttcactggaccctccctgtgggtcagcccatttcttgaggagagtgctggcccaggagcctacctccttcaccttcccgtggcccccctcccctcaccagccaggggtgctcccaggccctgccgctcccctcctctcttgctctgaagcaggcagctggacagcctcctggagttgggggactgcccagggcagagggcttgctggcctttgcacagagaccaaagcaactgcgagctagatcggtccgcaccgcagagagggctgggccctctgacgtgggggctgcccgccccctgagacccctgtcccagccccttccctctgagcgcaccagcctccccctcccagcccctccctcagggcacggtcactgcggggggctgggcctgggctcctggcgtctgtgaggctcccgccaggaccggcccagaggtgtcgcccccgcgggcccccacccccaggcagcggccggacctgccctgggcatctgtgggcccttccccgcctccccgaggcggggcggtgacgctctagcatctggttttgctgaactgtagcgcgtggtgtattgaggccagagctatttttatcctgacatgtgaggctcgcacacgtcacagccacagagctcagtccaaaacgtcccggggaggctgtttgtcggtgctctgcagagcctcctgtcgccacatcaggcttcacttaggaacatctgcagcgccggctcgccggctgcccgccccgggccaggccctgcatacccggtgctcctggcggcatctgcctgccctaggccagcggtgctcacgtgagcctcctgcccgagcccgcatctctgcagcagaggccaggccagcggtcctcggcaggagaggggaggagtcctgctctcctcggccccgaagggcgcctcctcttgacaccaggctgctcccagcccgccccttgcctccgaccagcaccccccatccttcctggtgcaggccgcccagcctgtcctcctagcagaccctcaagcatgtgttggggagcgggccctgaccgccccatcctgggggccacagccccttgccctggcctgtccacccggcagaccctcaagcacgtgttgcgggggtgggccctgaccgccccgtcctgggggccgtagcccctcgccccgggctcttctcagctggcgagaaaagaggccaatccagttgcgtgtgcagacaggcgagaggcgggcgccccacggggaggagcaggctgcggtcaggcagagatgattcagctgagagaggcctggcactccccatgggagcactcctggagacttccttctctctctaccccttttcccctcccaggcctgcagccctgcccagaaccctctctccagttccacttcaagccggttggtcagtcagagcagtggctggtgggccagggagaaaggaggccaggagggagcgaggcggcccccaccccatccttggtggtcgggagaggtggtcgcccttgcccagctggcccagcccatgttgccctccccggggctccccaaggctccccgcccgctcctgcagggccttgtctcctgaggcagtagccttgactggagtctgctctggcaggtggagccggaagggccacaggcctcgggcagctccacggcctctcccggcagcctcggaaggcacccagtgcccacttaggttgctcccagcctcctgctcttcgaagtaagggcggaagcttccatggtaaccactgcgctgtgagaacaggaccctctcgacacggcgtctcccccatgtgactctgccccacccctccctcctaagggcctcctcagctccagggtccgccatgtgggcctggacctccagagttgaccgtgggccccaaaggcggccatggctcaggagatgggacccatttgccttacgcagtgctcctggttagggcaggtttgctggtggtaacagcccctcttgttcgagtgcagactatgtaggaggccccaggctggtacattacatcttgtctcatttaatgtgggctctcattgccctccccgcccgactccagtactcttgcctggaaaatcccatggatggaggtgcctggtgggctgcagtccgtggggtcgctaagagttggacacgactgagcgacttcactttcacttttcactttcatgcattggagaaggaaatggcaacccactccagtgttcttgcctggagaatcccagggacgggggagcctggtaggctgccgtctatggggtcgcacagagtcagacacaactgaagtgacttagcagcagctcattacccccatcttacagatgagaaaactgaggcttagaggggttaagagatttgtccaaagttgcacagctagtcgggggttgagtgaagatctgatctcaggtgtggtagactcccaagcccatctctaaacaccatgtttgggacttccctcgtggtctggtggttaagaatctaccatccagtataggggacaggggttggggattgaagatcccacatgccacacggtgcagccaagaaacgcccactgcctctgtaagaaccgagccacctaggacctctccccagcgcctgctcaagtcacccagtccccaggacctggaggccgtggccctgggtggggaggatttctttatggtcagtcgtcgttttgacccctttgtcctctggaatattacggaccctaagcctgctaatggatgggacaaggacacacctccagaaggtgggaggggacagggacataaggagccacggtcacccagcacccagaaggctgcagggtgctggaccccgggccacaagtacctccatgggtcgggggagcctatgccctccagccaggcctccatgggggcagcagaattcatgtcctcaagggtggtgacagggacacagggctcctcacagctgtatccacagccatctccagagtcagccccagctgggcctggagtaactcgatccataagaatgtgacactcgattctgcaaacagccccttgggggtggagagcagactatttgccattccagagacactcaggacggccctgggccaggctcttctggaaagggacccagaacaacacactgtagacgagaagtgccgtgaggcctgtccttgaactggcttctcatgaagggctcgccccgggcacgattcacaggagctgtccaagaggttccggagagaggacagtagtttgaaggtgtggctcctggtgaggcatcctcacaaaccagttcacagccaggggaaaaaaaaaatcaggaaacaccttttccagttcccagccacttccctgtaaggaccttgcgacgatataaggaagtctgagttcagcaaaacgatagacctcctgggaggaggtttcactgctgcctcctggccacggcacctgctgaagtcggcctgccagggctcctctgtaaggcttgcttacgctctggacgacggttccacgcactcgtgctttgggttgacgcttctgggagctgatagcccctcgcacagccaagcctgattcccagagaccccactccctgcttgtttcactgaatggcaccctttgaaagggtgaacttgatagtagatgaattgcatcgcaattaaattgttaccaaaaagaagccagatgccctattcgtgcatcagacaggtggacgtgaggagccctgccgtcgccaccactgccctccagcgtgctcaggccagcacgtgctagaaagcaaagacggggcgccccagccccaccccagtcccctctgcaccggatgccttacacagggctggggtctaggcaggggcggggtggggcagggggtgctgtttctggccttgcgtgtattttcagctgggacacataagggagtggaggaggaaatggcaacccactccagtactcttgcctggagaatcccttggacagaggagcccggcgggctacagtccacggggtcacacagagtgggacatgactgaggacccaagcacgaaagggggaggcctggagtgtgcttctggttgtgaagccgcctcgaggtcttcagggtgcgactctgatggagcgtctgtgcctgaagatgaggagtgcctgattcagaacatcgggtgcaggtggagacgcctggtcatggttagccagcgtgtgccgctttgacttctccttgagcagcagtgggaaaggagtgtggcctctgcctctgcggggggtgggggtctgtcggctttatcgacccctgcggctgtgcctgccttccctctttcttctctctgacttgccacttgttcttatcccgccaaagcccaggtgtattttatttattggggtgatgagttaaaaatgtgtttttttttttttttttttttcagaaacacctggcacctagcgcctagtctcatgtagggagtcttcactaagtgatggagtgtccgctggaggggtggccaggggaatgggtgcgtttgtagtgagcagggttgtatcagcttgtgcacacgtgtttggcccttgctttttgctgccagcgtggcccttgattgatggtgttccctcatctggttgcacagggactctccccacctctttggtgtcgataaccgtttcctttctgtgggcatgcagaataaaccccgttctgtcccttcctctgtaggtaccaaaagcttggagtgttctccttccaccccgaccatgaactcctacttttacaagttcatgatcaaccttcttaagaggttcagcagtgagcggaagctcctggaggtcagaggcgccttcatcatcaggtcagttccgggagcgtcccttctcccacggcctcaagtttcatcctcacgtcgtgcaaggggtcgaggcagccatgggctctctgctcctccagtgagtgatggttgcagaaagagggaaaagccaggagaggaggctgagaagaggggcccgccgagaggcagaaagaagccaaggagagagggggacacaggaagccttgaggggcaggaggcgggaaggagcctgctgagtgctgctgggagtgggcagggggtgaaaggcgaggaaacgggggagccccgggggagagtgggcaccctgggggtggtcaaaggattgattctcaggaggggacggaagggcagagaacaggacggcacagtccctgcccatcgggaaggaccacacagggcttcctggtggtggcgggtgtcaccgccccctgctttcctgagcttgaggagggcagggcttgtctgcttcagcatgctggcgtctggggctggttaactctcggtggtgggggtgttctgcgccttctggggtattgagcagcgtccccagccctgacccactaggggctaggagcaccctcgccgcccctgtcgggacagtcagaagtgtcccgagacagcgccaaaggcccctggggggcagagtgatcccaggtgacagtcatggttacagagggtagaagtggatcctgaacctcgctggccaaaagcggaaggtttctgtgtttgtttcttcacatcgagttggggactgaagggacccccaccaggaaaatgacagactctccccacacgagtgacagctagcttcatgtggcgttccaaattgcagaggtgttggctcttttgatgagtcctccttgcctggaagactttgaaaaccagtggggagacgggcctttgaaaaaggagtttgtagctagtttcctctccggagagccccgctgcagtgggttttcccagcctccatcagcctggcatgccccgtcggggcccggggagagagtgctggggggtcaccgacctccccagacagcatggaccggaagtgggggccgcctgggtgcgtgggtgcatgtgcaggggtgttccctctcccatcggtgctgagggttcacgagctggtggtccagctgtccctgtggtcctgttcagagccttcagggtggtgaggcttcgctgactctggagggtctcccaggcatcctgggctggtgggaatcttcatttctgcaggacggaaatgagaggaggccacgtgcctgcctggctcggttggagctgggctgcagacccctgtactcctctgattttgtagatggcctctgtcccatctgtgagagagggtcaagctgggtccctgaggggcctgcccaccctgcacgccaggacctcccagcaccgagctccccagagggtgctcgcccctcggccttctggggccgagtccatccagcacagcagttacttgctgctctggggctcacatccctcgaggaccacactggggcctccatgggcacggcgcctgcccccagggcatggctcactcccagtccactaggccagcgtgctctctcagccccgggtggagagccccgtggcaggacggaaggccctgtcactgggccgctcacgtatgttgtccctcctgccatcctgcccgcccccccgaagtagcagcagcccttgtcacgtccagtcacagcttcctcggggccacgctagccctgagaggctgaccagtgtgccccgccgcctgacgtggaggagggcctgaagccgtgtgccctcctcctcctcgtggtcagatggggtcgaggtccttcagcagagcttcgctggggcccgcgcctgggagggtcagcctgcccacctgcctcccgactcatttcctcacttcctgctggtggctttaaagaagcgcatgctggtgatgcatgcagaccgctgaggcgaagccacaggtctgataagagacagtggatgtttcttaaccccctctctgtggtgttcagccaactataagttgctctgctcaacccccaacgttgagcaaagaaaggaaagagactctttctgcagataagtggctagccattgtccctgcagtgggcatttagctcagggtccagggacgcgactggaagggcagaggcgtccggagtgcttgagggcagacatttggctgggggtcttggccttgaggaagcggcaggaccctctgcagaccggggagcgcttccccacccgcctggccttcccaggctgcccctctgtgggggtcgggaatggagcccctgtgggggtcagacatctgctccgtgtccacgtggccttgttatcgggtgggcgtaactgtgtagaggtatgttgggtttggggaggccagggattccagggaaacctgatctcagccaggcttgctgtgccctgccctgggcccaggcccatcttcaggctgcagggactcaggacgggtggatgctgagcacaggtggtgtgagcggccagccctgcccacaccagcccccgccccagggctccatggcggtcaggcagatgctgcaggcacttgggagccggttgaagagggggcttcccaagtcagacgaccttgggttcgaatcccagttcctccggtttttagctgtgtggaccggctccaagcccagtttgttctgactgtaagacgcagtcatcgcgcgtgccccgtcgctctgcagagcgaggtgcagagacgctgtgcgtttggtgcccatgcacagcttgggggcactgctgttggcctcaggacgcggcctaggcctcctcccctgccccatgatctgtggggaagggagactcggcccggcagagggtgagagaaccaaccttctgtgccgagcgctggctctcaggccaccagcagcagcctggcccggccccgagtgggtgtgtgtatacatttcctctggcccgtcccaccccccagccagtgcagacggaacaagcacagggcttgttttcccacgaaccgtcccactatattctggagaagaggagaggagggagaaaacgcagcctctttgataaactgctacatgaactgcagcgcaacccaacagctgtgagcctgacaaggcctgcttctgtgcgggagccgcgcggctgagcacgctcacccccagccagcgcggccctccggcggcctggggcctaatcagctgtgcctccctgccccccttcctccctgctgccttgcaaagagggctagccagagaatgctttcttttcagccagtgactgtgctgtgaactcagggctgcagccccagccagccccgtccacggtggctgaggtcctgagccccctccctggagaaagggaagcccccaagatgaggcattgggaaggggcccaagtttgggaggggggagctgtcacgaggctttcttccatgagaccctgaccccgagaagccccaccgggtacggcttctggttcattctggccctccttcgacatagacacacgcctggcagctcatctagtgtggccgaggccctgctaatcctgtgccccctcaggggcaccaccgccccgggctccgccaacgagccccgcgctgggggcgggtggagtgggaaactggctgctggagtgggtggtggggccggagcccgggctaggaagccactggaaactggactgagttttaattgtggggcaggagggggcacggtggcgcaagagtagctctgttttcccgccgtaattgggaaattcctctgtgctgtcctcgtgcgctcctccccggggacaggcgacccctgtggttggggcagcccacaccgtgggcccgctcaccgtctgcatcccccgggcctttggagttcactcagcatcggtggcaccccgttaccctgtccctttctgcgtgccaccttacctgccggggttattggttggtccccagagcccattgtgctggtgtgaatgaaagatgaatcaagggacctggctagaccgtgttcacagagcagtgcagaaaagcagcttttcccacggcccccagcctgcgaggaagctgctgggaggctcagctcagctctcccacgtgcccctttaacggatcacgtcatttgttcccagtaaaaacaaactgctgtgacagacacacggcccccctgagtctgtctgcagaaacaggtcccgaggaacctcctcgggctgcaggaggagtggggtcttcgtcagttgtccgtgttgatgggtcctccgccgaggggaaggggacgggacactgagcagggctgggggctttctgcaggcgaccgctccatccccctttggagcagctcctctccctatcagtgttcagccagcctgcccagctgcccgtgggaaccttctggagcctcccgccatcactcctctccaggggccagggtgcgtctgtgagatgagacacaggactgcacagggagtgtgtggcagaagctgctttgcccagccagctcctgactttcatctcctaagcggaacgacgctgagggcctgtgaatgcagggtggcccgagccgacatgccagagattgcctgcaagaaagccctgcccacaaaggtgaaaagacgtccctggaaggggcaaagatgcagagagcccagcccggtccatttccactgctctctcatccttggcaaaatgccagcatccaacacctcgcagaaccatctgcgacccagggcctcccctaggcagtccacatgctgtcctccctgtagaacccactctcgtgcaagaactggagttcctgcaagaagtgacgtcttttcttctggagtgtggaaaccacatgcagtgggccttgctgggtcaggctgggattaattaggtacagccaggggtgtgggggaggagaggacgtgctgggcagagagagccctgtgcggcgtgctctgggagtctggggagttctagagggaagtggccccacgttccaagggtcctcctggatccttgaagggggtgctgatggaagcgggggatggaggctttgagcagggctgctgggaggttagagggcatggatggacttggcagagggaagccacgtgacccatggagccagcggtttgccccacatccaggagcacctgtggaggggaaggactcaggagccaccccgtgcccaccacgtgggatgccttaaaaggcctccaccgtcatcatatgggctgctgggccgtcccagcctccagttaaaagcgctttgtagtccacacacctgagaagcggcagctccctgcactgtagccagaggctgggaactagacagtgaatttctctctgaagcttgagaggttgtggaacctgtagttgtctctggatctgtttataccttatttcaggacgccaggaaactagcaaagctttgaccttgggaagccagacagctcggttaattaggaagtagctgccggggatcacagtggagcagcttaacagaatatcagcaggtttggaattggcccccagaggtcactttcatcctccgcctccctggagtagggctgcctctgagccaggagagacaagtgggtgtcctcggcctaagtgtgctttgaagctcctggagcagcagttgcagaagtcaggctctcagaaagctctgcctttgttacttttcaccttggctttcctagagaaggctgctctgggaggcccctgtgtggtcctcccctctccccacaagcatattcttttagcaagtaggcacagagatcacacacacactcatactcatcttcagtaaaatacgcagaagggtttccatcacgtgctgtttgggaaaggcgtcagaccagctgccccttccacgtggaaggagagctcccatctctgagcagatgcgtcggaagggccctggcctgggggagtcttggcgccaaatgcaggctcagacggcgggcacccgcccacgtgacagcacagcgtgtggggagggggctctgtgagcccggctgcctgctcgtggggtctggggtgggcagtgggagtctcctcacaagctggcagctcggctcccaagagagcgtgggcgctgggcctttgccctcaccctcaagtctccctgcgtcccaggagcccctgcacccgcccctcacccatgtctcagggcacctgcgggggagctgcatacccgccgtggagcccagagcccagagccttagctgtcttctgggtgctggaggccgtgggggaaaaccgcccagtgtccagcctggacttgcttttcctcagcctggctggaaggagcctctccaggcatcgctgacccatagggaagcctgctgtggccaccccctcgctgccctcttttggctctcagcctctgtctgtccccactcaggaggggagcaaggatgagtctgcgagtccctccctgtgtccctcaggccccaggcctccagactgctgcctgcccgcccgccacgctggcctgtttccggtctgtatttagatgacatcatctcacaagaactgcctggctctcagacagggactgactgtctttcttggtctaaatctccgttttgattcttgctcagaaggacaagtctcaacccctctctcctcccagctcgtttgtttttcctctggtttatcacagttgctcacatcacccatattggcctctctctctgtctttgaagctgagctgagacagatttcaagtgcagtcctgaggcatctcgtttttctccagccctctgttgagcatctgtctccagccttgcctgtgactctttcccttccgatgctgctttcctgggcgtgaagtttgtgcgtctcctgctccgtctccaccagccacacgcccgttggcgctgcggtcgcggtcccatgccccagctcctgctctcgcctgtgactgcctgcctgaacatggggccatctgagcctcctcgttttgctcccccgaaagctaccactccagccggataatggagctccgtctgcacccgcagccttgccatcggtagactcggagcctcctgtgtccctggtcctgcctcattttctctgccgttctgccgtctctctggcagacccctctcttcttcaccgcgtgacgctgacacgttcggctcctgtgctgcacgtctgtctcctcctggtcaggcccccgtggcagcctctcctccctccgtgcctcaatttccacgatgcctttgtttttaatgtaaatttttcattaagtaacaccataccatataaaggggcgtgaatctaagtgtcctacagcttggttagttttcgccaggtccctgtatccaggttaacaagtgatgaaatcaagaagcagagcatttctagcacccagaggtccctctcacgtctcctccctactcttcccccaagtaggcactggcctgatttctaactgtacattcgtgtacctggttttttgttttggtttttggagggttttttgttgttgttaacctgattttttgagctatatataaacggaatcatgcaatctgtgctcttttacaagctctcttttggcccatcgtgtgtttgtgagaggcactgtgtcccgcatggcagcagttcacgtgtctgtctcgtcccccctgtgtgaggagcaggggctcacttgcccgccctgctggccatcttctttggcactgctgtggatgacgctgccatgagcgtcccttcccttgtcttctggtggacacacgtgcacatttctcttagataatgcctggggtttgctggagcagggccatacacatgtttagctttgacaggtaactgtcctagttgcaccggtttctgcttgtatccaggatgtgtgagagcttttgttgctcacatcctcaccaacacttatatcacagtctttttgcttttagccattttgataggcttgtggtggtatcacttgatggggtttcatttgtttggcttttggccatactgcttggcctgcagcatcttagttcccccaccaggggttgaatccagtggtcccttcactggaagcacagagtcctaacccctcgaccaccagggaattgccctcaccttgtgcttttaatttgcatttccctgaagaccaatgaagctaaagaacttctcgtgacttttttgccttctggatatcctcttttgcaatgagcctatttaaatcatttccccgatgggtttttggtgactttcttcttgatttgtggaaattttttacatgttctgaattcgagtctttctccagcgtgtgtactgtaattatctcctgctgtgtggcttgccttatcgccccgttaaaagtgtctctggtgaacagaagttctttatttctaatgtagttcaggtgacacgttttgcttctcagcattttttacagtttgtggtgcttttctcaggggattaggagctcgtgagaaccaaccatggagctgcccgtgtctggtaagcattcccagcacgctggactccaagtacaatccgcctaaagcccagaggcattagagctccacgctggacagggtcttggaggccaccttctttccatcccccccatcagctgaaccccagggcttccgggttagagccgcttagatctaactacagttgtcaacagtcttggggtcacagtcaccagtacgacaaggggccttacctggcccttagagtcagaccgaggcgtgggctgcaaggcccgggaactcagcgtctcccagtggtgccgtctctcctctcagcctgcctgcggtcagcctctctgctttggtcttgcccgttggcagggaggtggcccctgtgtctcgctccatgtgctggctgtgccccgcagggtcatgggccgctgggtggggcagagcagagcggaacgctctccagaggaaagggcccgcagctgctctgctgagcattgttctcctatgtgaaagtggagatggtagccaccgtggtctcctgccagttcttgggaggttaagtgtccccacaagacggtgctccagggagtgtcttgtacctggtgattgtgcgggaggtcctggtggtgacagcgagggtccttgcgatgaagccccctccctctctgcgtgtctgtcagggagccggggctggggcctggccctcccgctcccccgttcccagcccctggctcctccagcgccgtccgcggctgctcccttggactcggctcctggaaggcaggcgctctgtggctgactgtcgctgtctcttgttttctagggaagtgtaggcgagaaagccgctgagcaaactaagacttgccccccagtggcctcccttcctctgtccccgcccccacgccctgcctgtctggacggttgcagtcaggacatggactggcgagcctgaagcaggagtcccccgggcctcctccccgtcagccccgtgccgggcaggggtctcaggacccgggcctgtgccccactcccacggggaagaggggctgctgctcgtgggaaattggctctggaaccagaaccccaggctgtggacaggagacccagccagcgtccactctggtcagcctcagtgctgcctgaaaaggtgtatgaagcaggcgacaccgagggccctccagggctgcggtggaaggaggggcccccctcccctctgcctgcagcctaattgcccagccctggggggtggggagccgcctgtgtccctgtgacctgcccggagaccgccacgggggggcaggtgggcgggagcagcacctgaggagtcgggcctccagctggtctgatcccttttctgtggtttccgcttgcagcgctgcaccttgccagaggctaggacttgtctgttgtgtgccctgtgtcactgcgtgaggagccgggcttggagtcaaaccagccccgcccccagcaaggccgctcgtgctgtctccccacctgtgccccagcgtgttggccccgggccatgactgaggggacgaggggcacctcagtctaggtttggggctcagtttggcccccaggaggggccttgagggccaaccgaggcctctcacacaggcagggactcgggctctgccctgcgccacacccgggctaggccactacagacccggcccccgtggtctgcaggggggaccctcgggtcgtggtgggcaggagcattgtgggatgggcagggaggagcacaggctcacccaggcagcggcggggtcacaggtgcacgccttcttccggggctggtcctggggcagccctgggcacacgctcctgccttcacccaggtggcagtccagtgacacagcagacgagtgactaagaaatacgagccctggtgctgtggttcctgctctggaggaagcggcaggcttgatgggggtccacaggtctgggcctgaggggacgtggggtgcccggcagcttcagcagagccaagaagctgtgacctggatcttatgttttctcggagcataaaagtgccctagttttccctctcctcaggctcagctgaagctacgccaagaactagcttttaaaggctgcctgaaatgtggtttggagccaagaatctatagagccagtgcatttgtgaccttgttgaaaacgcttactgaggaaaatcaaggggtaggatttggaagctggctttttgttgttgttgtttttccttttgaaaattaaaaaaaaaaaaagccaccactttggccttcttcaccccatgcttcccccctgcactgcccccagtgcccgagtccgccagccccaggcgctcagcccttccgctctccacgcctcccccaccccagtccctctccatcccccgtgcttcaggaatgaaaatatcaagtgggtaaaattaaggagccgggtagagccctggaaattaggccacagctgtcagtccaggcaagagttctcgtctctgaatggactgccgggagcaagcgctcgcaacaccccccgccccgcccggtgagcgtgggtcagagtcctcagctccccgccccgctctggaggggctgctgctgctgtgccagcctccactcgtcaccaagcaggcctcagagacagggtcccagtgccctcccgggggccccaaacttgagcagcggcgatgctctgtgggagcacatggctgggggggcgtgcccagcacggagggaggggtccggggaagtttctggaaagagatgcagagtccctgagccatggaagataaggcagtcgatggcggggaggtggtaggagaaggtgccgctgtgtaggaggagtgtgctcagaagcccggggccaggccgcagggccccgggcaggctcagaaggccctctgcacctgctgcgggcgtgcgcaagtgctgaaaaacaccccggccacactggggtgggtggcgccaagccgggggactgcctgagctcccagagccccatgccccgcgcttccgtgaatggcagggaagtggggcctgttaggtaaaagaccaggacaccaaaaaagtgtctaacaggctttttaatggcgaagcgctcccggccgtggttcccagacccgaaggaggcaggtcgaggaagtccgccccggaccatgttagaggtgccttatatacgttcattgcgagggatggtcaggttaatggacggggctttggataggttgccaggccgaggcgtcgcaggctgataggtccttctacgtggctggggtggggcggctttaagctggcgaagtgtgctgtcattggtccccgggatctgggaggtccttagggacttccccccgaccccggccggcaggagggagaggagggggggcccatcatggccccctgggtccggccttacattttgacccttctgataggataaggggcgccattatcgcttctggctacttcctgctgaactggggcgttgctggggctgagggtcgtggccggatcccagtgacctttagggggcctcagggtctctggacgggagcttggagtatgcggctaccgtcaacatctgtccagtagccgtctgggttagctccctgaccctctggaggatgatctgaaaaacacaaggtcttattgacaggatgaggaacaaggctgcgaggggtccgagaagcggcagaagccactttgcccaagacgactttcaccatcccgagaaatcgaaaccgtctgactcggcctgtccaagtctcatgctctctctcagctctcggaccttgttctgaactatccccgaggcattaacgaaaacaaaacaaaacagtcttcccttaggaactgacaggttccccctttttcagccgttagcagctctagggcccttcgattttggagagcctctgctgccagagaggtttatctgggtttgtaatgccattagggaatctgccaccttgtccaggtctcagctgaggtctgcggacagcttatagtagaagtgcgtggctgatcccagtcctcccgcccctagtcctaaggctgtgaataaataagcttcctctgagggaaggggagctacagctaatgccctccggcagcggtgggttggctggatctggtcgtccatcgcctgtggtgtcagaaaggtcagatagggcgtaagaagactggggtgcaaggctgagtccagttggggggaaaacattgtaataaggtggtttgattacagagaaagaatatccagggttttccgcatattggagggtttggggatagggggtctcgtctcgagccatcacaggccactgtggtcaatgaggtgtcgttggccagaacacagaggcattggctggtaggtacagtatctcagtggcccagggctcatggtgatggggatgctaactgtccatctccagctgcgccgttggcctcctcagataccagaggctggttaaggagtggttcaggaaccttgcttgacacgggacatagccattacatcgttctggaaggttcagtggtcccggggccggcagtgtgagcaaataacctggactcagtctcagaccttcttgatacccagacgtccctgccctgacgcgtgcggctctgtcaggcagctagtcccaagggtctttgagctcagccaacttgcctcatctccccagagaggagtcagcctctcccttgctcctacgtgagctgatccccttcctgacagactggcctgcctccttcgagcccactcctaaggagcctcccgccccctctgccagtagcccctggcctgagcagttggcaggttcctagggttacctcacttccttcctacccttcaagcctgagccgccaccccagtccagttccgtctgcttctcctggcacccccaagtcgcacggtaattgctttctcagatcctcagctgtgcaccccgtctgtgagtatttcccggtcccctgaccctctgcaggaagacgctgcggggagcaggagggagaaggactgcgaccccattcccctgccctgcggccctctgccctgtctcttgccagcagtgcctgcagtagcagcggcgctgccacgctctgccccagccccatcacgcggcccaagggcacactccccccagggtgcggtgccggacctgctgagaccgggcagctgcccggtgacaccgtccccagcccagctcccaagacgggggtctgtgattccagagctctgggaaggtcacagcttctgtttcattgttgtggtgtttggagaaacattcaggcatccctttacatgcttagtcttcctgagccagcggggggactcctaggaaaggaaagacagccatcaaagacgcgcctgcaggccaagcctggtggccgcagagtggggagcccagctcggggaggagaggccagagagggaggcaggatggatgggcctggacaggtgtgagcgccctgggccccggcccctgccggctgtctccccagccccgacctggctctggcctccccctcggaaggggcatgtagaaaggcggcccccagaccctccattcttgaaatcggaagaaggtgcttacacaaggcacacgtgatttaagtagccacacaggagggaggctcccacgcaatgctgcagtctcagatctcccctggcctggctgcgtcgcacccaccagccccagccccaggtagcttttcggcgttggtgggaggccgggccttcgtctccgttgataagactttgctcttctgctaagaccctatttcaggagaagccaccccgtagtaggcactcctgcctcagagtggaaccaggcgtcttctcatgcaaggagtattatgctaatcactccttgcaaacaggcagactctgtaggaggtttgcctggttttatatgaaacctacgcctttgaagcaaagagccaccgtagctaaaaataccgtttcctggctgttgatcctctcatctgtgctgtgcttgtttccattgttaaatctcgctgctccgcctccgagatctccacgagggggtccacagtgatccccaaatgtgtaggtttctaagtgatttctgtattgttttaaaagacattttaacccatgtaagataaaaatggaaatgacgcagaagaatatggtgtgaaatgtgagagaccctccccaccccttcctccccagaagtagcctctgctttcggtttcatgtacgtcctcccaaaacttgtctttgcatttacaaacgtgtgattctgtttggctgtggcgaaggttgtggttttctggcagaggtttccagactcagagtcgttctgccgcttgccctgtgttccctgacacgtcagccgtcgtttgacaagcaaatccatccagatcccaaacttgtcgggacactgccctctcttcaggctgcagcgggctggctcagggtcacctcttcctgatcaaggctgccatttcggggttgaactccatcgcccgtttctctctgcagcttccagaccgtgatctgtgggcagtggtgtagtgagggggtgctgggggctccccagcagaccccttagctgacacactctgaggggaaggcagggggctgtctcttctgtgaccgagacctgggactcctcaggcacctgcaggacaccgtcacatctggagccctttctcattctcgtgtgcttaatcccataaagatctcctaggctggaaagggacattcggatgaaaagcctgtttcatgcatcttaaatttccctgaaaatgactgatcacaaaaggaatttttgcagcctcctgacagcgggtggaggggggtacaaataagagaaaccccctttgcatttggccacagagaactgaagcggtcccttccatgctctttttgtcccgtcctttcggctgtgaccctgccatcctcccagccctttcactctgatctcttcacattgtccaagagactcaagcgccaaggctgctctgatatttgctctttgttaccagcagtgggtattagcgtttcacttcccggtctgtcctgacgtttatctcagtgccctttaagtgggcacttgtgaagagctacagaaaatgatctcagatcataaaattccgtaaaactcccagatgaaagattggaaggccggaaaggcaataatggttccagctccttggaggttctctcctttggaagccagttgtggccaagaaggcgggagaggtgcatgtggagaaggggagcgctgtgcttcccccagggccgccaggcagggacccaggggagcgctgtgcttccccccaccccaatccctggggccaccaggcggggacccaggggagagctgtgcttccccccaccccaatccctggggccaccaggcggggacccaggggagagctgtgcttcccccagggccgccaggctgggaccgaggggagcgctgtgcttcccccagggcctccaggcagggacccaggggagtgctgtgcttcccctccacccatccctggggctgccaggctgagactgagggcagggtggccgcgctgtccaggccagagggcttagttcccttgcaccctttcagtggagcaagtcagggctgtgcacagaggacctgggaccccaaggcggggacaaggcggaaactcaggggaagccaggacacaggccctggatgggtggggagcggtcggagaaggagagcagccaaagctcctagccaggcccaggctctgcagccctttgccggggctgtgaaaccactccccacggagagcagcattgccaggctggcagcagttcagggcggcagttctcagtcctgaccgggaagcctgttaggggtacacatcacctactcctggagtcccagatggtctttgggtgactccagtgtacagccgggttcaggggtgtctcagtaaggggctgtttctgacgtggagcgcctcctggttctggagggtcactgtgtgaccctctggctgggccaggacacggagacaggaggtatgcatggcacccacgggctgggcactgaggctgccaccagagaagatgggaacccctcaaggcacatccttagaggagtcgccacgggaatgtgagatgcaggtggctcactgtggttgcctgggacccacaccatgagggcagcccgtttgggtgaagaatttaaggagggggacgttctggcctgggtggggtgaccatgtgggcacagggctgctgggcccaagtctggtggcggcattgagagaggggcagcgtggggggacactcaggcctctgtgtcccggcccagggtgactaagggggaaaggaggcactcgccgtctgtaggtacttgtggtcacctcaccaagcaacaggaagtgatccttggcctggagtgaaggactagtttgggaagaatgggatggagtagagggaagtgtgaacagagcagcttgctaacaggaaggctggtggggccgggggcaccccaaagccattcctggggacaatggagcaacccgtcgggcctccgactcccggcgcttctgttacctgctgcctcactgctcaggtcacccccaccacttgaggggagatgtgtcagcaactcagcggcgccttcccttacctgcgcctccacctgaagggagcctggcgattaagggcacgtgtcatgaggtctgtgtgccttaggcattccggtcacagggagctggagccctcaggtggagagaggggctagcccaaggggtgaggtctgtcctgcagctgacacccagctgactgtccggcggaaggaaaactctgggtcagggattcgactgcaccgtgttcccggcagtgcggcttggaccagtcctggacttcggtttcttggagcgcttggtctctgagggcctccgtgagcctggctggacacaggcagggcgtggatgccaggcaggtccgggccaggaagcagtatgccaggctggatgggcgccgaccttgaggcgcctgcagcctcttccaggtggggccctcctcagcgggaggctgcatgtgtccagggggagccccctgggaagggcaggagcttgcagggcttcagaggggaggaccattctgtgcaattctcttgacggtccacccgtgggaaccccaggcctgcagggctcagggttgtttccccggcaactcagcctggactcagagcacaggagtcatcggactgagaccccgcccctcctcctgggcctcaggtagcagctggtctggggcctgctggtggggtcacccccatgagttccttcctcacccctactgggctccccagctctacctcctgctccaccccttggagatgggccaccaccccagcagagcagactcggtgtgggcgcaggtcactgcgggccagggatggccgtgtgggtgctcagtgcccagcactcacagaggcacctcgagggtggggtgcggtgggatgagctggtttgctggtaaactgccccagggccacagggaggttctggagaaatccaggctccagtccatcagaaggcctagtgataccagtagccaaggtgccctctaccttcccccaaaaccatcccgtcttccagaaaaagttcatcagagcccctaggtgaaccaggcaaatgacgaggcagcagcaaagcacttgggcaccagggagggccaaccagatgggacctcagcaaggctctggccctcaccctcgttctccacagatgaggacggctaaagccacttctggcccatttgaaaggggctttaggtacctggcaggcctaatatggaggaagcgctcacaggcgtctgtcctgtggggccagcgctgaggaagctgtaactcagcttgaagggaatccctgtgtcgggaggggcaggggccaggcccctctcaagggctggctgcagttgattgtcatggagaccacaggatttcccacaccagcccttctttttacttttcccgggagggctcaaaagatgaaatattctgaagccatgggcttcacctcccagggtttgaggcttggagcctggagagacagtgcccggaggcttccccgtccttccgtggcatccccagagcctctggcagggggtcgcacccctgccacctgacatgcctccagccatgttcagggcaagctccctgtgggaccaaggtgcagcctcctttctaggacacaaactcagacgttgtctgtaagtcagccctacgtggttcacggcccgcctgactccctgggtgcccgagcacgcagttctcagtgccagctgaatgccacaccaaagtgaccagggctaccctgccctcctgtcagttaacttctggcccacaagtatccatctccccattgcccccagcggccccgcccaatggggcttcttccctcaggaagctgaggtcaagaaaggagacgtccccagaaagcagcaggggcccctggcaccctgggggtgcaggcagatggtgggacaggctgggcgggcaggggaggggtccgggcacaggcctgtcggggggccagaggctcttagagcacaggggccgagtttgagcaggctgctgcggcacatgggaaacacaggccagtggggcgtgtggctctggctgctctcctggggacgggcaggaaggagggaatgggggtcacctctcccgggcttccctcgtagctcagttggtaaagaatctacgtgcaatgcaggagacctgggttcgattcctgggttgggaagatcccctggagaaggaaatggcagcccactccagtattcttgcctggagaatcccatggacaggggagcctggcgggctgcagtccatgggtttgcaagagtcggacacgactgagcgacacacagacttctcccggctctgcccctctctccatggtccctggagcaaaccccgagcctccagagaggccctgggcgcttccaggagaccacttggttttctcggcccctcccgccctaaggaggcctcggaaggtccctggatgagccccgttcaggcatctgccccccagagcctgccacaccctctgtaacagggtcaaacaagctgcgtggaccaaagccccttccttcccatccctcggcctctccccatccacctctgtcttcacccccactgcaccgactcccagcaagacccagaaaaacaagtcctcataccctctcctcccaccacacacccccctaaaaaacttcgcagtgtatcagacacattggctgcattagacatgatgaatttttaaggcatgagttggcagggttaccatggctgcttctgccctgaggggcacactgttgaggattgattgaaataaataaaacagatttacagctttcatactcgggaagcagagagctggaaggggagagaagccgggggctgtgggggaggaggcagggagctctctgaacttcagaagggagcccatggcctcctcccccatctgaatgtctcagcgacctgagagccactttctctttagattcctaaaggctcccagctgtcgggacaaggggcagggaccaggcaggagggccctttcctggggaaatgactctgggtcccgtgtgccctgtgctctacgttaggctgtgcttcagttacagctgtggggctcctggcaaaagcctgttttgttggccttggggccgaggagccgtggacgtgacctagggccaaaaggagaggaagtgaggacccagccctccatgcagggtgctagcagctggggatggagatcagaggagggcccaggctagagggagaaggcgggcactctggggagacagattgcctgaagcccgccggccagccctgaccagtgctccaaggcgggctccacgtgcagcctcgcagggagcctgactcaggacgcctgcccgctcacctcccgcagcccaacgcgccccctaccccgcccccctgccacaggccacaccaccccttgaagagccgagctcacgggggcggtcccccagcccagtccctcacggggtgccaggcgggctggatggccggctggagacggagccgtgacggacctggcaggcagcgctggtggaggacgcagaggatggctccatgagctttcagggcagcctcagagacggtggacagacctgcccgcatcggaaaccactggttgggcccagccagacaggaggcgccgaacaaagtcactggtgtcgcctgtcccccgagtggcactaatacagcacgattcctcaaggtctggaggggcctgggaaggactggtcccctgactcctcgggaggtagggccctagggagcggcggtgcacccgctgggcccaggacctggcagctgaggctcattttgagttctctgttcgtcgtggggcagtgaggagggaggcgactgagggttgaagcaggaacagactgtattagtagtgactgggggccgggaggcatcccctgcgattatgcccgtctcggcagcagcatccccttctgctcaagtggggtcaatccagagtctcccctccaggccagctgttcggtgccctgtgctggtggccaccccatcagtgggggtagctagtgactcaggacagtcaagagtgggaaagccctccagcctccatttccccttaaacttctcttgaatccacctgatgccagttccatgtcccccgaccagtaaccagactgactcgccagtgggatgagttgagcccaccagctggtcccaaagctggcactgtcagcccaggtgggggacactcctgggccctacaggctacttgctcacccagcaccctctcttcatggatcagacatactgtctgcttcagcttttctacaaaaagccaggtctgagcaaggagtagggaggggagggccaggcagccgcccccagcgcccctcgagaaaggatgagttcacttcgcttcccagccagctctgggtgacgggctcggtgtcagaaccagcaggaccgggtgccgggggcgtcggcatgccctgacttggcgccaggcgccagggagaccggaagggaacccagggacccaggaagccttggccgacaacgtgggtgggggagtgtgacttcgccggtcctgttttgggagggtgcaggggagtggggtcatgggaagaagtctcctgtcttctcccaaagccggatggctgacttcagatttcccagagcgtagcgcggcaggcagcaggatgcctcccccgggaagaggacccgtgcttgggcccctgttccccaaaagccactctgggtccctgctgctccacgcgggcctggcccccaactgcctccaccatccatgcccccctcctctgtgccagcccatgcctgccccccggccccctctatcccaaaaggactgggccccctccctcagcaccctcactaccaagacagcctgccccaggcaccctgccccgtgcagccccccaggcctgcaggatgcgccccggtagagcagggcctcttcttaggctctctgcacacggcccagcagggaggggtcttggcccccacaccgggactcggccttgcccagcttggtcccggttcctggaaaagaagcggcacacggggccttcccgcaccaggacagagcaaggacccacagagcctcggggcacgacctgccctctgcagcccctgccaggccagttgaggtcttcctcctgcccactctggctcgtggtcacctgaagcaggggctgtacgtgggcaccaggctggaccgagggcagcacctcccactgcgctggggccattcaggggcagagtctggcgggtgcttgaccggtggttgtggttgggggacagtgaggaggctcacaccagcccggcaagcgtggtgtggcccctgtgggcaggctctggtcctgagccttcccagcccagcgcccggcttggccttttgaggccgcccctctctgtgagttagggaaagtggcagtccctcttgtgtcccggggtttcagagccgacggaaggtagactgctcccctgagagctcctatgagtgacacagggtcccccacaggaactcggacctggaagcacgggacagcgggccatgccgcagcgggcggctggaggagagggggcagagtatgcgctgtgagccgccccggggcaagtgcctgcggacccctgctctcctcaggcctaaggggcctccaggttgtggcctctcagaccccacccaggctccctcccaccccacctctctgccttgtccccgagtattttccaagctattgtctcatcgcgaatagcacgttaatgtgggtattaaaacatgtgggcaagtgtttaatgcgcgcaagctgtgttccattattgatgctctgcttgaggcccggcaggcagcacaggcgggctggggctctggagaagcgatgacgcagcagccccgtgaggccgccgtctgccgggcctgctcaccacgggctcctaggaggcagagtggggaagggagctcagtccctgggtctgaagccgcccctcctcccctgcgggtgtggccgggcccctctgcgtgcgtggggtgcaggctccgtgaggtctcagcagatcccacggggggagcctgggactgggccagggaggctgggccgcctgtgcaggtcacgccacaaactcaggtggagtgagaagtgccccctcattttcggccacgctgggtcttcattgctgcacgcaggccttctctggttgcagagaacagggctgctctctagttgcagtgtgcaggcttctcttattgtggagcagacgcttggtgcacacttcagaagttgccacccaggggctcattacttgtgtcttgagggagctagagagtgctggctctggtagttgtggcgcaccggcttagctgttcttcggtatgtggaatcttcccggactggggattgaacctatgtcccctgcatcggcaggcagattcttactcactgcggcaccaggggagtccgtaatttagcactctttaagaagcagccctgttggggcacggagggtgaaaaaagaagcagggagtctgattagaaggtggcttggaattgagcaggcaagagagggctgactggtggccccaggcagaatggctgagccgggccaggaggcaggcgtgcgctgaaggcttgtgagagggcccccgagggtcacggaggcctccgtggtttgggctacagcagctgcatgggcagtgatgtcccctgaaggctgggggcctgagtcgagggggaagccaagaggtgtgctgtggccccaccaagcctgaagggcctgttggtcaagcaggcagggcagccaccaggtgagcggtgcccgtccagaggccaccagggctcgagaggcgcatgtgggagccgctcatctagagacggctttgaagacatccgcagggccggacacggccactgagggtgccagccagaaagggagccgaaggcgactgaaagccgcaaggagggcgtggtggtgacgcggacgtactcaatgctctgctgtcctgaccttctgaggcctccttgcactcgcggcttctgagggacgccgggaggccgtggtgcccacctctgctcctcaccaccccccttgccggtccctctacaccgtggtccccaggaagcgctgcctgacagcagcctcagctgtcggcccccgtcatggagacggcgacagctgcgggcaacggtcacttgtgaccgtttgtcagaaagcattccttcctcccggtctgccctcctgcccacttctctcccacggccctagagaggggcccgtctcgggctgggagggccccgaggggataaaagtgctgtctgtgctctgcccaagggccacccgtggtaccaatgcgggacccaaccaggggtcctgtctgtcacgcaccacgcgccacacaggctgtcaggagtctgggcggctgccctccgagtcgcccccacggtgcaggtagacgtcacccccaactagaaggtggagaaattgtcccacagacacactgggtcacacagctggtcaggaatcaggagcactaggctcgaggctgtggcccatcctccacccgccccatcccaccctccggcccgtccccgcaacagctttgtttccatttctttggtggtttctggccccggcctgctggttccagctgggcctaggctggagacagcctgcctgctctttgcacttcgtggtttggcctctctgttaccaaatgctctgggatttttctggagccaggggtggacaagactcttctccagtctggccccagggcgtggctggtattcggaaggaagcaggaagccagaccctgatcatgctgagcttagtgtctgctgagtggccagaagcagaggtgttagaggctcattggctgcaagtggggcacgttttgttcagcacctttgaggcctcagacccctgttcaggcaaaaagcgcccgagaccaggagtcaggcaaacagacgttgaccccggatgagagacaggaaagggggcgccatgctggcaccggcccccaacaggcagggctcaggggccgcacccacccttcttaccagcatttgccgactcctgggtttgctcgtctcgcttccagaggccttgagattcctagactcccgacagaaaggcctgcttgtccccacaaggccaggcttctgtgggcagctggcaaaccagggaggtcgataggctccccccagccctgtccttgagacctggtgtcactgttgacatcaccttggtccagagacccgggggaaactgctttcttcctctgttctctgggttcccagttttcccttttataaaatggagactccttctcagaaagccccagccttattccccaagctgtctttcttgggatttcacattcttgcctggggtggagggataaacacagcctgtgggactctggagtgcccaggagctgtggaccgagctccactgagactggcccccttgggcaccccagaggcccaggacctgggagccctgccacaggtccagaaggctctgcctcctgttgcacgcagacagcatctcccctcgccacccccacaggcagctctgcctcctgttgcacgcggagagcatcttccactcgatggcagacatcctgctccgggaggaggacctcacgtttgcctcgaccatggtccacaccctcaacaccatcctactgacctccactgagctcttccagctgcgaaaccagctaaaggacctgaagaccccggtactcctcacccgcgggctccagccagcgtcgttcacgtgcgcacgggcgcggccgtgccagcccacccctcggtccccagagattggtggggaggagacaaagatgcgacccaaggcctcccggtccagtgtcaaatatgggtccctttgggcgggctgtatgtaagagctagccaggggcgtgggtctccttggagccgcccgccgtgcagggctctgcccacagaaggctggggaccctgctccggggtccatgtgccctccctgatacccaacccccacttggcactgcccctgtgcacacacagcagctcagttctgaaccccccttgcaggcccagttgaatcgtgcttactgggctgtgccagctggtcagggtcgggcctgtggatacaaccccaccggggtcgggcgtcaccacccccctgaccctcctccttggcctgggcccccctctcccgcagagggacatgtctgtgtcagccagggtgtcacggtgctgtccggcccaggagttttgagtgcagacccaccagggctggtcggagagagcaaggaggcgctcaccattctgccaaaccactcggggggaagtgggtcaaaggcctcgctcggactgagctgcggagggtccctggggttggctgtcatactggacagggtggcggctccggggcttccatctgggctgtgctcattctcctcccagctcagaccctgcgctggcccatctctggggtctccaggacatccaggcctgtgcctgggggcattggggcccgacctctaggaatgagccaggccacactcctgcctccctcctgtaggatgttccttaggggaggggctctccctagggtgggctcagctccaggcgtggtttcaagtgcaaagtgggctgcaaaggaagaagaggtggttttgaggatgacaggaatgcgctgcccaggagaggaggcagggccctgagcaggcttcctccccgcccgcacccagcgccctcgtggccccccaggccctgccgtggaaggctgggagcgtgactgcccttatctgccaggccaggctcactgccggcaggccctcgcagccacagcacgtggctctgtgcgcccgagagtaatgacagggtctgaggaggagctgtcagcgttccctttgtgacggctccttccggctgggctgccaaacacagcccggggggccaggccagcccctagtgccccgcgaggtgcccgtggcgggcgtgggcgggagggggcacggctggggggtggggcccaggccggggaggggtatggctgggggcgggctctgttgacggcgcacaccccctcaccctgcaggagagcaggaacctgttctgctgcctgtaccgctcctggtgccacaaccccgtcaccacggtgtccctctgcttcctcacccagaactaccggcacgcctacgacctcatccagaagttgtatccttcgctcaccatcctagcgtccagcctcagggggcctgtgggggccggtcccagcggactccccccgaggctcccctccaggcctgtggcttcagggcccgtgaggcccagtgagggacgcagctgaggaaccagggtcatctcgcgaaccggaggtcgggaagggtgcgtgcttaggtgagggtgccccaggagagaggtagggtgtcctcagcccagtgctggcgcggggacggggcggttggacggcaggaggagttgagcccaggggcctttgggggccgccgagccccgcagaggacgtgccggcagaggcggagcagccgcggggcctcgggacgagggacggccccagcgcccatcaggacctgtctcagaggaaggcatccaccgtcaggttttgcttggaacactgtgaagcaaaccagctttctctgcatggtgtgtgacctgggtcagacagctacgtaggaggcaggattggccttctcctctaaggggcggagagctaggataaggaaagaggggccctgcggcgcctccgctgagggtccgccgtggccttgcccggctccctcaggcgcccgcacgccgtcacacctctgtctgcccttcatcactcaggcaggaacagggccctgcctgccccagcaccccctgggccgcaggcccgagataagagcccttagggcctggcgggcgcagaggagaggagcagacggagcgcggggctgccctgccgcctcggtctagaggggcagaaaggcagagggaacaggccgctgcggctgtgctttgtgtcccgatgctgctcaggtggaaacacggcctgagccctggagccagggcctggggcaggggctgcacgctctgtgcagccaggccagcccctccgtgcccccagctcagctccccagagagcaggctgcccccaatgcccccagcccagctcctcagtgggctgccccagggcccccgcgcccccagcccagcccctcagaaagcagtctgcccccagtgcccccaccccagcccctcaggcaggtgggctgccctggccagcggtgaggcttccttgaccgccctcccagcggggacctggaggtcactgtggatttcctcacggaggtggacaagctggtgcagctgatcgagtgccccatcttcacatgtgagtgtgtgccgtcctgcagggaggctgcggagccagattcagagagtggctctccgcccctggggagggaaggtgggcgggcgggcacccagggacacttctggaacatcaggaatgtgagaatgggaggacggggctcaggcggccggctagaacagggcatcagagcctgcctgtgcgctggcaaaacccacctggggcaggcagggcggccattgggagtgctctcccaggcgcctaagagccagcccctcgtccctgcagagcagggctggcgtctgccaggagctgatggcaggtgctcagtgtaacacctgagctaagtgtgcgggagaggcagctggccggggcgagcgcagctcttgatgccttgcctcatctagtgcctgcgccccagagcaggcagctcggaatgcagcctgtgtgcttacggtgtgaaagtgaagccaggcggcagccctgctaacagccagcttcctcctgagcctagcacccaggccccttgcttgggcaacacccctgacctacccaggccaagccctggagcccaaaggtgacccaggggctgcgggctgccccctcatccaaagagaaggcagcttctccacacagccaccgtcatgatgacaggcacatgagcaagagagagaccctgttcctagcggaaggcatcagagcgtacccagcacggtccctggactgacatttcacttcctcagaggtctcccggagcagcctagcttgtgctcccctgacggcaggtccagcccaaccctagagaagccacagacatctctccaggcccagggctttcgtgcggagaccacaacagagtggtccacagctggccctgcctagccccgttcgcaccctcggtggcctcgagccctgtggtgacttggtttggcccccaggccagctcacccggggccagagcagggacggggtttggaaccagcaccggtgggcctggggtgaggggaggggctgctgcttgagacccccactcctgctgcagcccagcctgaggcccgcacagagttcccaggtgacatggtctctccagctctgtgtggcttgtcctctaccaaggatcctcaagatggggccttagacacaagaaagaaatgagtgattccctggaagggctcgggagagccgcgtggctctgtctagttgggaccgtgctgggcagggcccgggtgcgtccctcctgtcaggcacagcgtaggcagggctggcatctgacgcagatgtccaaaagtgtccaccagacgctcctgggctcggtgtgttcagtcacccaccaaagcacttcccaccctgccctcccttaaagctgccccaggccagcctctctctggctcaccctgtttacagcgctctgtgcccacgtgtggagcgggcccaggggtctgtcacgctccagccggggcccctcagttccagggagcggcgggtatgtgccaggccctgcggctggctggggttgccaggctgaggtgactgtcgggaaggtcggacagcagaggaggctgatctcgtgtgatcacgggaatggctcagacgccgctggaggggggcaggctgcgaggagcccagccaccgcgctgaccctcctggccaggttgcggtgctgtcagaaccgtcctgacccctgccaccgccctccctgacccctgtcctctgccctccctgacccccacctccaccttccccgacccctgccctccgccctccctgacccctgcctctgccttcccacagacctgcgcctgcagctgctggacgtgaagagcaacccgtacctgatcaaggccctgtacggcctgctcatgctgctgccgcagagcagcgctttccagctgctatcgcaccggctgcagtgcgtgcccaaccctgagctgctgcagactgagtgagtgcccagctcggggacacagcctggcgtgtcggggcatgaaaggggtgacctgggccctccctgacctccacctcacacctcctctcactgcggacactgttcgcctctcggccgcttgcccgtaggcctcccgtttccacatcagagcccctggctgggagacctggcgctgttcacaaggtggtaggtagttgggttgagtttattaaaaagtttgaacgcgtgctggagtgacccaaacagaaagtgcagggggaggaattcgtctcccgtttcagagactgtgtcgcctggggcacgtggtgggagagccacagggggtccctcccaggctcagacagccctccccaacccgccgtgcagcagagagacagccctgggccacggtgtgccccgggtcgcctcggaccgtccctgtcgccgatgggtgtcggaaccaagggtgcaccacggccatcctgctctcgacctatccacaggcaggacagatcccaggctggctgcccggaagggccatgcacgccagcctccggggcatccagactcccaccctgaacccactgctggcccggcccccggagcctgttgggtcatgtctatatttggtaacccttggaggctttgcctcatccacaggcatttggcatccgagatggaaaatttcacttgtcaggtcgccatggaaacaagcagagccactgagaagatttacgccgaatggagcgcacccagcttgcaccagatgccctgtgcgtctagaattccctcccaggctgtgcaagcccctcggcaggctgggctcctcgctcccacaagaggactcaggcctttgccatgcggtggacacaggcagccttcagatggccctgtgccctctgtcctgcagggcctggggcaccaccccacacacctgacctggtctgtccaggggccagacgtgtggtccccaatgggttttctgcctgccccaggccactcgaggggccggagccccaggccaaggcgcagctcctgcgcaccatgccccgctccccggacagcggcggggagggccgggtgctgccccagctgctcaagacgccgctgggtgatcctcaggaggcggcactcggtgctcggggtgcccgggggcaggggcagccagaggattaggtgtgggttttattccctcggccagaatgcctctggctgctaggactcaaaaaagcccagggcctgtcctgtgtttcgttggcctggcctctgctggccgccagtgcctgataggtgttagggtcaccctggcagccacttaggagggaaggtgagaaggaggcaggaaaggctgcttgcctgtgccctctgggccgggccgcagcccctgtgctgatgaaggccggtgcctcctaagagctctgtccactacatctcctcgcatagggagcattctatgaaaaggaaggaaggctcagatcagttggagccctccccaagccagggtaaggcaggtctgcaggtggaagctgggaagaggaggctcgcccctggtctcccgtggtcagcggcagcacgcctggggcctctggctgataagtggctcgcaggcctggactggggtctggtctacgctctgctgagagtctgctgtgtgccctcaggccagccccatggcttctcggggctctcgatgtcttcatcagtaacacactggactaaatggatccatgggggtctgcccaaccttcatggccttgggttcccaggctctccttgcagggacccaagagctgccctggaagaaggcaggggagagcgggtgaggagggggcctcagggccagctgggggtggggggccgcttgccggcttaggcttagagatacctccgccctggagaggcagccctgcgcagggtggtggcaggaagacagcggcgggctgcccagcaggcccacgagcaggaaccagctggaggagcctctgctccttgcccctcgcaccccgctgtggactgagggctcagggaccctggccactggttcaggcttctgggccattttctcctctgtgaggcaagagggagcctccaaagcagaagctggtgacactcaccagccaggagccgggtgacagtgcatggtggcagaagagagggctggccttgggttctggaatcccagccctgcgctgctggccgggtgtcccccagccactcacggcttgagggtcgtaaacatacagggaacacgaagggctgagcagcggccacaccctggactggcagggggcgacagggggtgggggcaagcctcattgccagcctccatgtcggaggagcccccacagccccgacacagccctccctgcccccaagaccctgggcggggaagggcctgcccacagggggctgagtcacatgaggggcaggacttgctgccttcagggcgcgggagcaaggggaagcccagcccccccacccccgccggcctggccacatctgtgcacagcacccgggatttgccgccgtcactggcatctccctggcaacccctaatctcagcccctctgcgtctaatgcaaagagtgctggggggagaaacacagactgtgggtgccggcctcagacgacgcgcttcaccaccatctctggcctgcacgtctccccctcttccatctgcatgcgtggcgtggcatctgtccaccccctggggccagtgctcgtgtgtccctcagcctcctcagaagggggagctgctcccttgtgccagggacacccaggccccaggaacactatgccagggatgtcccttccgctttcccaggggagcccagaatgctgcccgcagactggcccctgagagcgaacccagcccagctccttgtgagctttgctgaaccagtggtgcccgaggcccaggtgaggtgtactaatagttcaccccagcagagagtcccacaaagactcttctccctcattttggcctcgctggaggcagatcatgtggtccgggaagaatctgcttctggactctgaagcctagaggccctggtgaagggctctcttgacaactgtgggctgatcagctaggcagagaccctttgggccactgggcccaggaaagaagcggccacagccacactccaaggtgtttacaggttgtgtatctttgtcaggaagggaacaggctgagtagggctatggggctgctccagttggcatcccaaccatgggaagagttccccctgcccctggtcctgggtgttttttcagaggtgccttccaggctctgaccatcagcgggctgcgccccaccaggagccaggttcatcagtgagggttccatttcgtgaagcacttgtgattcccccaagcggactgagctgctgagcctcaaagggacagggttgtagccgcagtggccacccattgggcacctaggctgggactggacaccagagcaagttcctcctgtcgtgtctggcattggagctgtgcggtgcacaacctgtgccacggcacagagcagctaggagggtgctaacaaggagttctcagaggcgtcagctgcccagtggcaagaccagctttcctcccccagggacacagagtgactgcgggcctctgagctccagagctaaaaacagatgtcctgccaagtggagagcctgtagacctcagccatccctgtggtccctggcctcagccctgcccctcctcccccttctccctggaccctgttccaagccccagctggcttctggctggctgctggccctggctttcaccccaaagggagccactcataaacaggaaatgcttcctggtgtgatgcctgctctgggcaccgttgccagcccacaggctgagggctttatccaagcagcagtgttgactggtctcgcccgctgtgggggagggggtgctccagagcgctcccctctttggggccaagagttggggatttgccagggctgaggtgggtacatgtcccaaggtcgggctccaccagcctgtggccggtgctctcccccacagcagccccacgtgcactcaggccctgacactgagcccttctgctcccttccacagagacggtctgaaggcagcacccaagtcgcagaaagcagactccccaagcatcgactacgcggagctgctgcagcacttcgagcgggtccagaaaaagcacctggaagtgaggcgccagcggagcgggcgtggggatcccctggaccggaggggggtcctctgacggcctggcgtagagacaggcccacggaacggtgccaaggcgtaatgggggtcttcaggcctcctccccgcagagcccaagggtctgcctggagggcaaggctgggcctggccaccagcgcggggcagggtggtgggctggaggcgctgaccaccgcgctaccctcagagcccagccccaggcccccagctgcactgggggtcagacagagctggcttcccaccagggtggggccacaacctcagacatccctgttttctggaatcgggttctttctaacgccctcttgtaaagagcttgatgccccaagcccaccagagctctgacctcgtgcagatgtgtgtacatacatgtatacccgtctgtgtgcacatagggaccagcacagatccgtatgaaggacgcacccctccccaataaagtgacagaaagctctccacccacgcctggcctgctccttcccacaggtgcccgccccgccgatgctcagcagccctggg

SEQ ID NO: 101 - DNA, 31003 bp, Hippotragus equinus
  source 1..31003: mol_type = genomic DNA
ttcgacaggaaaaccaatctcagactcagggatttgagacaccagccccaggccccaaacacttggccgctgccctaggcatgatgcacctccaagaaattcagcactgtttattaggggttggacttccacttttattttcatttttacctggttggtccctgcgttcttaagaactggccccatttatggctgaatagattatccatccccaccatccttcatatatttccagaggtctctaatggagatcctgggctcagaacattaaaaactgggatttcttttacacaggctgagtctcttccattcttctttaaaaaatttaagaacccaaaagagaaactgaaaggagaaaacagcctaatttaagaagctgaccccaaagtaaattctgcattcctgttgttatttctccatggaactgcactgccgttcccataacttcttcaaaggagtagtttattctgtagttcattgctaagtctacttggaacgccctagaaaggtttttccattagtgactctatccagctggctccgttgattagtttagtggtggcgatgacatattctgtacctccatcttccagctgggagagaaatcgcagggcagcaatttcagcaaaggttacacccccgaggaaaaagatcagagtgactcggttttctcctggttgacctaaaatttgaacatttcagaatgaagaatcattatttttaaaaattatgtatttatttttggctgtgctgcctgtgggatcatagtttcctgaccagggatcaaaccctcgcccccagcattgcaatgcacagagtcttaacccctggactgccagggaagaactatttattattgatgcttcttttcccacctcttaaaaaactgcatcattcctaagaacagtcttatgtcttggtccagacagttcacttgaaactcaggaaccatgattttgatttcaatgttttttccaacttaggagatcctcaactcagaggttgaaatctgctactcctaagggagtaatgagttcccgtgcttacaatgtaattcacaactaacaacagcagtaatactggactctgactccaaagtcctttacaaatgtatttttcaaagcaattgtgttaatacgtgaaaaccacagaaacagtgcatgagtatctgtagttacgggccccagacttacgtttcttttgcagtcctgtgggcaacggctgccgttcctcaaagtgggggcctgggaggatacgcagaacttcctcaatactccgccagccgggccgggaaagcagctgggccagtcgcacactgagtggggcgtaaccactgtatacgtacgatatgtccgtggggttctgttaaataattgaagagaaaaaagcttgtacagcaagagacagagaagtggagccacctaactgcggcttttggggtaatgcaaaattatttgatttggctttgaaggtagaaacacaaagccccaaaatagctggctccaatgctgaaatatctggcagcaatattgaaatatctttctctaatatcaaaatattcttctccagtctactcatgcttggctctgttcttagcagccgaggggtcactttcttctttgttgtaatttatttttaattggaggatgattactttacaatattgtgttcctgccacacatcaacacgaatcagccacgtgtgcatgtgtgcagtcgagtctgactctgcaaccccatggactggagcccaccaggctcctctgtccatggaattttccaggtaaaaatactggagtgcgttgccatttcctccgcccagggatcaaacccaagtctgctgcacctgcaggcgggttctttaccactggcaccacctggataggtgtacacgcatcccctccctcgtgagcccccctcccagcccatcccacccctctagtttgtcacagagcactggatttgagctccacgtgtcacacagcaaattcccgctgcctatgtatttaacatatggtaatgtacccgtttccatacttttccctccaaaggttcatttccgactcaaaccttcagaagccactcaaagcatctctaggtactgaagatggaaagctgttacttggtttggcaagaaacttcttggcaggtaaagtggagctctctagctgagaaacagaacccttggacccatcaattctactttcaggcatttatcccacagaggggataagaccagaggagaaaagaccaaagcataaacacgttaatgcaacactgtatgaagtagtgaacgactgcaaatgacttgaatttctaataaatcatgaaacaagatataactggaaaaccactatggagcaattaaaaagaagttaaaagaatgacggagggaggacttctctggtggtccagtggttaagaatccacctcccaatgcagtggatgcaggttcgatttcctagctggggaactaagatctcacacgatgcagggcaactaaacccacgtgccatggtaaaagatcccacatgcagcaactaagacctaatgcagtcagatacatatataaaagaatgaaggagggcacttccctggtgatccatggattaagactctgtacttccactgcaggaagcacaggctccatcccttctcagggcagtaataccctgagtgctgagagggtaagaggtagatgggtgaggtaggtacaggctggtcagggcagtgaagagccaaactaatacatgatttacacggtacaacacaggaattacggctgtcattccaatcccaaagaaaggcaatgccaaagaatgctcaaactaccgcacaactgcactcatctcacacactagtaaagtaatgctcaaaattctccaagccaagcttcagcaatacatgaaccgtgaacttccagatgttcaagctggttttagaaaaggcagagaaaccagggatcaaattgccaacatctgctggatcatggaaaaagcaagagagttccagaaaaacatctatttctgctttattgactatgccaaagcctctgactgtgtggatcacaagaaactgtggaaaattctgaaagagatgggaataccagaccacctgacctgcctcttgagaaacctgtatacaggtcaggaagcagcagttacaactggacatggaacaacagactgatttcaaataggaaaaggagtacgtcaaggctgtgtattgtcaccctgcttatttaacttatatgcagagtacatcatgagaaatgctgggctggaggaagcacaagcttgaatcaagattgctgggagaaatatcaataacttcagatatgcatatgactccacccttatggcagaaagtgaagaagaactaaagagcttcttgatgaaagtgaaagaggagagtgaaaaagctggcttaaagctcaacattcagaaaactaagatcatggcatctggtcccattacttcatgggaaatagatggagaaacagtggaaatagtgtccgactttatttttctgggctccaaaatcactgcagatggtgactgcagctatgaaattaaaagacgtttactccttggaaggaaagttatgaccaacctagatagcatattcaaaagcagagatattactttgccaacaaaggtccatctagtcaaggctatggtttttccagtagtcatgtatggatgtgagagttggactgtgaagaaagctgagcactgaagaattgatgcttttgaactgtggtgttggagaagactcttgagagtcccttggacagcaaggagatccaaccagcccatcctaaaggagatcggtcctgggtgttcattggagggactgatgttgaagctgaaactccaatactttggccacctgatacggagagctgactcatttgaaaagaccctgatgctgggaaagattgagggcaggaggagagggggacgacagaggatgagatggttggatggcatcaccgacacactggacttgggtttgggtggactctgggagttggtgatggacagggaggcctggagtgctgtggttcatggggtcgcaaagagttggacacgactgagcgactaacctgaatgaactgatattcccaccggggagaaacaatccaattttagtactgagagaagagattgttttagcttttgtgccaagaggcagcctaataaagccccttatgaaaaaacaaaaaacgaatataagaaaaatgaaatttagaaagatgggaataaataaaaaatataaagcaaagtgcaccctactttgaagagccaaggtatagaagatgcaccatttatgtaaaaatgtttgtctaggatcgcctggtgatccagtggctaagactctgtactcccaatgcagagggcccaggttcgatctctgttcagggaactagatcccacatgccacaattaaaagactcagagcggccaaatcaataaataaatattaaaaaaaaatttgtctatatacagaatctttctgggaagatgcgtaactaactggttatagtgatcaattctgagtggagacgggttggctgtgggaggaaccctgcttctcagcatctgctttccttttgtgctggatccttgcctgaccctccccaccttctacctggtgctctgtgcccaggaggcagccctgtgggctccacaccagctggaaaatggagacaggacaggactgtgcggtcacattttgttgccccgaatccctctgtgtaatgctgcccaaggctggttgagtcccttggcttgtcaccccacagctctgctctcctggttctggaacccctgcccttagacctcagatgggagggggtgagtggttctctactgcactgcctgtccctggtccaccccatctttataaaactccatcaaactactcagtacaagagcactgctttctgctaggatccacacattaaaaaaataaaaaattagaaaactgtctttagaaagcaaagcagatgaacagatcaagtagcgtatgtcatggcaatacaccagcaatgggaactcaattgagctgaagtacacatgcgggtgtctgactctgcaacgccgtggactgtagcccatcaggctcctttgggcatggcatttttcaggcaagaatactgcagtgagttggccatttcctcctccaggggatcctcgtgacccaggaatcgaacacgagtctcctattatcttctgcactggcaggcggtctctttaccactgagccacctgggaagctctcagtgaagttgaagaggagcatcttacttgctcatttacatcatccatccaaaggcgtaacgttttccggatagtggggtaattgtttctaccccccgtctgtggcttcagcagaccagccttctcgaggttgtgcaaggtcaggatgtgctcatagccgtaggtctgcaagagaaatcaaatcaggaaaacggtttctgtgactttcaaaaaggagcacttccaacaaatccactggtgagcactctggggcatgttaccaaaatccaggcgatgactgtccatgggtgcaggcagggcaggatggaagcctgtcctaaagctgcttgcccatgccaacaaatccagctcactggatcactcaaaggatttaaatttttcattttaaagttccgagaatttatgggcccaacttaagtgagcagcaaataaattatagtattctggacttccctggcagttcagtggttaagattccatgtttccactgctggaggtgggggtctaatccctggtcaggcaactgagatcccccatagcacggccaaaaaaaaaattatagtatattttcatatggaatataattagctgttaaaagcagaatgaggcagacctacacatcctgattaagtacaagtttctggatttattcttaaggacaaaaaatagaatatagtaagtcctctagatacaaaaaaattctgttctgagagcacgtttttaagtccagcaaagttagcctgagtacccaactaacacaattggagggcaagctgcagtttctcttaagcctcacattgatggaatgcacatgcacatctttgaaagtttgtaacttttgaaggtttgtgtgtaggggacttactgtacttcacataacaggattttatttctattaaaaaagatctaatgagtaataaaaggtgatgcttatatgatactttccatgttttaagtgctttatatatgttaactcaatcattcttactataacctcatgaggtagacactattatctccatttgacagagaactttaaataaattgcccaaggtcacacagctaatgagtaacagaggtgggactcagatccagttggtctcgccccatggtctgtgtatgtaaacattctttgtacacacacgcaaagaaggggatctggaagcacacaaaccaaactgctcacgtaagtcctctccagggaggcgaatgcagggagggggaggcgatggtggggggtcacagtttgtaccatatgtgtgtgtgtgtgtgtgtgttagatgctcagttgtgtccaactctttgcaactccatggactgtagcctgccaggctcctctgtccatgaaattctccaggcaataataatactggaatgggttgccattcccttccccaggggattttccagacccagggattgaactcgggtctcctgcattgcaggcagattctttactttctgagctacctgggaagcccttgcaccatatacttctgcttcatttgaatgttatgtgatgagaatgcacatgtaattttttaaaggcaaagcaaacaaaaaacccaaactaagtgagtatttagttttgacaataacgtacttaactgtaaatagtaacagcaaatacatatagcctgaaacatttttaaacagagaggagaattttaaaaacaatggtgggcttttccttactataaagtaacaggcctgatttaagtaagttggctaaggaatcgtcatcagaaagttcccttcctccgtggaactgtctggttaaagagcaggagcactagtccccggctgtctgggtttagtcctggctccggtacatactattcatgggattctctgggcaagaacacaaccaccgcagatatgcagatgataccactcttaaccagcagaaagtgaagaggaactgaagactctcttgaggagggtgaaagtggagagtggaagaactggcttaaaactaagtattaaaaaaactaagttcatggcatctggtcccattacttcatggcaaataggagaaagtggaagcagtgacagactttactttcttgggctccagaatctctgtggacagtgactacagctgcgaaatcaaaagatgcttgttccttggaagaaaagctacgacaaacctagacagcatattcagagacatcactttgccaacaaaggttcacacagtcaaagctatggtttttccagtatcatgtacggatgtgagagctgggtcataaaggcggagcaccaaagaattgatgcttttgaactgtggtgctgggaagactcttgagagtcccttggcctgcaagtagttcaagccactcaattttaaacgaaatcaacctgaatattcattggaaggactgatgccgaagcttaaggttcaataggaagctctggtcacctgatgcaaagagccaactcattggaaaagatcctcatgctgggaaagactgaaggcaaaaggagaaggggatgacagaggatgagatagttagatggcatcaccaactcaatggacatgaatttaagcaaactctaggagagagaggaggacagaggagcctggagtgctgcagtccatggcatctcaaagagacacaacttagggaacgaaaaataactggcacacactagctggtgaccttgggcaagttacagcactactctgttgccttagttttctcatccataaaatggggataagactatctcgatcatcacctttgtaaggattaaacaaatgaatacacataacactcttctaactaagcctggcatgtagtaaaacctcaataaacattaactaatgttattattatgcaaacacagcagacaaataccaaggacaatccctccaggtattaaaacatttaaaagataaaggaaacactacacccaaatagcagctttgggaagtatttttttagaaagacctttcacccctggcaaattagtcatttattttttttttattttttttttaattaaatttatttatttatttatttttaattattactttacaattctgtattggttttggcatagattgacatgaatccaccacaggtgtgcatgcattcccaaacatgaacccccctcccacccccctccccacaacatctctctgggtcatcaaaaatatactgacctgtagaatttctcttttgtaataatccagaactttctgtttgagtccactattgcacacagactggaggcaaactagccttaacaccttgatcaagggatgtttttgggcaatacaatcctcaatgtagctgttgacctgaaaacaaagtgtaaacgggtaccagaatctggtccggggactgacagaactggatatttactattatttttcaaagtcaaataaaggagatgagtgggagaagggctcgttctttttgcactttccctcagctccctccagagtagctccttcggcccctgctacacacacccccgccaccacgcagacacaccagcgatcagggaacacaggctggcgagggcagactcaagggacccagcagcctgtctggactcatctgtctccatggatggacaacctccagaggctgttgcatgtcctgggtgtgtgatcctggctaccccggcagcaatttatcagcataaagtaacaagaatctttctagaagatgggaattttcacaaattgaatcatttccaatttagtaatagaggtggatatgtaaaggaactatcagaccaatttgctgggacctccctggtggtccagtggctaagactcagcgatcccaatgcagggggcctgggagtgatccttagtcagggaaccggatcccacatgccacagcgaagtgatcccacatgccgtaactaagacccggtgcagccaaattaattaattaatttttaaaaaagatcaattcacttaggaagtaaatctattcatttagagatctttgattttaggggcagggcctcatctttctgtgcatggaagaaagtgctttcaatacaataatcttaactacttaagatctctattttcacattttgcacctgctcttcaaaatatttagataaggcacgtgaatcaaagcaattgcttttatagctgtaatcttagctttgataaggtatcaattatttgttagaacagtttcattttcacatactttatcagtgtctattccagacataaactcctgctccactgtcaatttatcaaagaagtcttcagaagctaaaatggaaataacaaatttgtaagtaagaaattcaattaatgttaatgcttttatacacagagcatgattaggaaacatggcatgcaaaaaagaaagcaaacaaaaaattcaaactgccacctgaaaagaatctaagaaacatggaaaactacaactctgacctcctaagttacatccaggaatagtcaaccactgtaccctttcgctattcttaggactctcatgaaatctcaagatccttaggactctaataagatcttaggaatttttcttcagtatcagtgaaagctaatttgccaagagccttttagttgcatcatcagatcgaacccagtttcacctcatttccacgtccatcaatatgaaaacaaaggactgattttctaacacttttatgtaagattcaaagtatactttataaaacagggcattgaacagtctctaactcagcttttacagcctgtgttttaacaagtaaattcatctttggtgtaatagacatttcccaagctctttcaaaatacttaacataagacttcaagggaaaaaccaaaactgaaacagaaactggattctgctctaagtaacccttagagacaagacaaaaaccagattgaaaaaattaactgcctcatgttaggggaagaatttttttctctttttgacatttcaaatattgtatcacatgattatattatcttattaatgaaagataactgagttaatcacaaagggaacatttttgactataaacatgggaacatttaattaacactgaggataacatatggtattaaaaaagagctaaccctcccaagggagcatggtggtgccaatggccgtggtgtgccagtcagctccaggtgagctccatcacttcccaaggatactcactagttacatctttgatcagctctgcaatcgaggtgtgatttgcaagggagcctcgcgctgcctgcatgtggggcagctgtgaaacaaactgcttgatctccccaaccgtcttggcgttgtgcctttcctgaaatgcataaaagagcagaagcgggaagtggggaagatattttaagcgctctcttctttgtattgcttagaggacattcaatttataccaatgcaaaagaaagaatggaatacaaataaatcaggccggacccatcttcaacatgacataaaaaacagaaaagacaggctcggtgttcctgttcactacattagtactttttaagggagcaaatgcctaaggtttttttccttcccaggcaccagataatactgtgattagtatttgggggacaatattaggttatccacaaacatttctgagtaaaaaattaaaatcaagacattatgttaagagcggaacatgagtgagtgaagtcgctcagtcgtgtccaactctctgcgaccccatggactgtagcctaccaggctcctctgtccacgggattttccaggcaatagtactggagtggattgccatttccttctccaatgaatgaactgaacaagtacagtaatgcagactagaggagaacaaaggtatatttcaggtccctgaaatgtgacagggacaatcagaaacagcattagaaagcagagctcatgctcaacattggcaggcagaaggaacagaacaaaaatagaagtgaagctatcacagaaaagccacctttctactgttaggtattgtgggagactgttaagtcacatattagcagtcataaatagcaaaaagtttcctctgtaacagaaaaaaaatccattcttactgctgaacctcaatcttgaatattgtccatggataaaaaggaccttactttgtgatgagaaattttttttgtttgcaaagtttagtaattgtaaagcaagtaactcagaaaattgaagaaaatcaattaacaaatactaatcctaagaaaaaccatacccttgactagacagacctttgttggcaaagtaatgtctctgcttttcaatatgccatctaggtgaagaaagctgagtgccgaagaattgatgcttttgaactgtggtgttggagaagactcctgagagtcccttggactgcaaagagatccaaccagtccattctaaaggagatcagccctgggtgttctttggaaggaatgatgctaaagctaaaactccagtactttggccacctcatgcaaagagttgactcactggaaaagactctgatgctgggagggattgggggcaggaggaaaaggggatgacagaggatgagatggctggatggcatcactgactcgattgacgtgagtgtgagtgaactccgggagttggtgatggacagggaggcctggcgtgctgcaattaatggggtcgcaaagagtcaagacatgactgagcgactgaactgaactgaactgaatcctaagaaagatgaacctagggacttcccaggtgtgtccagtgttttaagacttcaccttcccatgcagggggtgtgggtttgatccctggtcgaatcacgcatacctcatggccaaaaaaccagaacataaacaacagaagcaaaaactgtaataagttcaataaagattttttaaatggtccacatttaaaaaaaaaatcactaaaaaaaataaagatgaaacctggaaatacacactcagtgaaaaaaatcagtcttcaaagttctcctaatatatgtttccaaagactgaacatgcagagttcagcatcttactgaatttccgtttcaaaaatgagcttaaccaagaataaaccagtggctgggcaagagaaggcaggaaggtgataatgaagccatccatttaaaagctctgggctcctgagatttcactcttattatcacctcctgcatctgcagagttcccttgccattggcatgttggctaaacttggagcttttggcccaaattacaagttctatgatggaggatcttttatttagagtacagctggctccctcttaagagagatgggaaataattaaaaagaaggtaaaacaaatatttacggtgaaagcttgtaaactcaaaatactacccctttctctccctaaaagagaaaaacaccttttctcatgggtctgggaagaagtttaaaaagaaaaccttgggggggatttccttggtggtccagaggttagaactccttgctttcaatgcagtgggcaggggttccagccctggttggggaactaagatcctgcatgctacgaggtgcagaatgaatgaatgaataaaggtgcatatatttaaaaaaaaaaaaaaagaaagaaaaccttgggtcctccagtggctgagcccatggtttctcaggagagctgcagccccactcagtggctgcactttggcagtccttgcttgctaggaggggtgggcagtctagcctgtgacgtacagaagctggtaacaaccaaaccaccttacctcgaatgctgcggagatcacctttgctttcttgctaagcacagagcccacagcattgaagtttttatctctgatctcagcgtagagctcctctgcagaattcagctgaagcttctttgcttccgtgggaaggtccttaccaccgtcgccctgctttttaggggcgaatttctccggaggtaatttcacataacctgaacaacagcagaagggaacaaggccctgcgtgtgtttaatggaagaaccagtttagctcaggcactaaacagaattttccaactcagaagagggtggaagctggctttagaaaaaatggtgcatgagactgaggctctgatttttccacaatcacagtacagaatgcagtcactcttcaatattagtatcacggttccacctttctttggagtcacctatctaaatcactgcggcaacatttagttagttcctaaatttattcagggatgggttacgttttcacttaaaaaaattttacaaggatctctcccattatcttacggtgtttttcaaactgtaggtcatgtccctttagtggatcacgaaatcaagttggtgggttgtaatcagcattataaacaaacatacaaaacattaaataccatagtgcatcacatgaagtaggggaatggtttttattttaaataaaattttgcttcagtttcatacacacatatgtgtgtatgtagtaggtcatgatataatatgtattttgttgttgtccaaaatagtttgaaagctatcacctgaaagtcaatttcagctcactttctgtttttacaaagttttattggcacaaagccatgtccatttgttttctctcatttgcgactgctttcacattacaatgaagaatggagactccacagaggcactgtataacctaaaatatctgctatctggcttttacagaagctgtccactccgatccaggagaagctcccaaattactcggcacagcatccagttcctccactaagtagccttaatccacttctttcacctgtgttccctccaaaccaacttagtcaccatttccggaaataccccacatgctcttacgagttgccttagcacataaactggtttaactctaagaagcttggcaatatgaatcagtatgaatcaaggaccttataatattaatacttctgacccctaaatcctgcatcagagaatgcagaggaagaaatatagtatatcaaaaaaaattatgtacacagatgcctttataaccattaaaaaaaaaaaactgcccaacattaggggaagggttgtacaaaccatggtataatatatattatggattttaattaagctattaaaattatacatatgctgagaaaatgctcatcttcagttcagttcagtttagtcgctcagtcgtgtctgactctttgcgaccccatgaatcgcagcacgccaggcctccctgttcatcaccatctcccaattgcactcatctcacatgctagtaaagtaatgctcaaaattctccaagccaggcttcagcaatacgtgaaccgtgaactctctgatgttcaagctggttttagaaaaggcagaggaaccagagatcaaattgccaacatccgctggatcacgctcatcttataccaaatcaaaaaaagaggttcagggaatccctgtacctagtccagtggttaaatcagcgctttctctgtgaagacctgggttcaatccaggttcaatcaaaatctggtcaaggaactaagatatcccacaagccgcgtaggctcccacaacgcccccctccccccgccaaaaaaatttcagaataatttgtacaagctgattctactttttgttaactaaaaacaaactgtgcatgaaaaaaatgactatgaggaaatacaccaaaatattaacattggttgtcccaaagtttgggggcaggatttcagggatcatgggaaatgtgtgttttacttctgtattttttcaattttcccttaatcaatgtttgacttatattatgaaaaaaaaaaaaaccttgctgccaagaaactgaatttacacacattccttctcttcttggagaatcccttcctacctctcacctatcttacaaagcctcccctcactccccaggccacctccctgccctaaaccctagctccttctaacggtatcttaggtgttttgctctctgcaaccatgagaggaggggctccctcatttctctggttcctacctactatctagcatagaactcctctgtccatgaaatggagtttttagaagtattcaagatgccatctttcggtgactttcctgggtggtcccgtggttaggaatctgccttccaatgcagggatcttgggtttgatccctggtcagggaactgggatcccacatgctgcagggcaactaaccccatgtactgcaactactgagcccctgcaccacaaaaaagactcaacacaaccgaaaaaaaaaaaagccaaattttggaacaaataatttaaaaataagactttttacagccttattaaagactctgctttgtggaaacccctcttcacggctgtgtcttcatcttctcccttagccacccatctatccaattgctatccatgcattcttatggtagaacacacctaacataaaacttaccattttaaccattttacaaaagcctttattacaaacacaactttctataaccacagctggtctctagttctagaaccttttttatcccaaaagaaaaccctgggacttccctggcagtccaatggttaagactccatgcttccacttcaggggctgtgggttcaattcctacttgctgaactaagataccgcatgccttgtggtgcaaccaaaaaattaaaaaacaaaaaacccaaaggaaatcccgtacccaacaggagttgactccccacgcttttcctgagctctggccaccaccagctggctttctgcctgcatgctttcctccagggctcttccttggctccctgtgatataattcaggatgccaaaagagactgcagctcatgtaaatgagggaaggaggcctggatgggacaggagcggtggagtctgcggtagtctggagagaagggcctgtctaaagaagggatctgcactgggcaccagctgccacacaggaatgtggtcgtggggctgccagagcctcagaggtttttaaagacatggaatacatcaagatcattattagagtcttctccaattttaaacagtgacagaaacagacacaaatcatgcagtcaaaagcaaataaaacatacttgtgatctctgaccccaactgcctgttaagcctaactctcacaggccttcaagtctaccatcaagtgtctccaacctcctgttctcacctttctcccagaatgtaccccgctgtgccctctgcatcagcaagctttttgccccactgttccccgcaggtattatgctgcctgcctctcaccagcaacgccccctaaattctacccatctttccaaacccagtacaaaagccacctcatccacaagctttcctgaatgactgcccaccttggaatctatgttctccaactgcagggccacctgcatttagccctgggcctctgctcacagggggcacacacagtcccatgcagtaaacactcgccagcttatgtgtgacctacaaggacagttcactcagatgtcactgaatcccagtgtctgcaggtctaaagtcagcattttaatttttccaaatactgagttatttagaaaggaagcatcttaaaaaaaaaaatggtcttttgagttactattttggcatattttttcttctctgtccactataataaatactgcttagaatatgggtttttctttgaaaaaaaaaattaactggtcttttggatattcctatcagattacctattggtaaaagggagagttactttactcactgttctgaatgccataaatttcatcaatgagtccttcgtacgtaagctgagtggcaagaggcgataataaatccacgttccgatcaagcaacaagagattatcaaacacggggaatattgaattctggcttcctgtaaactctctcttcatcctgatcatcatattggccacttgctggaaacaaaacatgggatcaggtgggactttcctgggcataagcagatttaaaaatctggctaagactaaaaaaaaaaaaattggctagaacttccctagtgatccagtagttaagactctgcgcttccaatgcaaggggcccagatttgatccctggtcaaggaactaatatcccatgtgccacatggcacagccaaaaaaaaataataatcagctaaaaatggaaagtatcaaaaaagtaaaaaacggagaaaaacggtggcggaatgagatggacaagaaataaacagcgacagaaaaccactccatgttggatgcccgttccaacacttacactgttaccagcgatttctcaacgaggcataagatcagtccatttctattattcatggaagttctattctataaagccaccgtgaatgcaacagtttcatcatctgatcaatatataaccttgatttatgtgtgttctatttaaagacattaaatatatgctcttgattctccaacactatcatttatacctaaatgaagctcatctaataagagttttctccgtaaaggcccatcatagccttcctacatcatgaaaactggatagcacttctgcaccaccccgggggccgttttaacagtgaaatcaccaaccgaaaaaaaaaaaaaaagcacaaaaatgcacacccacacaaaaaagtggcaatgagtactgcactatagtggcaaaaatcacacttgtttatggtatgagttgaaggcagagggttgcttgctgtgatctcagctaagaacatgcacaacttcaattattggatgatacaaattactgcctccctgagtgtatctgcaaaacactgtaccaatttgggagctacaaagaaattttagcaagtatgtgaattttcaaatcaaaacagattcccactcctccccctcccagggaccagggtgcccttgctccaccaccagaagcatctcccatttctcacccgggcgcactctcctttcccaaagatctgggggatagttccgtacagagcttgcagggtcatcagccccttggctgcgtggtacaggctggtctggtcactttccagatagcactcctgtagagaggaagggccagttaccatcacggtcacctgggtgccttgtggtgcctgcctctgtctggtgttgggacttggcacctccccactttgccaggaagctgcagactggggtccagtttacaaagctgctgtttggcagcccaggtcaggagcccaagagctctaccatcaggggacagctacggaagcaattctcccaaggcagagccttctggaaggcactcctcctcgtttaccagctcttgaataagctactgattagaaaagattttatgggcttcccatatggctccgtggtaaagaatctgcctgtcaagcaggatcgggaagatcccctggaggaggaaatggcaacccactccagtattcttgcctggagaatcccatggacaaggagcctggtgggctacagtccaaggggtaacaaagagttggacaggacttattgactagaccactactaccaagaaagactgagatgggaaccagtttttatttctatgttttatttgcaattggagaatagttgctttacaatgttgtgttggtttctgccatacaacaacgtgagtcagccataaggatactatgtcccctccctcttgaatctcccccccatttcacctctctcattcacagaggcgagtgcagaggctaggagggcactgagggaggccacatggcgataccacaagtgcacgtattctctgagccccagaatcccaggacatatgctcacaacggaatacgtggcagtctttacaaacatgacacagattttcacacacactgacggcaactgaaggttgtaacatcttgagaaatgaaaaaggggcagctgaacaatctttagagtgatccaattttcagaaaatatattttaccttatgaagtatacagggtatattttgtaaagtaggcaaaattatacttttggcatagaaaaagggacacaaaaatacacatcaaaccagctggggcgaggtgggagggaggttcaagagggaggggacatacatatccttatggctgatggctgattcacgttgttgtatggcagaaaccaacacaacattgtaaagcaattattctccaattggaaataaaacatagaaataaaaagaaacataatacacaaaagtgacaactcaagagaagaaaatctaaaagtcaataaattatgaaaattataataaaaatgaaaaaaccacattgctaattggctatattccaatacaaaataaaaagttaaaaataaaaaaaaacagctaggaagtgaccggagagactccagcagttttgacactggtaggagcacaggttcctgactctggttgtcttgttctaaacctcagctgtgtcacttcccagctggtgccttggggcaattagataatctctctatgcaatctcaaaaaggacagaatgatctctgttcgtctccaaggcaaaccattcaatatcacagtaatccaagactctgccccaaccagtaatgctgaagaagctgaagttgaacggttctatgaagacctacaagaccttttagaactaacacccaaaaaagatgtccttttcattataggggacaggaatgcaaaaggaggaagtcaagaaacacctggggtaacaggcaaatttggccttggaatacggaatgaagcagggcaaagactaatagagttttgccaagagaatgcactggtcatagcaaacaccctcttccaacaacacaagagaagactctacacatggacatcaccagatggtcaacaccgaaatcagattgattatattctttgcagccaaagatgaagaagctctatacagtcagcaaaaacaaggccaggagctgactgtggctcagatcatgaactccttattgccaaattcagacttaaattgaagaaagtagggaaaaccactagaccattcaggtatgacctaaatcaaatcccttatacaatggaagtgagaaacagatttaaggggtagatctgatagatagagtgcctgatgaactatggaatgaggtttgtgacactctacaggagacaaggatcaagaccatccccatggaaaagaaatgaaaaaaagcaaaatggctgcctggggaggccttacaaatagctgtgaaaagaagagaagtgaaaagcaaaggagaaaaggaaagatataagcatctgaatgcaaagttccaaagaatagtaaggagagagaagaaagcctttctcagcgatcaatgcaaagaaatagaggaaaacaacagaatgggaaagactagagatctcttcaagaaaattagagataccaagggaacatttcatgcaaagatgggctcgataaaggacagaaatggtatggacctaacagaagcagaagatattaagaagaggtggtgagaatacacagaagaactgtacaaaaaagatcttcatgacccagataatcacgatggtgtaatcactcacctagagccagacatcctggaatgtgaagtcaagtgggccttagaaagcatcactatgaacaaagctagtggaggtgatggaattccagttgagctgtttcaaatcctgaaagatgatgctatgaaagtgctgcactcaatatgccagcaaatttggaaaactcagcagtagccacaggactgggcaaggtcagttttcactccaatcccaaagaaaggcaatgccaaagaatgctcaaactaccacacaattgtactcatctcacacgctagtaaaataatgctaaaaattctccaagccaggcttcagcaatatgtgaaccatgacttccagatgttcaagctggttttagaaaaggcagagaaacgagagatcaaattgccaacatgtgctggattatcgaaaaggcaagagaattccagaaaaacatctatttctgctttattgactatgccaaagcctttgactgtgtggatcacaataaactgtggaaaattctgaaagacatgggaataccagaccacctgacctgcctcttgagaaacctatatgcaggtcaggaagcaacggttagaactggacatggaccaacagactgttccatataggaaaaggaggacgtcaaggctgtatattgtcacccagcttatttaacttatatgcagtggttaaataaacaggaaatctctcctctgggcaggttttgtcatgatgggacaagttttcctcagctgctaccaagtcacattaattacacagatgtgaattaattacaccagggaacaccattataggtacacgatttaaagttaatacagcaaaatgttaattacagaatctaggtgatgagtataaaggtattcactgtaccattctttcaactttcaagtatgtttcatataaaacattaggtcgggggcagagtcgggggcaggtggaaaaatctgtactaccattggaagaggtttactgtaagcaaaacaacggggaaagtgactttaaaaaaaagagccaagaaactcttttggttataaaattcatcagggttgccagagagttcttccccgggttaactctttgaagatggtgatcacagtaacaacataatacagaagaaaaagtttcaaataattttgggcacaacaccagtgcttctcaaaagttctagtctccagactagcaggatcactgtcacatatgcaaaattcaaagaaggaaacacagataaacatgattacattaagaaaacacacatagggtggggagtaactagaagtggcaaaagcaggcattctggaatactggtagcagttttgttgttttttttaagcagagtcccaggtgtgttcactttgttaaaatccatcaaactttatactcatgatttgtgcactcatctgagtacagagtatacttaaaaagaaagaaagtacacatagaaaaaccatcataaactaagtcaagagacaactagagtagcccctgcttgctgcaactagccccctagcgcagcaacaaagaccattgcagccaaaaatataaatcaaccaataaaaattgtttttaaagtgccatgtttacttgaatataagacatggtaccataaaactcctagaagagaatacaggcaaaacattctgacataaatcataccagtgttttcttaggtcagtctcccaaggcaatagaagtaaaagcaaagataaacaaattggacctaatcaaatttataagcttttgcaaagcaagggaaactataaacaaaatgaagacaatgtacgaactgggagaaattattttcaaacaaagcgatggacaagggcttaatttccaaaacatacaaacagctcatacaacttaataacaaaaaaataaacaacccaattaaaaaaaataagcatatggtataaatggacatttctacaaaaaagatatacagatggccagtaggtacatgaaaagatgctcaatgtcactaattattagaaaaatgcaaatcaaaactacagtggggtaccaccgtacaccagtgagaatggccatcattaaaaagtctacaaataataaatgctggagggggtatggagcaaaggaaaaagggaaccctcccacaatactggtgggaatataaattggtgcagccactatggaaaacagtatgaacattccttaaaaaatgagaattgctatgtgaaatagcaatcccactcccggatatatatctggaaaaacaaaaacactaatttgaaaagatactgtatgtaccccaacattcatgagagtactaattagacagggaagcgaccaagtactcattaacagatgaatggatgaagatatgggtgtgtgtgtgtgtgtgtgtatatatatatatatatatatatatataaaataaatgtatgtgtctgtatacacatacacacacaatggaatattgggcttcccagggggcactagtggtaaagaacccacctgccaacgcaggagacatgggttcaatccctgggttgggaagatcccctgaaggagggcatggcaatctggagaatcccatggacagaggagcctggaaagctacagtccaaagggtcacacagagttggatgtaactgaagcaacttagcaagtatacaatggaatattactcatccatgaaaaaaagaatgaaatcgtgccatttgtagcaatgtggatggacctcgagactattatgcttagcgaaggaagacagaaaaagacaaacactatgcgataccactcatatgtgaaatctaaaaagataagaccatgaatgtaaacacaaaacagaagcagacttacagacatagaaaaccaaccagcggtggcagagctccctcacctgccggcctgcatctcctacaagtgtaccatatgaataactgcttcttgcctatccctttgcctctcactgaattccttctgtgctgagacacaaagaacctgagccttagtaagtccagacaccagctactgacagccccaccaggtggcagaagttaactgtatgctgctattaagcaggcagactccagaccccttggaatcagaaggttgatgatgctgacctccacttacctcaccactgaccaatcagaagagtgtcgacaagctgatcacgccctctttgggccattgctataaaagtcctcactactccctccaggaggggacacacagttttgagggcattagcccactgtggccccctttgcctggcaaagcaataaagctatccttttctacttcaccgccccccatccaaaaaaaagacaagaccagtggggcatggaagaggggagggacaaattaggggtatgggactaacagataccaactagtacaaaaaaaaataagctacaaggatatactgtacagcacatgaaactatacctaatacaataacccataatagaatataatctgcaaaaatactgaatcattctgctgtacatatgagatgaaaatgaccatcaagctcacacatttggcaaaaatcacagcctgacattaaaacagaaaatgccaaacttactttgaatgcgctctccgattccatggataggagatctccatcaaaaggaataagatctaggctatactcctccctatgaataaaagatcccaaaacacccagatccttcaaccgctgttcgcacaataagctacgtcgtggcacaaacaaaatgtggaaatctcttgctgggccacgtctgtcttcactgcaaaagaaggaacatttgttagcttatgagctccctagagtcttcaactatttcacttactctatctccactgctgtgcacacagaaagcactaaataaatgctggtgagataaacatatgacattgactttcagacccaaacagttacagtcactttcttgctcttttttttttttttccctgacaggaaaccagcattgattcatagccaatatgtgcattttctagctttctctttaactattttcaggggcattaaagctctgaggtttactgaaatggtgtatgtgtcttattgaaaacaaatggatctttaaccaaaccaatgcagccacagagactccttttaaaattaaagctcactattgactcttctttctcctctccttgacagtgaacttctcaaaatagcccatatggcttttaagattttaggggccacatcaatcgattatatcagagtgcagatggagctgggagaacttcctctctagactggatgctatattaaattttaatcagctcttactttgcttatgaaattcaagtaccttgtcatcagtataaccattagagggaggcttttttgttgttgttcatttttaaaaccaggtcctttccttgatacatatccaaaattttagctgtcctaaaagaatgcagttttataataactgccctctcagactgtttgaacaatgtcacaagtttcctatttccattcttgtatttttccatgtttgtcctagtttttctaaaagaccactttttgggacgtctctggtggtccagggtctaagactctgctctcccaatgcagggggcttgggtttgatctctggtcaggaatctagatcccaacaaagggtttgcatgggtttctctgatggcccagtggttaaggaactgctcggcaatgcaggaaacactggttcagttcctggtctgggagatcccaggtgccatggagcaaccaagcccatgcaccacagctagagcctgcgctctggagcccatgagcggcaacacctgaggcccacatgccctgagtccatactccacaacaagagcagccactgcaaagagaagcccgcacatcacaactagagagtagaactcactctctgaaactagaaaaagcccatgtgcagcaacaaagacccaacacagccaataaataaatactaaaaaaaacaaggaaaagagttttcatgttgcaactgaagaccccacatgccacaacgaagatcgaaggtcccgagtgctgcaactaagacacagcatggcaagataaataaatattgaaaacaaacaagaagcaaaagaccactatccaaggcactggcaagagaaggggtttacaatgaaaagctcaggacattaaaactgttagaaggattaactcctactggcacaaacataagttctgagatacctgagcacgttttcagcaatgatatccatcaattctagcctgggtctgacaaaaaaaattatattcttgacatcggctgctggcaaacgacttcctttaagcgtaaacattttttccacttcatgttcctaagaaaacacatacacaaaaagttaacaaaatcactcaacgttaagtatcatagtcagactcggacatcagaaacactcgcagtcaatgcacatcaatgctttgttctcaaaatttagatttcccaaagccagctgtattaacagtaaggtttcagggtgaagtcactgtgacagtctttgagtgtaaatgactcttaacgtgataaactatcaaagataccaggtaacagtcatataatgctggacttctgtggtggctcagcggtagagagtacgcctcccactgcaggagatgtaggtttgatccctgggtcagaaagatcccctgaagaaggaaatggcaacccattccagtattctggccagggaaatcctatggacagaggagcctggtaggctactgtgatctaaagggtcacagaaaagtcagacatgacttagcgactagacaacaacaacgagagcaattaggatcaatacagaatcattaaccaaaggatcactgtatacaaaatgttagccatacattagcatctgtgttataaagacccaaccaccctgcaagccatttactcaggaggaaatgtaaaatcttactattattgccgaagtacagagttactaatacctgaacaaaacctgaacagttcacttaccttcaacagtgaatactgtgcaatcaggccaaagggtccagtgagatactcatcccaaactattgcctacaagagggaagaaatgaacattacagttaatatcaagaatttcaacaatagcaacagaaaatggcagtcatacatagtagaactactgccctcaaagtctgaaactggctgtggtcacatttatactgtgtggatcttaaggaaaaaaaaaaaaaaaaaacagcgtcagggcaagtaatgttactggcagtcataggaaacttaagatttaatcactgtccttcaaagccaagtgggcattaggaagcatcacaaggaacaaaactagtggacatgatggaattcctgctgagctatttcaaatcctaaaagaggatgctgttaaagtgttgcactcaatatgccagcaaatatggaaaactcagcagtggccacagggctgggaaaggtcagttttcatttcaatcccaaagaaaggcaatgccaaagaatgttaaaactattgcacgattgtactcatttgacatgctagcaaagtaatgctcaaaattctccaagggaggcttcaacaatacgtgaaccaagaacttccaggcgttcaagctggatttagaaaaggcagaggaaacagagatcacattgccaacttctgctggatcataaaaaaagtgagaattccagaaaaacatctacttctgctttattgaccatgctaaagcctttgtgtgaatcataataaactggaaaattcttaaagagatgggaataccagaccacctgacctgcctcctgagaaagctgtgtacaggtcaagaagcaacagttagaaccagacatagaagaatagacttgttcaaaattgggaaaggagtacatcaaggtggtatattgtcaccctgcttatttaacttatatgcagagtacatcatgagaaatgccagactggatgtagcacaaggtggaatcaagattgctgggagaaatatcaataacctcagatacgcagatgacaccacccttatggcagaaagtaaagaggaactaaagggcctcttgatgaaggtgaaagagaatgaaaaagctggcttaaaactcaacattcaaaagacaaagatcatggcatctagttccaccacttcatggataatacatggggaaataatgaaaacagtgacagactttattttcttaggctccaaaatcactgcagccaagaaattaaaagacacttgctccttggaagaacagctatgatcaaaccagacagcgtattaaaaagcagagacactactttgtcgacaaagctcagtctagtcaaagctatggtttttccagtagtcatgtacagatgcaagagttgggctagaaggctgatcactgaagaactgagacttttgaactgtggtgctgaagaagactcttaagagtcccttggattgcaaggagatcaaaccagtcagtcctaaaggaaataaacactgaacattcattcgaaggactgatgctgaagatgaagctccaagactttggccatctgatgtgaagagctgaaaagaccctgatgctgggaaagattgaaggcaggaggaaaaggggacgacagaaaacgagatggttgaatggcaacactgactcaatggacatgagtttgagcaagccccagaagatggtgaaggacagggaagcctggagtgctgaagtccatggggttgcaaagagttggacatgactgagcgactgaacaattagaggaaacaaggaactgtagtttgttgtgtatctgtgtcacggtattattatcagactgaaccatatggaaactgccaaatgcaacagttcaacctactattttataagtagcatgcaattcaattataaaaactaaaacctctgatataggtattataaggtttattttgacaagagaaaaattttaaaggctcagaaagtttaaataacatgtccaggacttcctggcggcacagtgggtggaagtccacttgccatgcacaggacatgggtttgatctctggtctgggaagattctataagcctcagaacagctaagcccatgagccacaaccactgagctcaagtactgcaactgctgaagtctgcatgctcaagggcccttgaaccacaactaatgagcccccgtgctgaaactactgaagctcacgtgccttagagccagcaagccacaactactgagcctgcatgctgcaactaatgaagcctgtgcaccgagagcctgtgctccacaagacgacaagccagggcagtaagaagcccgtacaccaaaactagagactagcccccaaactctgcaactagagaaagctcccaggcaacagcgaagacccaatgcaaacaaaaataaaaataaataattaattaattaaattttttaaaagtccaaggccatatcaggaccttgaatatacacagcataaagaagtcaagtttccagcctgggactgaacaacctcacagagcattgctctgggaccctctgagcatttctactgctaaactccagtgtcagttctttttctttcttttttaaattgaaatttttattgagacatctgtagaattacaaatattcagttgaaagaaacaatacagggagactccccaatatgctttgtccagtttcccccaatgcaaacattttgcaaaactatagtacaacagatattacaaccagggtattgacactgatacaatccatgatctcattcagatttcagagttatttaatgagctggaactgggcgcctaggacttagcctgcttttgttttctctccatagctgctagcactcactccacctcttggggtcctattttttctaatactgactgctgaatttccccaattttcctcttctcttcagagttatattgccagttacttaggaagactgataaatcctaaagggaaaggaaggaggtgaagtgaagtgagtgaagcgatcagtcgtgtccgactctttgcgacccggtggactgtagcccaccaggctcctccgtccatgggattctccaggcaagaatactggagtgggttgccatttccttctccaggggatcttcccgacccagggatcgaacccgggcctcccgcattgcgggcagacgctttaacctctgagccaccagggaagccataccacttaaaagaagtcctatgaagttcttgatctacggtttctgattccattgtgagctgggtgctaataaacatctaacaagaaaatactatttaagtaagctgacgttaaaaatctcagatagttacaacttctcacaattcaagtgagcagcagattgcaaggtgttggtagttcatgtgaatttttttgaggatatgatctttgtaatgaatggacactggtgcagctacgttcctgggcggggccgcctccccagttccagtatctcgggtgggaactggacagggggttaccggatccgcctctctggaccggagcggcacctgacacaagctggttctcgaagggctgagacaacacggtggcttattctgcagccacggaacaacagcgatgccacgcgtactttgcgatggaagccccaccaaaaggcccctctccccgacttatcgttcccgccggctctcctccctggaagccctaggagacctagtacacttcgagcccaggcagttagggaccggatgaggccaggccggacggcggtgtcgccgcccgctgtccctcaccttgcttcccgcgcacttgtccaggaactcgcgcagctcgcgacgcactgcctcgcgcagcacattgaggttcactcgcccgtaggacaggtgtgccgccatcttgccccaccgccccctttacccactactccaaccagatctgcattcccctacgtgtggcccaccgacgctgtcacgtgacgacaggttcacgtgaccagggccgctgacagcacgccaaacccggaaaactgtaatgggaggccatcagtcagtctccctcccggtcctagtgcccgcctctttcgtcgaccgcgtaggtcccgaggcatcccaagaccccatccagactcctccgcagtccggggcagctgcgctgggtgctagttgagtttaaggacagagattagatcctgcacgtccagtttaaaaattgaggctttcttcttagcagcaagtatactctctgtaaaatgataatgaagctatatttgaatggaaatcttttcagtcagatcagtcgctctgctgctgctgctgttaagtcgcttcagttgtgtccgactctgtgcgactccacagacggcagcccaccaggctcccccgtccctgggattctc

SEQ ID NO: 102 - DNA, 8633 bp, Hippotragus equinus
  source 1..8633: mol_type = genomic DNA
tttacaaagtactggcgtgtgggtggggctctgggtctaactgctcacaggaaggacggcccccgggacccaggtgttcctacagtactcagaagggctgggaagaaggaggggggcgctaggaggactcagaacggctagggaaggagggagaaggcctcggagggataaggacagcgggagaagggtaagggctcgtagtgagacagcgaggtggcctacgagatccccgacagcccttcacccgcacgcgcaggaccctgcaccaccccctcgttcgtgtttccggctgctgctttctgcatccgggacacgaaaagactccgttaggcctcgggcggcagcccctgaccggaaccggaagtggaccccgagccaggagaaggaagccggtggccgacccgtcagcagccggcggcggcctcgaggggcggcgctgcgctgctccctgcgaaccggtgccgcggccaggcgggtggccggcccaagggcccggcgccatgaagctgtacagcctaagcgtcctgtataaaggcgagtccaagacggtgctgctcaaggccgcatacgatgtgtcctccttcagcttttttcagagatccaggtgagcgggccctggagggcggcgcccggacggggaggcccggggtccgggttggagaccgcccgggaatcgaggcctggggcttggcctcctgcattggagccggtggtcttttcctcggcctgtagctcattctggaatatagtccgtaatcagggtttttcaaattttctatcttataaaaatgtccgggggcttttgaaaaagtgcagattcccctaggctcacgcccagctgagttccagcaatctgtattttaaaccagccactcagtggttctgacccaggaagctcacatgcttaagcgccacgtttgtattatctggctgggctttccaacagttcggtgtgagagttcctggtacactctgtcatattatggaggaagtcactgaggccccaggagatggataccaaaccagccaggactccaacccaaattgtatgctctttactgttgggctctagtggtacaaaagggttctacagtgaagatttagaaggaagcatggaggttttagggcttacaagcctttgaacatttgcgaggcacttgaatgccatcaagtgtgtgttagaagtaccacagacacttaacagcctgttcgtgggaggggtggtggtgactcaggcacaaaaggagaaagaccctacaaagtctgtgtctgtaatcacccagtctccaggtctggtggcatctggattctgttttgactacttcattgggctgttttcttcttgatgagagtggcttgctggtgggatctcaaacaattcctcttgttattttgttgaaatcttctgcttctttttgggtccttcttggtacttaccattctctgtcatgacctctagtctctattctgtgttgctgcttttctgtgatggaactttggatgctaacttggttaactcttgattcttttcctttctctttcccctacccacacgtactgacgatcctcagagatttcactttaggactttaatctcactggttttcggtatccagaccagtttcagatgattaacacaactgcagtactgtagggaaatctctacgaatgtctcttaaaacaacacataatccagttgagcccattgtttttctcataagtcctcctgtcttctgtcctgcccacctcatgattaccagaatgcgaacctcagaccttcaaaacattttccggcttttctggctcttgtatgtagaatgtcacaatgaatgcagttcttcctttgtctaattatatttctactcttaagctctgtctctttttagttttattgcaaggacttccttattttcagactttcctgtaagggatttttctggtcctattcactctctcaggataataataacaagtaatactatgcgccagacatcatgctaagtgctcatttagtcatcacagcatgtctcaatatatagacaaagcgcggtgcagtaagtcccttaccagaggtcacacatctcgtaagtggtggagctgggatcccagccagggaagtccactccagacgtggtgagtcctcactctgctgcgtggctcttggtgtgatctcaggagtgtatgaatctgctggaaccaactgtggattccacaagtcaggaccctgcgctgatggccctttatatgacatttccagtcagaggcttcttattaactctggatcctccagctggactgttgtcacctgtgactcttccattctggccacatctttttcttgggcccatgaacctcctcctctccctcagccatggtacaaaccattttccatttccttgtcttggctaagcccttgccctcaattccatccagagtgtcctgggtccgtaccacggattagccccagacgacctgaggctagagccagcattcactgaggatgcctgtcgcattgcacggtccagcatgtggcagctgccataactgactgtgtatctgctgaacagtttttgccacttagatgtctccatcacagattttgtttcttcccgcttcttgggagttattggagccttgagtagaggagctggcctctgcttctctgctgtgtcccaaatcataccctgaccaaaacgttgaattaactataacctatagaagattccccagaagtctggaagtgggttgtttgggtctgctcggtagcaagcaaatgtggtttgaatggttgagaggatgtgtaattatctgtattcatgatcatcgacagagtgtttattactttttcctaaggttgggagagaaggagtgaaaccaggaagcaatgtctccttagtgtataagctcaggggtcactttgcattgtgctggggacaaggtgacaggaacaggtaatatgtgttgtgtttcttagcgttcaggagttcatgaccttcacaagtcagctgattgtggagcgctcagcaaaaggcagccgagcttctgtgaaagaacaaggtaagaggacccatcaccttgtaagcacgtgctggcccggccaccccacctcaggtggcctagagctctgtccacgggagggctgccttgtgatggagagggctcccaggaccacgatcctctgctggcttctctcttccctcctcctccgtttcctgttatgcagaattctgtgcccactgttggtatgtcggttgcttggttaaatcacccccaaaagcttagacttgcttacaattagggtctgcctctcttggagcagtaagcagccttcctgctttgtccttttttgcctttggatttgtaaacgtctcagaaaaggacctccacccagccctgttgaggaaatactgtattctgtgctgcttagtgcttttgcccagtaacctggagaccccttattttccctcatgaccttagttttttcttcttcatgattcaggtttcctgtaagaatttttaggcatttattttaggggcatttggttagctatatcatctctgaatcctttccaaatgacaaaaaatcatttcaaggattgtgactgttttgtagaagccctgtacaggctgtaccttttgataattcgatgacttcagcatagtcatacttgagaccccagccagcagtggctcatttttttctggatgggctttatctcttcctcctcctcctgccctgtccccactgaggctcaccacagcgtggagcaggctaggttactgtagtgaggaaacctggggccctgacaggtgatttcctcaagccagaaaatcttttaccgagttttgttgtgtatatatgaaaatggaagccacttagcttgtccagagttccatcagcttgggagcagagcagagcacctctgagggctgcagcttccaagacacgggggagcctgacctcaagctcagggtgggactcagacgagcccttggggctgtttcctgggatgtttctgcgccactactgatccttcgaccctggcttcgcgcactgggccttgggactttcattcaccctgaagcaggtgttgtccacactacccgcagagcccccacacatgctgccgtatgtgcagggtttcaccataaacctggctcagagccgcattgctgacccagaagacagaagcccagcactgtatcagtccagcggctttggcgggtgagaaagtctaaagccctcttgccatcctcttgtctccttagaatatctgtgccatgtctacgtgagaaatgacagtcttgcgggagtggtcattgctgacagtgaatacccatcccgggtggcttttaccttgctagagaaggtgagtttgcagcttggctggactgtacttgggcagacaggcatggactggggccaggagtgacgtaagggatgaaatagtgtgtccaaaatcagcctgctttcagcctcctcactctaaaccaagagacagtctgggagccttctcattcctgtctgtctcatcctgccctaccccttccccactgatttctgcttctcatcctgctagtgtccctggggccaccttggctctccttgtcagccagagtcccagcatctccccttcccggtggggccctcgggtcagccctagctgtgctttcgcgtcctcttgccagttctgctcctgcttccgccctgaaagtcgtgactttcagttccttatgagccacactaggctgcatgttctgccccatgacccacctcccttcttcccctcctcccctctttcaggccatctctgcacacaccaggctcctccccaccagccgcacttctgctcaaggagtccccctgctgccccatcctgcagttgcagctgctcctttccccagtgtggggctggtgcctcctcattcttcagtgtgtttctttgtggtgcggatgataaactcctcaaagaccctggccccacagcccctaaaacactcatgcataaaagcgcatgaagtctggtggctgcttaaattcaaaaggctgcttaaattcaaaggatctgattaccttttttgaagaattgttttgaaaaattaaaggtccaatatcctctttcctggaaattcacaacctgagaaaagtggaaatctgtaatttgcatctccaataatttatcattcccagatgaggttcatatcaggctgggcatacttggattttaattccaagagtactgaggaagaagaaacttggacctagagtttctcccttgccattagccatcctcctctgccttcctctgtgggtcctggggtcctgagagcctctttcggatgagcactgagatggggctgttgttgagctcctctgtcttgcaggtactagacgaattctccaagcaggtcgacaggatagactggccaactggatcccctgatactatccggtacacaggcctggacagtcagctcagtagataccaggtaaggcgcaaaggctgtgaagcagaaaggccaacggccctgatggttgtgactctgggtgatgtgaaggctgatgtcctcttgaagatcgcaggaacctgcataagacctgagctcctaggcaggcttttgcttttccagtatgtgtttaagcagcctgtggtttttaacttctgaaagtatatccagcttgcttggttttgagccctgtttccaggcagccactccagtcctgacgtttttatttttacttctttcctagaacccccgagaagctgaccccatgactaaagtgcaggctgaactggatgagaccaagatcatcctggtaagtaagtaaattagggaccaagttcagaaacacaggcaaaaagatttgccagtagtcaagcccacacagctgattcttgttttaattatagtcaaagcacttctgaaagtggtggtggcccacctgtccctgtgcatcagaggccttgaaagccagattcactcagacagccactctgtggttctacctcaatggtgcctgccttagcctgacccacagcccagcaggttccttcttttcagagtgtgggttttggtgcagactgaggctttctgactaaatacaggtcccgagtagtcagaaacaggcctaattcagaagagtgggaaccctgcattttacctgaaatctagtttgcaagtgctgttttctgcttttgttttaaaactctgagctacctttggctttggaatgaaagttaagagatgacagtcttcaggcacctctctgtcttctgtaacgtttctccacgtttcctaaccaagccctgtctctgccttctgctgcctcagagcctcagtcctgtgagcaagcacacagaggcaggggacacacacgcactgtctttccttgtctctccacagacagatgggtccaggtcacccagcccattctggctgcaggggtaaaatctggattaccggtcactctgccttttatccatcccattcatgtcttgatccagttaaccttttatggtggaaatctgagttgcttagccgtgtgttgagataaagaatgtttttgctcatttctcattctgtgccatttcatatgtccaaacctagggtaatgccaattgcctctgagggccttgcagttgaagcagtggccatctggggtgggagcaagtcagccacttcctgatggccctggtggcggggctaggggctcttgtgaggacctccatccctcgtgtgtttggaaagggtctgtctgcactaagtgcagaggtgctctcacagagctgatagtcgtgagatttagacacagttcccctgggagaagcatgacacggctgggcagtaggaatatgtgtatgtgaatacgggcgcaggggacctttcctggagtgtggctatctaagcctgtgctttggaggatttgggggcagtgctttatgtccagttagaaccttctagatcctccaggaaggtcactaggccctgtgtcctccagaggtctgggtcactgtgtcttgatgctcatatgtgggggaggagcccaaaggaagcactttgctgtgactgagcttcatgagggactggcgtctgctcaccttgtgaacagagcaaggcattcttttgtgtctttcctcttgtccagcacaacaccatggagtctttattagaacgaggtgagaagctcgatgacctggtatccaaatccgaagtgctgggaatacagtctaaagccttctataaaacggtgagtgtggcctggccgctcctgggcaccccgtcactcggctttccctgcctctgggctgcttcctccctcccccaacctccccaaggtaaggatggctcctcctcacccttgctgtctgaagtatgccaccttcccagagaggttccaacgcttctgatttgttaacttggactggagtgtttaaccttttggacagtaagggtgcttcatttgcttggtcaacacacacgtttgctgtcatgatgtgccttggagggagatgcctgtggggttaggaggtatctgaacaggaggtgaaggagaaggtaacagaggccccatggggtacctctctgctctctgaagatatccttagtaagaaacaccctcacggggtcagataactttatggggagtcaaggctggagcgaaggaagagacattcctgttctttatacttggctaaacaacaggaagtttccttccttatcggtagcattaatggaaagtggacagaataatcttgggagtgtgaactacttctggatggcttccctccacttctctctccttggtggttccagagcccctagtaaggccaactggtcccctcagagctcccagttctgtgtgtgctgaggtccacctcatcagctctgttttgtctctctcaaggcccggaaacaaaactcgtgctgtgcaatcatgtgacggctgccagcagaggcccctgcactggaatgtcaccatcactcacatcggaaccacggccccccaggaagcagagccacctcgtaacaacccaagtgggacagactcaacttcggctttggagctcctgggagaaaccgaagggtggatggggaactgggggtggggaacgttcaaattcacatgtctagttatttttgaaaagatactaaggcccctgaatgtgtattttggggccaaatggaaccataaagctcagtgactccatagatgctgcagggcttgtttctaatcccctgggaaggatgtgggcccccaacttgtgcaaggcccatggggggttcagagccagctctttgtggatcttcacatgtgtgggttttgtctgtatactaactattaacactacaaggagcagggtgccctgactccaggactggggagggatggccactgtggggctgcagtgggcatgggatcagggtgggggactcaggccagtgcttctgtgttgggaggagacagctactggacttcataaattctgagacctggtttgcattcctgctgagattgactttgactttctgcgatacccatccagcaagcaagttcggtaaagaaccctagaagtgggggagggggcgctggccctgacttgccgtttggccttgagcatctggatcagagc

SEQ ID NO: 103 - DNA, 204383 bp, Hippotragus equinus
  source 1..204383: mol_type = genomic DNA
aagctgtatcagtagaaagtataatggctatgtacttttttgatgtgacattgatttgctattctgacagattcaataatgtttacgatttaagttcattttcctaatttttacttgctccattttaacaagtagaataaacatttcattgtacagtaggatgtgagcagagatttacatgtgtgtttacaggcataacataattctggtccagtgcaatctgttaacagcagtattatcttagcataattcaaatatccctgtacgccctaccataaattatttcatccttttaaggatcctgattagaaccatgtatcattcagtttatttcaaaggccttgaaaaattaagcagtgattgactcctcatgagcatcctagaaaaaaggcacaaatattttagacataaatctcaggaaggaataaagaaacaagcaccagctatttgcaggttccagagaatgtctcttctttgggacacactatccttctgaatgttcacactacttgaactgggagaccagtagtcatgtgaggaatacactttccacagaaccctccacatctgccatagactttggttccatcctgaaaatagaagaggcagagatccgggagaatctgttacatgctggtatctgtgtgcacaaggcagaaaagcaaaggctttgaatcatgtggctgaaataattagccaaggtttcctataacaattatacttgaggtcaaagatcatgccatttcaggctcagttgaaatctgtggtcacaggaattagagaacccgagattcgtattagccacttgataattataaactacactttacgttagacagttcctctcaatccacgcatttttcatcaaggtatctatttgcttcagtgagtttattaaaacctctcccaatttgttgtccagtgtttctcacagactgaataaaagaaaggtattaggattttatataagattctcatggactaaataaaagaaggatattatgcaaacttgaccttaacttcaaacatctcctggaagcattggaaacacagcttgaagaaaatataaaaggcgaaagaatggggggaacaactggatcgaaagtaagaattataattagacacagagtcagacacaacttagtgactaaacagcaacaaaaaaggagattcttcttcctttttagaaaagcagagctgctaactgaggaatgggtgagcagaggctggtgaaggaagtgatgaggacaggataaattttctttccagactgtcttccaactttaggtccaaaagtcaaatggccttttgatcggatgaaacaaaaatagtttgaactcttatggtttctgaagaaggtaagttttgctttatttatgtttttgttttttttaatctaaggagggagggtagaaaaggaaactgggttcctgaaacttttgaggataaagaatgttttgagatcaggggcttttgaagttgcctcttctttcagaagctttctacactctagagaatctgagtaaacagagaaggggatggcagtaaaaattccaatttatatacattcctgttctcaaatggatcaagtaaacccctaatcttgtttaactttactaagaaatgaaaatatgtgttcatttccataagtacatttgggtttcataagtcagagtttcacaccatgcgtcagatctcaggaaataccttcatgtgcaaaatctttgattgagggagaaattctcaattaagtaaacaaatagtctttacaataaaacttaaatagacgcgaaaggaatgattgtaccaaatattcatttttactgctgcccttggccagctgtcatttaaccagaagataccttcacaactaggtaaagtcagaatatctcattgcactgtctaaattttatacctactcagaacatattttaactaagtaattaatttatttccattcttctacccaaaagaatgacacctaaatttgccaaataaatatttagaaataaatagccattttaaaagcctactgtttacccatgtgatagaaataataaaaatataaagtctttaattattaattaaaacacaaattcataatagtcagaaataaagtattttaaagtctgcaaatatcagaaaattgaatttcatttacaagtagtattcatatataggaatgaaatcacttttagcaaaagaaagaaaaattctaaaaccttggtgtaggcagggactgttgatggtactgatttaaatggtgcaatataggtgagaacagaaattataacacagatcctgatttaatgtagatggggtcatgctatttaagatgtggtaattctaagtaccaggagccatctcataaattttatgtgttagcacactacaccagcaccacaattaggaggataatactttagataatacatgtgctataagaaaaattaaaattccagtgcactggccctgagcgccctgtctcgtacattgaacgtggactggcaatctacttcacgcatggtaatatacatgtttcagtgctattctctcaaatcatgacaatgttttctaaataaagatagatgaggaaaatgttcatacaaccataaaaatattcctaattcttgaagaaactataaaggatgttcattaaatgacaaatgactctgacatcactaaatcactaaatcaaagcagggaggtaaataaaccaaaaatttacctcttactttgaaatattaaaatgtaacagtcttcaataattagagtatagttaaaaagactacctctttttgaagcacctgtgtttcaaaccattagccccaaacttgaactacttaaatctatatgctctggcacttgatttcatgcacagatatctatagcctaaacaagaatgtgtatatatatatataaaacctccctaagcacatgaataaaaatgaacctcattccataatttcattagttatacctcatcataatgtaacataccccattatatggaaaaactcattagtcattcagttcagttcagttcagttgctcagtcatgtccgactctttgcgacctcatgaattgcagcacgccaggcctccctatcaccagctcccaaagttcactcagactcacgtccatcaagtcagtgatgccatccagccatctcatcctctgtcgtccccttctcctcctgcccccaatccctcccagcgtcagagtcttttccagtcttttccacctcatgcaatggccaaagtactggagtttcagcttcagcatcagtccttccaaagaacacccagggctgatctccttcaggatggactggttggatctccttgcagtccaagggactctcaaaagtcttctccaataccacagttcaaaagcattagtcattaacttcatataattctgaatttaaggtagaggaatttaacactacttcacagcacagaagtatttcagacaggctttttgtttttttttttttttccttttttttttttaaattaattaatttatttatttttaatttttactttacaattctgtattggttttggcatagattgacatgaatccaccacaggtgtacatgtgttcccaaacatgaacccccctcccacccccctccccacaacatctctctgggtcatccccgcgtgtcagccccaagcgtgtcatatcctgcatcagacatagactggcatttcgattcttacatgatattatacatgtttcaatgccattctcccaaatcatcacaccctctccctctccctctgagtccaaaagtccgctatacacatctgtgtcagacaggctttttggtccagcaggacttacctgtgatctgtgaatgatcacagaggcataactgccctgagccagccactttgctgtactggatatcttcatcccagttcctgccaaattaatgctgaactgtcccttgattataaataaaaaataaaaaaaaataagactagatggaattagtaaatatatatatatatatttatgcatgtacttggctggaaacacatgaattggcatgatcttaaaaacttgccttcctagattctttagaaaatgaaagaacgttgatataaaacatacactttcttacactaacaaaatgaacaagctaaagattttttaaactgattacaaataaatcttctcagttacaagggacaactgaaataatgccagatagtgttatctgtcggaaagtaactttgtccagtcctaggactctagtgattgacagctagagcttacattcctatagcatcagcagcagcaagtctagatagaagaggtgtcacagggactggtaccagactagcatttatccagcttcaatttttgactcctcactgctaacttcactgataaggtacacctagttaatgtgtttccttctgttattgtgcccttacatctatcacacaaaaactattgaatatagtattatggtcccagctatcacatccttttaagtacccaaaagcgttatgcagatgtgtgatgccacatgaattacacacatggtatgtgagccccctagtggcattatgatttaattattttcaagacacaagaaccattttatgtcaaaatattctagactatcactgttaaaaactaaacttgaaatatctgttaagaaatgacttaaatgggtaaaatatgtggcattcatgtatatgacctcccagtacagaatcacacactgaaaagctgaggtatttaatgaatgctaagtaagcctgcgccaatgttcaggatacatatagatttagagctatgttaggacaatcctagatcacatcacaatattccgtggcctagggcacaggaatcttgagcaaaactgtgataaaacattaaggattatgttacgtggtggaaaatattatctttcatgaaagcaaaagtaaaatagatttcacatatatttgtaatataaattactacaattgctaaaaattatgtatcaattcagtttattaagttagatttcttatcaatcacatacttatttaaaatcaaaatagattcaaaggtatttataatacaatgataatatatgcagaattttcccctaaacagaaataatttgttttagataaactccaaagaaagtttattattatatacatcatttggttatggaatttaaaatacctgtatgtttgcttcattgatgtaatcctagattccaaaagtaggcctaggaactctgtgtgtgtgtgcttagtcactcagtcatgtccaactctttgcgaccccagggactatagtcctccagactcctctgtccatggggattctccaggcaagtatactggaatgggttgctatgccctccaccaggggatcttcccaacccagggatagaacccaggtctcctgcattgcaggcagatactttactgtctgagccatcaggaagacccattcaggtactcaggaagtgtttttaaacagatgaattaagtgtaacattataaatattaaattttagcgtcataaaaattaatatatagatatatatatataaaccctttatacttgtgataataaatgacatgaacactaggcacatcagaattttacattagtaaatatttaaattaaaactaattctaaggatatattctactatttgatacttagtcgtctgatacagattttgaactaaatatttaatccgacattaactcattttttaagtcagcttcttgccaaataaaagaaatggaaatatatcctgtgaagcagcttgtctgtaactaaccatttatggcactcttgttgtgtcatgcagtattttcacaacttaatatttatcatttacctccctgctcagcattgctgggaaggattcaaatgtatatacactggaagtgaaagaaaaaaaaatccaactgagtaatgagagattcaagtggtcattaacataatcagttgggtctagaaatatctatagcttcatttttccagattaattttcaagagctttgattacttctttagtccttcttcaaaagctacataatggtatcaagaagcagaaaaacagttcatctgaaactggggatgatatcaattgaggtaaaaatgcatttcactcatttgttcaaaattgaggggcagacttggtgtcaagtagccacaagagtggaaaggtcgatccttatcccaattcccaagaagggcagtactaaagaatgttcaaaccaccaaacaattgcactcatctcccatcctagtaaggtcatgcttaaaatcctgcatgctaggcttcagcattatgtgaaccgagaacttccagatgttcaagctgggtttagaaaaggcagaggaaccagagaccaaattgccaacatttgctggatcacagagaaagcaagggaattctagaaaaacatctacctctgtttcattgactacgctaaagccttcaaccgtgtggataataacaaactgtggaaaactcttaaagagacaggaataccagaccatcttactggtctcttgagaaacctgtgtgctggtcaagaagcaacagttagaatcttgtacagaacaactgactggttcaagattgagaaaggagtacgacaaggcctgtttactatcaccctgtttatttaacttataagccaagcacatcatgagaaatactaggttggatgagttacaagctggaatcaagattgccaggagaaatattaataacctcagatatgcagatgataccactctaatggcagaaagtgaaggggaacaaaacaacttcttgatgagggtgaaggagaagcgtgaaaaggccggcttcaaatgaaatattaaaaaaaactaagatcatagcaactggcccatcacttcatggcaaatagaaggggaaaaggtggaagcagtgactgatttcctcttcttgggctctaaaatcactgcggacgatgactgcagccatgaaatcagaagacaactctgggagatgctgagagacaagaaagcctgatgtgctgcagtccatggggtcacaaagagtcagacacaacttggtgactgagcaacaaaaactatgggagtactgagaaaggtcttagtcttgatctgagaagggaagcatagattgatggttgccagaggtaggagtcaaggggaagggaagtgtgtgagagtggacaaaaaagaaatcttccagtgacgataaatcacaagtagaaggaaaggtgattcaaaagaactaagaattcaacaaataggaatatcttcctggaataattagcttcattaaaggaaaatatacttatggatacagagggaaagcatagaaatagatacaagctttaaagttccacttcttggactgactgcttggttcatacgtccccattatgtcattaggttttacagttttaaagtttgttccacctattttactatgaaagggatctataaatctaatgcaactgattctaaaatttatataaatttatatttcttttataaagaaattaaaataattaaaacaagtttgaaaaaaagaataaagttaaaggacccacactaccgtgttttaacacttattataaggctatcattggagaagggcatggcaacccatttcagtattcttgcctggagaaccccatggacagaggggcctggtgggcttcagtccacagggatgcaaagagccagacacaattgagccagacacagcttagcacacatgtgagcataaagctgtcagaggtggtgctagtgttaaagaacctgcctgccaatgcaggagatataagagatgtgggtttattccctggatcaggaagatctcctggagtaagaaatggcaacatgctccagtattcttgcctggaaaattctatggacagaggaacctagcaggctctggtccatgaggtcaaagactcagatgcaactgagcacacacacacatccacacccaaacatagagctatcataaccaagacagtgctgtgacggtgaagagagagacatatgtcgatcaatggatcagaacagagtcagaaacagactcaaaatatgtccagttgacttcttttggccacaccacatggcaagtagaatcttagttccctgactagagactgaacttgtagccactgcattggaagcatggattcttaaccactgaaccaccaaggaagtcccctccaggtgatttctgacaaaggtggaaggagagaaacaactgccttctcaacacatggtgttaggaccattggatgtctataggcaaaactcttccaacttcatacaaaattagttccaaatcaatcataggtctagatgtaaaacatacaactataaatttttttaagaaaacatagcagaaaatctttgtaacttggactaagtcaaagagttcttaaatatgacactaaatgtcataaagaaaaaaaatggtaaatttgaattcattaaactttaaaacctccacttaagtgtaagacacttaagaaaaagaagggataaggtccagaccatgagtgaaacatttgcaaatgttataaacaacaaaagatttgtatccagactatatacagaactctcaggacttccctggtagtacggtggataagaatctgcttgccaatgcaggcagaaagattcgatccttggggtaggaagattccacatgccgtggggcaactaggcccctgaacttggagcccatactccacgacaagagaaaccactgcaatgagaagaacacgcaccacagctagagagaaacccctgtcaccacaactagagaaagctggcgagcagcaacaaagacccagggaagccaaagattaattaactaatttaaagaaaagaactgtcgaaactataaacattaatgaacaattaggaaacaaacaacttaattgtttagatgagaaaagacttggatatgcactttaccaaagaggatactcagatgacaaataagcacatgagagacgcttaacattatgagtgaaacataaattaaaactacaaaaagatgtcactgaagatggggaaataaaaaccttggcaatactaagtgctgacaaagaagaaaaacaactagaaatttaatctttgctgatgggaatttaaaaatggtacagtcactgtatcaaatagtttgaatggggggtgggtaggagggaggtccaagaaggccaggatatatgtatattcatgactgattcacatggctgtacagtggaaaccaatacaacactgtagagcagttattcttcaattaaaaataaattaaaacaacaaaaataaactagtttgcaagtttcctataaagttaaacatacatataccatatgaccctacaatctcactcacaggcatttctcccagagaaatgaaaatacatgtacacacaaaaacctgtacacaaatgtgcatatccgctctatccataatttccaaattctataaacaacccattttcttccaacaaatgaacactgtaggataactgtatgatatccgattgatggaataatgcttagcaatgaaaaagaacaaattattgacacatgcagcaagcaaaagacagatggacctcaaaagaattacattgaccaatgtaatgagaaggaggccaatctcaagaggttacacactgtgtgacttcatttctatgacatttctatgtcatcccagaaaatgcaaaactaaagcaatgaagaaaagatcagtgtttaccaggaggtacgtgggaggaaggaattgactccatggagccagtgtgagggagttgttctatattcagattacggtgataacaacatgaatttgcatacatgtttaaaactgtatactaataaaggcaattttactgttatcttttttcaatttaaaatgtgaatgaatataacatctaaagaaaaaaaaaatccagttgaacttgaaaacaaaacccaaactacattctatatgtaagaaatacatttcaaacaaagtgactcagaaaagccaaaattaaaagtatgtgtggcagtgaagagagaattactgtgttgacttacagtgatcatcttaaaaaaattaagataaattaattaattttaataaagggatgtgcaagactgtacggacttcccaggtggtgcagtgctaaagaacctgcctgccaatgtgggagacagaagagacgtgggttcgatccctgggtcgagaagataccctggaaaagggcatggcaacccactccagtattcttgtgtggaaaatcccatggacagaggagccttgtggggttacagttcatagggttgcaaagagttgcacatgactgaggtgactttgcacacacacaagcacgcaacagtatacctggaaactgggcataaaaagagagcaagtgaagcaaatcctgataatgtaaaatagaattcaagtctgatatcagaaaaacatgacaaagaagtgctaaaaaccatgatccacaatgaagatataacacatgaatattatacatcaaataacacagctacttttatgaagcaaaactacaggagatgaaaggagacataggtaggtagaaacaccctaatgataggaaattgtaaaataccacttctagcaacaagatagatcaagaggacaagaataaggagaaagaggatctaagcagtataatcaaaagggtatgcatatatatctaacttgacacattataataaaaaatacacattcaaaatatttaaaaactggctctaaatactcaaaatgtatgctggccatgatcctttggcattgggtatttctcctgctctcgtgtaatcaatattaattacaaaatagataaagagatacacattggggatttctcttttttatggctctgtgaaaagtacaaaacattttacttcacttcacttttgatatatgtattctaaagtcacatcacactccttaacttcatcttatattacaatatcacaaagtttattttccctaaagattaccatatgtgtccattctctttttagcatttatgtcctggggtgccctgtcatatgcaaacacagaggatgtggttttgatgaatgctaaacaacagaataagttctttctgtgacattaaacatctggagagtattcatggaaatgttgtataaattaacacacaatctggtttatatatttgacagaatatcttcaagaatactgggcagtttgtactcttagtaacagtaacttcaggcaattgaacacagactggaaaaaaaatgggcatatctttttttgacagcacatacttatgcccaataacatctaattttggaaataaagctttgtgttccagaaatatctagagaactctgtggggaagacatctcaccttgatgagcaggaggagcattttattactataatgatgctgcctttgactttctgaaggatcttagacagctttttgacacagagtgtctctttctccagctgtaaactggggttacccagtttacaactacaaaactttctcaagatattgtagggggaaatgaccattgtattacttatttgtgtatcagtctcctgtgaaatttattgatgtctcactgaccgggggcttccgaggtggtgcaggggtaaaggatctgcaagagatgcaagagacaagggttcagtatctgagttgagaagattcctggagaaggaaatggcaactcactccaatattctttcccgggaaatcccatgaacagagaagcctggcagagtatagtgcatgggatcacaaagagtcggacacaactgagcgacagagcacagccataaacgtttgtttacaagtctctacgtgagcatatgtcatacatcttctcatttgccggaccttattcaattcaacatgttataagaaggaccagatttccagaacttcatgatcttcccaaaatgatggtaccttgtagcagactcttcacatctctaggtggcatcttcaatttccctctctctaatcatatcaagtacatgaccgaaaggaagagattagaaggaaaatggattattggacaatgctgaccagtcttgacatgagctggtcattggagaatgaataatatccatttaaaaaagtaaaaatggaaatgttattttaaatacatacgtgagggaaaagattgtttagagcggtaaaagttttagattacacatccttgaccttagaacaggtgttcaaagagatgcaatataaaacttcagaagggggagttcatcaggggaaacagagtcctgagaagagaactaaataaaagatgtaggtcagagagtcatcatcttggaggcagaccaatcgtctggtacacgaacatgagagaagaagagaaagagaagaatagacatgaatcgagctgctgctgctgctgctgctaagtcacttcagtcgtgtccgactctgtgtgattccatagatggcagcccaccaggctcccccatccctgggattctccaggcaagaacactagagtgggttgccatttccttctccaatgcatgaaagtgaaaagtgaaagtgaagtcgctcagtcgtgtccaactcttagcgaccccatggactgcaccctacaaggctcctctgtccacgggattttccaggcaagagtactggagtggggagccactgccttctccaatgaatcgagctaaccaggctcaaagattgagtgagagcttgagattcctctgaaaagttatctatcttaaaagcagagccaagagagggagcacttttggaatggcaatttgaagagacctgtggactaaagagtgaaacataggaaaaaacaggaatagaggagaatttcctcaacttgaaaaagaacacataccaaaaatctgtagccaacaatacagttaatgatggaagtttgaatgctttctccctaagatcagaagcaattaaagcatattcactatcgccactcttcaaaatgcttgaagttacaaacatacgtactaatatgattctacttatacaatagacagaaaaagaccaaaattatggaaaggaagactagattagtggttgctagggtataaggtgaagctggtggtacaagaggagtagttgtcattataaaagtccttgtgatgatgaaaatgttctatatcttgatatagtgatgtcaatatcctagttgcaatattctactataatcctataagatgttaccatttggggatactgggtacacgagatccctgtcttatttcttagagctacatgtcaacagttctttcgaaacaaaatgtttcatttcaagcatttaaaaaattataaaatacaacagccatttaaattctcttgaaattgtcctaaggttatacaacaattggagaaacacttattcaagaaaatctatgaaatctaggttagaagagtaagtgtctgtgacatttgaaccatgacctgtttatggcctgtcctctcttttccccacctcagcaagatgatagctccactcatcatgggtacagctaagaacagaggattttatttcccccagctctctgttagggataagctttttccaagggtatatgtcaagggcagcagggggcaggtgagataccagcactcctcatctcacacagctctgtgctacagaagctggatcagaggtaagaactacagagatctgaatctctgttccaccactcagtccttactcatagatcaggagatctgcctcaggcatggtcggccaagaactgaaggcctgaatcattcccacttaaaatcactggtagggcacaggtttcatgctgagcagtacaagccaagaagatcagggaataatgtcaagacccagcattctgcttatagactagggatgttactctgcaaagtgggatctacccactcaatccacagagtgggtgcaaaggctcttcctcagggaaaaatcaagttgcaagaacagaaagtttcacagattttcctaggtagcctgagtatttgggacagaaaatggggaagttcaagcctaaaggggctattgaaaaaaaaagagattttagtggtgtgtagttaagaggagcatgagagcaacaagcaaaatagtaggtcagatctcagtttaacagagaaaaccagggaaagagatagctaagaatgtctctttttgaggtttttctgacctgacctcaaagactgacctataagcctacgctggccctggggcttgagtttaattggctcagatcatagagtaatttatgcctccaggatgttattgaaagaacagagccatcatctaccaattagtagtgggtaagaattgagtgtgatatcaatagaggcagaccagctagaaacttcatcaaagagaggccagctaaaaacactatcattccagaaggattgggtgactgtacatgtccaaggctgagccctctgaatagggacactaaaggctacatattacaggggaaatagatgtcactgaaatagcccagtcaaggagctaaacaaataaacaaccaagaaatgacaaatcctaaaggggaaaggaaacttagtatccactgctgctaaaatatactatctaaaatgatctgttttcaacaaaaaattgtgacacaggcaaagaaactggaaaagatgactcatataatcgaggaaaaggcagcagaaactgcctttgagaggtttcagatgtcagactgtgcagataaagattcaaagcagctattaaaaatatgtccaaagaactaaagaaaacccatgtttaaaaaagtaagaaaagtatgataataatgtctcatcaaaagagactatcactaaagagataaaaattatatttataaaaagatctaaaggataactctggagctgaaaagtacaataaccaaaataaaaattcactagaggggatcaaccagcagattagagctggcagaagaatcagcaaacttgaaaagatactaatagtgatgatacaatctgaaaaagtagcaaaaaaaaaatgaagaaaaatgaatagagcctcagagaaatgagggacaccattagtacaccaaaccatgcatgatggaagtaccaaaaggaccagataatatatttgaagaaatcctggctgaaaattttctaagtttggtgaaactacattaacctacacatctaagaagtcaacggattccaagttgagtagacacaaagagatccacatccaaatatatcacaagaaagatgctgagagtcaaaaacaaaggaaaaaatctgagagcatctagagaaaaataagcatatatatgggaatctcagtaagataaattgctgagttctgtcgttcatctagaagccagaggacagtgggatggcatgtttagactcacagacttaggaaatgaacttacagttgccacagaagtaaagcatacaagtaaagataatttcatcaatagcaactatgaaagacattataattgtatgtttctttattctcaacttatttaaaagtaattgtataaaccagcatgtatgtaattataccattgaccagtaatatacagacatgtgggcttcccaggtggtgctagtagtaaagaacccacctgccagagcaggggatgtaagagacactggtttgatctctgggtggggaagatcccctggagaagggcatggcaacctactccagtatacttgcctggagaatgccacagacagaggagtctgctggctatggtccataggttgcaaagagtcagatatgactgaagcgacttagcacacatgcatacagaaatttaacatacttgaaaagattgccacaaatgaagcaggtaggtggaaccaaagatgtttggggataattaaatgaaagcagctgataactgcaatccacaggaagaaatgaagagaagcaaaaagtttcacacacacacacaaaaactctatgaaatttaagttctctcatttcttacctctaaaagatataaaattatatagtgaaagttgctcactcgtgtctgactctttgcaaccccatgcagtctatggaattctctaggccagaatactggagtgggtagcctttcccttctccagaggattttcctaacccagggatcgaacccaggtctcctgcatcacagatagattctttaccagctgagccacaagggaagcccaaaatcatataaagtaatattataaaaatgtattgtgggtttgttatataggttagatggtatatgcattacaaatacaacaacagcaaaggaaagggggaaagtatatgtaggagtaatacttctatgtgactgcaattaggtaatataaatctggagtaaattctattaagatgtacactgtaagccctagagcaactattaagaaaacaattataaatatagtgagaaaattatgaaagaaattaaaatgttacacttgaaaacattcactgaatttttaaaaaccagtaaaatggggacagaaaaccagaaatgaaatgacatatgaaaaacaaaatggcaaatggcaaagataaattcagatatatcaatcataacattaaacagtccaatcaaatggcagaaattcaaaatgctctctgtaagagtgtcaaaagcaaatgggaggaaaacatatacaccatgtactataaacaagctgagttgccactataatatcagataaattagactttaaaacataaaatgatactacagatgaaagggaacgttttgtaatgacaaaagtgtcaatatataaggaaattatgacaattataaacggacaatcacgtgcaataaaaatctcaaagtaaataaattacatacaaagtaaatgaaactaaaagattgacatgagaagtagataattcatcaataataactgcagtttcaatagataaaataactagggagaaaatcaacaaggaaatggaagagttgaacaatactttaaaccagctagccctgacagacagccagagaacacttcacccaacaacaacagaacacgcattctttccaagcacacactgcacattttccaggatagccatatgctatgctataaaacaagcctcaataaatttcaaaagattgaataatacaaagtgtattttccaaccacaatggaatgaaagtagaaatcaatcacagaaggaaatgtggcaaattcacaacagaggatgagaaggttagatagcatcactgagtcaatggacatgaatttgagcaaactctgggagatagtgaaggacagatgagcctggtgtgctgcagtccatggggtcacaaagcgtcagacactcagtgatgcaagaacaaaaacaccacactcttagataacccgtgagtcaaataagacatcacaaatgataacagaaaacactcaagatgaataaaaatgaatacacaacaccaaaacttcaggaatgctgcaaaagaagtatttaaaggggaatttatagttgtaaatgcccatattaaaagataaaaaagctctcattccatgacctaaacttctaccttaagcactgaaaaaaaaggtggggggcaaattaaatctaaagcaagcagaaggaaagaaatgatactgaataaagtggaaactggagaaacaaacgagaaaaattacagagaaaatcagcaaaatcaaaagttggttttttgaagtaagccagaaagaaaaacaccaatacagtatactaacacatatatatggaatttagaaagatagtaatgataacactgtatgcgagacagcaaaagagacacagatgtatagaatggacttttggactctgagggagagggagagggtgggatgatttgggagaatgacactgaaacatatatactatcatgtaagaaacgaatcgccagtctatgtttgatacaggatacaggatgcttggggctggtgcacggggatgatccagagagatgatatggggtgggaggtgggaggggggttcaggattaggaactcatgtacacccgtggtggattcatgtcaatgtatggcaaaaccaatacagtattataaagtaaaataaagtaaaaataaaaattaaaaaaaaaagttggttttttgaaaagaacaaaattaacaaaatcaagaaaagagaggagattcaaatcactgaaatcaggaacaactgcaaatcttacgagaatataaaggattataaggcaatactatggacaattgtaagccaacaatttagataactttgatgaaatggacaaattcctaggggaaaaaaagtaccagaatagacttaagagctagaaaatctgaaaaaatccacaataaataaagagattgaattagtaaataaaactacattcacaaagaaaagcccaagctcagatggctttgctggtgaatcccaccaaacattactttttcacaaactcttccaaaaaaccagaagcgggggggtacttaccaatttattctatgaagccagtatttccctgataccaaaaccagacaagggcatcacaaaaaaagaaaatgataggccaatatcttttctgtaaacagacaaaaaattctcaacaaagcataccaaatctagtgacatacaaaacggattagatatcatgaaggatttccctcaggaatgcaaaattgcttcaacacacaaaaatcagtatgatacaccatttcactatcactatagtaatgaacagtaaccacaggattatctcaacagatgcaaaagaagcatttgacaaatccaacattcacgatgagcctccctggtggttcagcggtgaagaatccacctgtcaatgcaggaaaagcaagagacacaggggatgggtttgatcaggtcaggaagataccctggaggaggaaatggcaaccaactccagtattcttgccaggaaaatcccaaagacaaagcagcctggtgggctacagtccgtaggggtcacaaagagtcagacacgactgaacacacacacacaacatttatgataaaaccacttaacttaggaatagaagggcacttcttcacattgatcaaaggcatctacaaaacactcacaactaacacaataaatgataaaggacttaatgcttttcctctgcaatcaagactaagacaaggatgtccactgtagccacttctattcaacattatactgaaagttttagacagggcaatgaggcaagataaagaaataaaaaaaaaatatccagactgcaaaggaagaagtaaaactatttgtagataacattcctctgtatacagaaaatcctaaggaatccaatgaaaaattattacaactaataaatgaatttagcaggcttgcagattacaagatcaatttacaaaaatatggacaaaaattagtgatttactgaggcctcagattttgcagagtgtctccttactggaaaacgctctctgataaaagtctttttttacctcaaactggaatcttctctctcattaatatctccttaagtaagtaaggctttttggctaagattaagtggtggctcagacggaaagcgtctgtctacaatgtgggagacctgggttcgatccctgggttgggaagttccctggagaaggaaacggcagcccaatccagtactcttgcctagaaaatcccatggatggaggagcctagtgtccatggggtcgcaaagagttggacacaaccgagtgacttcacttttttttcactttttaagtaacacgtactgatgccactgctgtctcatggcactctctacatatttaatgaaagttaatcataacctctctctcttttcctggctaccttcttcattttctttacaaaacatgacttaaaccttcccctcttttcccctgattctactcctagatagattaaaattttatctttctcagacagaaaatgttaaataaatatatttcagtgtcaagtgcaaataaatcttttggtctcaacattgtgttttggtaccttacaattatactgggcagtttagacattacgacatggtctacatgagtcatattgaactcagggtggttgaataaaaaaacctaagtcactttcatatcactgtgctgtgtgctgtgcttagtcgctcagtcatgtccgactctttgcaaccccatggactgtagccagccaggctcctctgaccatgggatttttcatgcaggaataccagagtgggttgccatgtcttcctccaggggatcttcccaatccagggatcaaacccaggtgtcccacattgcaggtggattttttacctactgagccagcaggaaagcctaagaatactggagtgtgtagcctgtccctccttcaggggaactttttgacccaggaattaaacctgggtctcctgcattgtagatggattcttgaccagctgaactaccagttcagttcagttcagtcattcagtcatgtccaagtctttgcgaccacatggactgctgcacatcaggcttctctgtctggcaccaactcctggagtctgctcaaactcgtgttttcattgagttggtgatgataaccaaccatctcatcctctgtcatttccttttcctcctgcctcaatctttcccagaatcagggtcttttccaacaagtcagctcttcccatcaggtggccaaagtattggagcttcagcttcagccctagtccttccaatgaatattcaggactgatttcctttaggaacccccaaggaatctgactttgaaggccagtggatttgactacagaacttccacaggactggggaaacagactcttggagggcacaaaccaaaccttatgtgcaccaggacccaggaaaaaggaacagtgaccccacaagagactgagtcagacttgcctgtgagtgccctggagtagccagtgaaggtgtgggtcgacagtggcttgccatggggtcagggcactgaatacaacagccctggcataagtccttttgaaggaggtcaccattattgccatttggtctagctgctaagttgtgtccgactcttgcaaccccatggactgtagcctgacaggctcctgtgaggactttttactgactgagctaatagaaccccattactgtaccatagttggcctcaggccaaactacaggcagggaacacagccccatccatcaacagaaaattgggttaaagatttactgagcattctacctatcagagcaagacccagattcctccacagccattccctccaatcgggaagtttccacaagcctcttatccttatggaaaccacaatcacagaaaactaaccaagctgatcccatggatcacagtgctgactaactcaatgaaactgtgaggcacgtcatggagggccacccaagacagatgggtcatgagagagagtactgaggaaacgtggtccactggagaacggaatggcaaaccacttcagtattcttgccttgagaaacccatgaacagtgtgaaaaggcaaaaatatatgacactgaaagatgaactccccaggcaagtaggtacccaatatgctactggagaagagtggagaaatagctccagaaagaatgaagaggctgagccaaagtgaaaacaatgcccagttgtggatgtgactggtgatggaagtaaagtccactactataaagagcaatattgcataggaacctggaatggaaggcccatgaatcaaggtaaactggaagtgatcaaacaggagatggcaagagtaaacatcaatttttttaggaattggcaaactaaaatggattccagatgagctacttcaaatcctaaaagttgatgctattaaagtgcagcactaaatatgccagcaaatttggaaaactcagcagtggccataggactggaaaaggtcagttttcattccaatcccaaagataggcaatgccaaagaatgttcatgtctttgtgctgacatccagtcacatccacaactgggcattgttttcactttggctcagcctcttcattctttctggagctatttctccactcttctccagtagcatattgggtacctacttgcctggggagttcatctttcagtgttatatttttgccttttcacactgttcatgggtttctcaaggcaagaatactaaagtggcttgccattcccttctccagtggaccacatttcctcaacacacaactgcactcatctcacacacaagcaaagtaatactcaaaattctctaagttaggctacaacacatgtgaatcaagaacttccagatgttcaagctgaatttagaaaaggcagaggaaccagagatcgaattgtcaacatacgttggaccctagaaaagataagagaattccagaagaacatctcagttcagtcacttagtcatgtccaacactttgcaaccccatggactacagctctccaggcctccctgtctacaattaactcctggagttttcgcaaaacttgtgatctgggcacttcctttgcctagatttgtgcttgtacagtactgaatgcatttttgtgggaaaagaaaataaacacagaccacatcttcattaaatacagtggaagatggataattagtattacaaaagatgctcttttcaaccacttactcagtaaaggaattttcctgcttggtatctggcatttgtgtttctctacaaccataaaatcaaaacctttatttgtaattttctttgtacagtatgccaaatcaatatcagttcagtccctcagtcatgtccaactccttgctaccccattgactgcagcaagccaggcttccctgtcgatcaccaacttctggagcttactcaaactcatgcccatcaagtcagtgatgtcatccaaccatctcatcctctgtcgtccccttttcctgccttcaatctttcccagcatcagggtattttctagtgagtcaattctttgcatcaggtggccaaagtattggagtttcagcttcagcatcagcccttccaatgaatattcaggattgattttctttagggtagacttattggatctccttgcagtccaagggaatctcaagagtcttctccaacactacagttcaaaagcatcaattcttcagcatataagttaaataagcagggtgactatacagccttgaaatactcctttcccgatttggaaccagtctgtttttccagaaaggagtaagacaaggttgcatattgccaccctgcttcattaaattatatatagagtacatcatggaaaatgccaagttggatggagcacaagctagaatcaagatcgctgggagaaatatcaataacctcagatatgcagatgacaccacccttatggcagaaagcaaagaagaactaaggagcctcttgatgaaagtgagaggatagtgtaaaagttggtttaaagctcaaccttcaaaaaactaagatcatggtatcctgtcccatcacttcatgtcaaatagatggagaaacaatggaaaacagtgacagactattttcttgggctccaaaatcactgcagatggtgactgaagccatgaaattaaaagacgtttgctccttggaagaaaagctatgaccaacctagacagcatagtaaaaggcagagacattactttgttaacaaaggcccatttaatcaaagctatggtttttccagtagtcatatatggatgtgagagttggactataaggaaagctgagtgccaaagaattgatgcttttgaaccgtggtgctggagagtcccttggactgcaaggagatcaaaccagtcaatcctaaaggaaatcagtcccgaatattcattggaaagatggatgctaaagataaagctccaatactttggccacctgattcaaagagctgactctttggaaaaaaccttgatgctgagaaagactgaaggcaggaggagaagatgacagaggatgagatagttaaatggcatcaccaacttgatggacttgaatttaagcaagctcagggagttgatgatggacaggagagcctggcatgcttaattccatgggtcacaaagagtcagacacaactgagtgactgaactgaactgactaaaatgaactggaatgagctgccaggatagccctcatatccctttaccaggttctatttgtatttctgggtctaagatttatatgtttatctcagttaacttttgttttcatacatgccaagaatagctttatccttaaaagtctgtgttcatagtttaggtggatatttaatcactttctataattcaaaattaagacccataatgcctcacttaatcattgcctcaaggaaatggcaacccactccagtgttcttgcctggaaaatcccagggacgggggagcctggtgggctgccatctctggggtcgcacagagtcggacacgactgaagtgacttagcagcagcagcagcaacataatttttgctagaataagttgtcatttttttaattgaatttattttattattattatttttttttactttacaatattgtattggttttggcaaacatcaacatgaatccgccacgggtgtacacgtgttccccatcctgaactcccctcttacctccctccctgtaccatccctctgggttaacttccgtattcatttgagcctatagttctagtgacctcctttaagtgcacttctctaatacagaaaaagtcctctttttttaatattcagcctatcttccatgccatttgatggaaattgtgaatacaaaattcctagaagagacaatacaagcaaactattgactacttgtcttcaaaatgacatcaatattataatttgttctcctgtgcatgattttttaattttctataaatctacctaatgatgctatattcacctagcttttatctctctgtcttattataaaatattgctcgctcataacaactctataaaatcctttattaaaaatgagatactaaatttcttttggaaaacacactttgtactagaaatctcaaaggtgacataaaaaaatatatgaagagaaccctggaaaagaaagaataaaaccaggaagacatggaaatgtattacttcacaaataatagaaaattattctgagaatgttacaggcccaggaagctaaaataactgatgttggtagcagtgtaatgaaagtcacatgcttgtgatgtatttctttaccttgtaatatatgtctattcatttctaggaactaagtggaaagattaaaaataataaagcattgtggaaggagaaacaggaactaaactatttcaaattcttatattatacctttcaaacaaatgcaatattagcaaagatgcttttcttccaaagtttatctataaactttgcaataaatttcatctaagaagttagcattttctatttacttatgttttttgcggtactgtggtcaagaaaataaatgaggagaaatattattaatttttttcagtgagaaaatactaaacaaatatgaaatacctgtgggcatctggcagcactatagcaatctccagctgtggcaaatggaactgcatttccaaatactgtctgggcaaaaagaaggtctgtagctagaaaataataaatgaaactcttcagcactaagacactgtattcaaatcttcattgaaaccaaagcatacagtcttcacattatattcttaaatacattcatataattaatccaaaactttaagcaaaaatgttgcacaattgtcatacataacatagataaggctctcaaattttatttaacataaaatgttcatcccaaaaactgccctaaaaatggaagggacatctgtaactaatccagatgttttaaaagctaaatatatgctctattgtattttagatcatagtgaatatctaaaatagataaagtggggtcaaggaacaaaattagaagaagcattatttaaagataaataggtgtggaggcatgggttggcaggggcttaccatagggacagtggcactggaaggtcccccagtgtaaacccccttggagttagccattaatcctgccatagagcctgtagactccaggctgggtcacctcaggccaaacaactaccaggaaaggagcacaaacccacccatcagcagataattgaattaaagcttcactgagcaaggccctgcccaccagagcaagacccagtttttactatcaccatcccctcccatcaagaagcttacacaagcttcttagcctcatccatcaaagggcaaacaagaagaagcaagaagaagcatagtctcaaagcagctaaaacaaaaccacattacataaagttaatcacgatgaaaatgcataaaattatgtcccagatgaagggacaagataaaaccctagaaaaacaagcaaatgaaatggagataggcaaccttccagaaaaagaattcagaataatggtagtgaagatgatccaggatcttgggaaaagaatggaggcaaagattgagaagatgaatgaaatgcttagcaaagacctagaactaaagaccaaacaaacagagataaatggtacactagaaggaatcaacagcagaataaccgaggcagaagaacggacaaatgacctggaggacagaatggtggaaatctctgccacagaacaaaatacagaaaaaagaatgaacagaaatgaagacagactaagagacctcggggacaacattaaatacagcaatatttgcattataggagtccctgaaggagaagagagagagaaaggacctgagaaaatatttgaagagataatagctgaaaaattcctgaacatgggaaagaaatagtcaaccaagtccaggaagcacggagagttccaggaaggagaacccaaggaggaacacaccaagacacatactaaagttaaacagggagttccagtggctagcactcagtgctttcactgctcaagggcccaggttcaatccctggtccaggaactgagattccacaaactgtgtggtgtgaccaaaaaaacaaacaaattttaaaaaagataaattatgacaaagcaatatgcaagtgcttatagagagtacacatatcagttcatttagggaattcaaaaacacccagctaaaaaatgtgctacttctttgatttcttgtattattacattatattattatctcatttctattttatttttgctaatggtgttaacataatttcttgtttggcaaaaatgctggggattctatataaagtatcaaaaaaatagagatcttggctcagaaataggagaaaccctgaagataagctggaccaatcactttttgatgcttaaaccacttaaataatattccaactaatgttcattcagtcagtggctttcacttctgctaatgatgtttcaaatacttttcaagaagactgcaagaccactgcatgccctggtgatgacaccagtccccctggaggcaatcctcaaaggtagcatttccggaaatatttatcatatctctaagagtagtttccaaacccaggaggccttccgtggtgtgccaggtcagcttgtacccaatcatgagaacaagtttggtgtgtcttttcctatctgcatgcaaaatgagttcgtgttggtagcttaaaattggtcatggtgagaatatatacatcaagaaactgaaaaataatacaaatcaaacttttttcctggttgttaagagttaactgttgaacatttacccattgcttacgcatggcacttagggttaggctgaggcaaacagacacaattttcaaatcatcctttgcgatggtctcctacaccattacctggataactccaaaatagctttcacttaaagagtccaaagaaagctgaaagctgaagaattgatgcttctcaactgtggtgttggagaagactctgcagagtctgttggactgcaaggagatcaaactagtcaatcctaaaagaaataaatcctgaatattcaatggagggactgatgctgaggctgaagctccaatatttggccacctaatgcgaagaactgactcactgaaaaagatgctgatgctgggaaagattgaaggcaggaggagaaggggacaacagaggacaagacggttggatggcatcaacaactcagtgaacatgagcttgagcaagctccagaaagtgaaggacaggaaagtctggcatgctgcagtccatcgggctgctaagagtcagacacaactgactgaacaattacaggtcacaagctaaatgcaattatcctttcatgacacaattaacatttcatgccacagatccccatattctgtctgttagaaaatcacagagtgtgcctctttaatattcctctcaggttctcaggctctctgtcttaaaccttgtccttaataatttagaccctcatcgctttctatctgaactattatattattaataatactagctttctaatcatcttcatggataaaatttgttttccctccaactaagtctgtttcctcctttgcttatacttttaccccaaaggtcctcataacttaaaagaaaaaaaaagataaattcaatttatagtttagtatacattgttatttatgatcttctttctgggaaattctttaacaaactgctaccagcatccactcaatttttgcttaggcaaaattgaatgacttaatctctgatggaaccaagatgcttcaccatcccatgctatgttcaagatgtctctgcctcctgaaactccattttctctctttggttaatacaaatttatttatttattttcaattttaatttttttactttacaatactgtattggtttttccatacattgacatgaatccgccacaggtgtacaaatttagctacaagatttcctcaagatagcttctagaggaaagttgacccattcagcaaatatttctttagaacatattatgtattgggcattattataagtactacaagtgaatgaaacagggcctgatggactctgagtgctaccagagagagaggtaagtaacagagtagatactatcatatgttacaggtgattattgctataggaaaaataaataaccaggaaaaggacaggggggaagggagtttaagcatggagagggtctaggatgcattcattgggaaagtatatttaagcagagacccaaaaaatattaagtggtaaatccaacatataactgtgggatagtcattctaggcagatagaacagaaaatgcaaaggctttaaggaggtacggggtagatgcttgatgtattcaaggaacagcaaagggacaagtgtgtctgaagcagttcatggatgggaggaatgtggagggaaggagcagaaaaataatgggttgggaaggccatgttgagttttactggccactggcaaggttttcattttatgagttagatgggagatgtttggagagttttgagcaaaggttggagttgttaaaaagatgaaatgagatcatgtgtgaggcatgacatggcttgctttatggatcactctggcttctctgctgagaagagaatctaggtcaggagtaggaggaaaggtgaaaaggaacttgagcgctaccagagtaaacagggatgccactccataggtaaaataattcgggtggaaaaaataatattgacttctatcaaggtggtagctagtgaggtaatgtcaaagtgggacttggtgtgtgtcttagctcaagctgccctaacaaactcatagactgggtgtcttaacagaattatttctcccagttctagaacctaagatcaggtgccaacatcatcagggtctgatgaaaggcccctatttggcttgtagaacttggtaatggatggcatgcaagaatgagagaaaggggggagttaaagatgttgctgtttcaacatgagtaactagaagattatagttgccatatattgaaatggtgaaaattaggggtagaaggagtttttgtgaagaaacattgaaagttgagttgtggatacattgccaggtgcctattagatgtaggtatgctgagaagggagtttaatcttgaaattcagggcagcagtccaaattggagctatacatttgggactgtcatttaacagatggtatttgaaatctgtaagttgaaagagacctctaaggaaatgatggagtcctgaatttcttcaatactcattgctgtagaagataaagaaccaagttgagaaacagtgaggaaaatggaagaaagagtgaccaagacaggcaccaaatgatgagcgtgtggactcttggaagccaaatgctgctgatggatcaagtgaaataaaaaccaagaatttgtcattggatttagagaaatggagggaaaacgggtgacgtaagagagaaaggaaagcttgctgaaataatgttctggacttggttcaaagcaagaaacccagagcacaagtagagagggctgcctcagacgggagctggaacagttcacccacagtaaccaggagaggaggcagagtctataggtcaaggtttaggtgggctaatagttgtgatgttaccaaaagtggggtccaactgcttgccactctaaagccaataaagagtcagaaagcgaagtcactcagtcgtgtctgactctttgtgaccccatgaactgtagcccaccaggctcctccgtccatgggattttccaggcgagaatattggagtgggttgccatttccttctccaggggatcttcctgacccagggactgaacccaggtctcctgcactgcaggcagattctttaccttctgagccaccagggaatccccaataaagagtcaagggtggtgaaacggaaaggttgctttatttcagaggccagcaaccagaggactgggcaggctcctatccacaagccagttcccccaccactgacagtcagtgggcaaaagcttttatagacagagggagggggctacatgcaaaaacagcacagtcagctctgagagtctccttggaattagtcatgcagtagtctgatcagagtcatcctgattgctttaagtacagttagtctttagttccaggctttccaggtagcactagtggtaaagaacctgcctgacaaggcaggagacataagaaactcaggttggatccctgggtcaagagcatcccgtgaaggaggaaatggtaacccactccagtgttcttgcatggaaaattccatagacagaggagctggaggtctatagtctatggggtcacaaagagtcagacacaactgaagcaccatgctcacacacacacagtctttagttccaggatcagtttcttcccatttctttgaggccagctctcaaaattgtggcagcttatgtcacagctacagtctgatgatcatcgtgtagttatcttcttcaacctggtgggagtttcagtatctataagacagctcaaaggatatggctcagaatattatctatagccctaggggaggaactaaagatccttgaccttgcctaatgactattggtctcctttgactgttttcctttgtttctgcattttctcacttctatgattaaacttattctttggctaaagtttctctacagacagaaggcaggctgaggacatgaagggcaagaaccataggatcctgcaccatttcagtggtagtttgcagaaattccattcttggtgttcttcgtttctcagtgagagaggaaacaagatcatcagcaatcagggactagagtggaggtattagaaattttagaagcttgaagctggagaagaagctgtgagttagacattgaaaggagtggagggggaatggagtagggtccatgcaagctcaggagtcagcatttaaagtaaagcagtcaggaggcctgtgtattatttgccacacacacatttcatggtgcagatgcagagcaggtgaaaggtttaacttaatcaagactggagttttggcacacaagtctgaggaagacaatgaaagcaagtgggaagtgtatacatttaatattgtatcttcagagcccagtccaatgcctggagaaatggcaggcttgttagataaatgaatgaaaaataaaaagttaacgaacagcaaataagttcctaattgtccattatttactcagcaatgctgacacagcatatattattaaataataactttatttatagagcacttactacctacagggaatttactaggtatgttgcaagtattatctcttaattctatccaaaaacaaaacataaataaataaaagaaggaaagaagacataaaaagaaagaaaaagcttgagaggcatcttactttagaaatgaggggatttaggcttagagaacggagaaggcaatggcaccccactccagtactcttgcctggaaaatcccatggatggaggagcctggtgggctgcagtccatggggtcgcacagagtcagacacgactgaagtgacttagcagcagcagcagcaggcttagagagagatgcccaaggtcacagactagtaaccagatgaagagagcttacactcaggagtctaacttcagtttatgatcatatccaaagcagcgtaatccttcctcactacagtaacggtgggtgtttagcaaatggtagctactattactgacaataatagttcaccatcatatgactgcaagttagagattatgtattcatgcattcacagtctcaacacttttttgtttctttttatgatttaggcactatgctaggctttggtgatttaattttgattgagagtttctgcttctgaaatgaacttatttgccttttcatgtcactatgtaatatccaggagggtagactgtctgatggtcagtatatgtgagggttcataaatatacttaaactttactgtcctgtaaattgattcctagaaaggcagcaggtccataatctggaattgtgggtgggagggactttaactctgcaatgccagttactaactctaagaagtggggcaagtcacttaattctgtaagtgcatcttaattttatcacttgcaacaatatgatgaaatactgccttatctagtataaggttgttaaaaaaaatcaaatgagacaaagtataagaaaatattagacaaactgtcacctgaaactaatgttaattattactttaaacctttgcagaaagcttatgcaactacatttaaaatattgatttccttatttttaatgtaatttggaattttagggtagaggattatatctcggaagggcaatatctttattacaacagtatctttagtaataacagtgtcattaccaccacatttttattaagaatccccaaggtccatattgttgcattgaagaatgtagctaataacattttttttaaatttttaagtaactattttacaatgctagaccccagataccacatacaccatatagaatattgttaaacttgtattagcaaataaatgtttctcattttccaactagagattcagtacttacttttaatttgcatggaagtaagatcaattcttattttgctaaaaacagtgtgtccagcagccagatagtcatttttacattcacagtcttgcctcctgcttccattaaaaggacattcatatggatttcgtagtctataacaacattagaatattttggtgttaggtacagttattagaccataatgtaaatagtaactttggaagtgggagggaaaaagaaaccctcttcaatattttttgtgtcaacaagttaaatgtgaaagaagtaaaaatcactcaaggttaacgtacaaaatgatcaatgggaaattcaagactagtttgtagaaaaataattcagctgtggttctcctagcttttgttaccagaatcaacttgatttctatgaaaacatacacaggtcttaaattgtaccctcctctgttgtcccattgctcacccacagcatccttcttattcaatctttctgtgagtacatgttaatacccaaagtttgattactgaacaggcatggacaacatctggcttatgtcctaatatgttcacctgttgttaaattacttgtcccgctgtgagctattcaacaaccactccaaactctggaacttctaattctcttgatggaccataaatatgcacagagaaggcaaaatacagctcatacctaaaaccatacacttcagaaaagttgtcttcttcacctttgatcaatgatatatattccttagggttctgcaagtgcatgccagcacagtagatctaaagggaaaaggcaaagatctggaaaagcttgtttcaaagtcaatggtcaatgttaaaatcaaataagaaatgtttatataatacctttgttattcttcctttaatgttaaggtaatagtcaccatccttggtaatattgtttttcacttgtatttctttacagctggtaaaagttttaccttcaaggacaagtgagtacaacttatcaacaatgaacatattacagacacaacatgaatttaacttaattataccaatattgttatactctgaaaaaagaaaccttcattttgtggagtgtatgactactctaaatatttttttcaaattttagttaaaacttctttagagcacttagtttctaaatagatttttgaagtctttacttacagtcactgacataacatttcttttgagcatctggttttaaatgctttaaacataaatcactggacagaccactatcagccatgcattccactcttctctccatcatcccaactccacaagtcacagagcactgtaaatagagtaaaattggaagatgaactaataagacagataataaggccagtaaatacacatctcctcctccctgactaggtccttttggaacaaactgatgcttcagcctcccaggaggctgaagagtcacaggtgggataaatccttaagagactgaatctattctttctcagttactgacttctttcccttcattttgtatagttatctcagcagtatgttgtaaatacttgataaatatgatttaatgatggtcattaaaactcctgagtttttactcagtgatacatgttaagttttcatagcaatatttacctgctttttatcaattaaattatacagtggaagtgagaaatagatttaagggactagatctgatagatagagtgcctgatgaactatggacaaaggttcatgacattatacaggagacagggatcaagaccatcctcatggaaaagaaatgcaaagaagcaaaatggctatctggagaggccttacaaatagctgtgaaaggaagagaagtgaaagcaaaggagaaaaggaaagatataagcatctgaatgcagagttccaaagaagagcaaggagagataagaaagccttcctcagctatcaatgcagagaaatagaggaaaacaacagaatgggaaaaactagagatctcttcaagaaaactagggataccaagggaacatttcatgcaaagatgggctcgataaaggacagaaatggtatggacctaacaggagcagaagatattaagaggtgacaagaataaacagaagaattgtacaaaaagatcttcacgacccagataataatgacggtgtgatcactcacctagagccagacatcctggaatgtgaagtcaagtgagacttagaaagcatcactatgaacaaagctagtggaggtgatagaattccagtggagctatttcaaatcctgaaagatgatgctgtgaaagtgctgccctcaatatgccagcaaatttggaaaactcagcagtggccacaggactggaaaaggtccattttcattccaatcccaaagaaaggcaatgccaaagaatgttcaaactaccacacaattgccctcatctcacacgctagtaaagtaatgctcaaaattctccaagccaggcttcagcaataccatgaacttccagatgttcaagctggttttagaaaaggcagaggaaccagaggtcaaattgccaacatccactggatcatgggaaaagcaagagagctccagaaaaacatctatttctgctttattgactatgccaaagccttcgactgtgtggatcacaagaaactgtggaaaatcctgagagagatgggcataccagaccacctgacctgcctcttgagaaacctatatgcaggtcaggaagcaacagttagaactcaacttggaacaacagactggttccaaataggaaaaggattacgtcaaggctgtatattgtcaccctgtttatttaacttatatgcagagtacatcataagaaacactgggctggaagaagcacaagctggaatcaagattgccgggagaaatctcaataacctcagatatgcagatgataccactcttatggcagaaagtgaagaggaactaaaaagtctcttgttgaaagtgaaagaggagagtgaaaaagttggcttaaagctcaacattcagaatactaagatcatggcatctggtcccatcacttcatgggaaatagatggggaaacagaggaaacagtgtcagactttattttgggggctccagaatcactgcagatggtgactgcagccatgaaattaaaagacgcttactccttggaagaaaagttatgaccaacctagatagcatattataaagcagagacattactttgccaacaaaggtccgtctagccaaggctaaggtttttccagtggtcatgtgagagttggactataaagaaagctgagcaccaaagaattgatgcttttgaactgtggtgttggagaagacttttgagagtccgttggactattaggagatccaaccagtccatcctaaaggagatcagtcttgggtgttcattggaaggatttatgctgtcgctgaaactccaatactttggccacctcatgcgaagaactgactcattggaaaaaaccctgatgctgggagggattgggggcaagaggagaaggggacgacagaggatgagatggctggatggcatcactgactcaatggacatgattttgagtaaactctcggagttggtaatagacagggaggcctggcgtgctgcgattcatggggtcgcaaagagtcggacacgactgagtgactgaactgaactgaacatgttaagtttgcatagcaatatttacctgtttctgtcaattaaattggaaatggaacagggtacaaataacctatattactcatatgttaaattcatttactttttcactgaattaaaaaatattgcttaagtatctgctcaaaatgcaagccactgtgccaggctctcttaggaacagacacaaggattagttataaagcaagttataggaaacatagagactagatatttgtacaaataactgacatagtgattgttagaaaattagggtatgatacaactctgatatctagattgatgtgcagattaccatgcaccccacagctagaaaatctcattcataagattttaaattcataattaaatactgaccttgctccattttccaactttccaagtggccatatgcaaacaggtcctaaaattgcatttgtaaacctgaggagaaggcagcacagggcatactcgatagtctataggccacagctcatgaagtttatgtttctccgtagattggaccccaacgcaatatgtaatcctttgttgataactaaatccacagttacctgcacactgaaaaatacagtgttacaaggggtgaagaagatgcccttaaacttaagggttcacagcttagggtttccccacacaatcccatttattagcctcatttacagatgggtaaacaaaggttcagagacattaggcaactttcccagtaaatggaaaggatccagattcaggactgactgtctatttgtagtgcctatgttttttgctcgtttgggttctttttttctttgcttatttttcttgttgatatttaagaatagcttaactgaatgaaaagttatctcctgataagcacagatctggaaaaatgaaacatcaatggttcttaactgaaataaaggacatttattagtcttaacatacttgtaattctatataaatttagcatacatctatcttcatacacacaatgttatgtatattaccattgcctagaataggtaagtgatttagatataaatgaaagatccagagcaaaaatgggcaaatagatttctgactccagaaaaaaagaataacaaggaatagagttaccttctaacctaaaacaacagaaacacctggacaaaatatataaaacaatagctcttaagacactggatattaggcaataaaggatagtgatccctgggagatggaaacaaagtgaccctgtaattcctccagcttactgcattgagagagtgcccaggttttggaaaaaggaaagggaccccaatgggacagcagagttgactagtgaaaacatgtgaggacaccaactgagaccaaggtcggactgatcaaaaactcatgaatcactgtatctggcacgcacacaggaccagatacagtgtcagttcccttcattcagactgtaaaaccttatatacatgcagcaataggtactgtattcaaaagggtcttgtggcacagtagaggggaatagctaaccctagactaaacaatgcactgtgcaagcatgctaagtcacttcaggcttgtctgactctttgtgaccccatggacttaacccgccaggttcctctgtccatgggattctccaggcaagaatactggagtggtttgtcatggcctcctccaggggatcttcctgacccagggatcaaacctaggtctcccgcattgcaggcagattctttaccacctgagccaccagggaaggcctaaacaatgctttgggatttttttaatgtaagaccagagtcataacacacctgtctcatattaaaaaactgtaagagctagacaagaaaagtgcaaactgcttacaaacaaaataactacattctggaacaaagttcaaaatatacatacagatacaagaataaaaactatccagtagccaacaataaaaatcaaagttcacaataaaaaataactagcatgcaaagtgaagtcgctcagtcgtgtccgactctttgcgaccccatagactgtagcttaccaggctcctctgtccatgggattttccaggcaatagtcctggagtggattgccatttccttctccagggaaagagacaggaaaatataaactacgatgagaaaaatccatctatcaaagaagaccctgaggggtgagtgacatcagtgaaagtagcagagcaacgatgtctgaaaatgttctcttctataaacgcagtgagaaaaccggcaacacgtgaaaatcaactttttccgagctctgtaaactaaccaaaggcttgctacaatcctggaagcatttattaacgaaataaagctaaatcttggaagaagagttttgtatgttttatgggctctatttccattccccctcttcagccctattgtggccttgaaaatcaatacctctgcaaacatggtgaagaacaaaagcctgaagccaccagaggaactgaaatgtctaagcctcatttccagaaaactatcattatttgaactgtttggtgctttcctgaaagacctcccttgcaagtctctctttatctgactttactcggcacttgcccagtgctaaaagccttctccttgggggcatttttggacacaattaaaggctatgtttaactttgcaacttccacaggaggtggataagcaggcaatcaatgggcaacccaaaaaagcttaaaaggaaaagtttggaaaagaaatgtccacagggctttaaaggctccgacagagtcataaacaactaggaggccatggacatccacaagtttatccagggctgtggcaaacttaggaaataactgagacgtgcctacactctcactcctgactgatgtcatggttctgcataagcaggaagtaaagttaaggaacagttgtctgttgaaggtgctcacacattacacagagccccttggcaaagactggagattaatggttccaaataactcagaaaataattatccagtcataagtttagaactaaactaatcacatagagactttaatgaccacatgtgacaaagaaaacagactttacagctagttcagaaaagtcaataacaacaacaaacagtagtaaacaaactatggggagatgggagaacatgtatagaaatccatgtagacccctaaacaagtaaataggttgaattaataatcagaaaatttcacacaatcaaaaatccaggactagaggcttcattggtgaattgccccaaatgtttagagaagaattagcaccaacccttccaaaacacttccaaaacacagaatagaaaagaacacttcctaatgagcccagtatttccctcatgccaaaactagatgaagacatatcaagggaaaaatactacagaccaatatcccttatgaatatagatgcaaaaatgctcaacaaaacactaacaaaacaatcccagaagcaaataaaaaggattgtacatcaagacaaagtgagatttatcccaggaatgtaagattgtttcaatatatgaaaatcaatcagtaaactacatcataggaagagactcatatacaaagaccatgtaagtatctcaatagatgcagaaaaagcatttaacaaaatctaacacatttttatgatataaacactaagcaaactaggtatataaggacatgataacagaatctacaaaaaaattcatagctaacatatttaattatgaaaattgaaagaaaattttcctccaaagaggaaggtgtctgtttttaccacttctactcaacagatttggagtttctagccagggaaactaggcaagaaaagaagtaaaaagcatccatatttaaaggaaaaagtaaaactacctgaatttgcaaatgatatacttctgcatatagaaaagtaatctataccaaaaaacaaaaaaagaactggccttcaaaaatgtgttttaacatacaaaaattaattctatttctgcacattataaatggataagcagaaaatgaagagtacaattccattttcagaagcataaaaaattaataaaattcttaggaacaaaattaaccacagaagtgtaaggtctgcacaatgaaaattataaactttaaaacatccttgaaaaaaattaagtcctaaataaatggaaaggtcatgttcatggattagaagacacagttaagatggtaatattcctcaacttgataatgagtcagtgatgctgaagtgtacatacaatgtgacaaggtcatcctaaatttacataggaatgtaagggacacagcataagcaaataatcttgaaaaagaaaagcaaaatttgttccctccagttcctgatttcaaaacttaccataaaactaccttactataaaatcatgattatgtggaaccaatataaggacagacacataagtcaggtaactgagttgagagttcagaaataactcttgaataacagataattcaatgcagaaagaataatttttccaaaaattgtgttgaaacatctggatagccacatgcaaaaggataaagttggatcccactttacatcatatacaaaaatataatacaaagtggatcacagacctaaatgtaacagctaaagttataaaattcttagaagaaaatataagctttgtaaccttattttcttagataagatacctaaagtataagtgaacaaaaatgaatatgacttcatcaaattaaatacatttgcatgtaaaaagatactaaggaaatgaaaacacaggatgaaaatttacaactgacatcacagaaatacaagtatcataaaagattattgcaaacaattatataccaactaattagacaacctagaagacatggatggataaatggataaatttctagaaatgtacagtctcccaaaactgaaccaggaaaacacaaaatatatgaacagactgattaccagtaatgcaattatatcagtagtaaagcaactcttaaaaaacaacaatccaggaccagactgcttcacaggtaaatcctatcaaacatttagagaaaagttaacagctatctattcaaaatatcccccaaaattgatgaagggacactttccaattcattctacaaggccagcattaccttgataccaaaacttacaaaaactagacaaataatcacacacacacatacatacacacaaatacagatcaatatcactgatgaacacagatgtaaaaatcctcaacaaaatattagcaaaccaaattcaagtggagtttagtccagggatacaaggctgtttcaatatccactagtcaacattcatgatacaccacattaagaaaatgaaggataaaaatcatatgattatcttaatagtacaggcaacatacctaaatatattaataataaaagttatatatgataaacccataactaacatcacacttaatgatgaaaagttgaaaacttttcctctaagaacaggaacaagtcaagaatccccactcatcacttttattcaacatagttttagaagttataaccatagtggtcagaaaaaaaaaaaaagacaaaaggcattcaaattggaaaggaagaagtaaaattttcaccatttgcagaggacaagatattatatatagaaaactctgaagacgtcaccaaaaaaggtattagaactaataaataaattcagtaaagttgtggaatacaaaataaatgtacagaaatctattgcatttctatacattaataatggactgtcataaagagaaaaacaattttagttccatttatgctgctaagtcacttcagtcatgtccaactctgtgcgaccccatagacggcagcccaccaggctcccccgtccctgggattcttgccatttccttctccaatgcttgaaagtgaaaagtgaaagtgaagtcgctcagttgtgtctgactctccgcgaccccatggactgcagcctaccaggctcctccgtccatgggattttccaggcaagagtactggagtggggtgccattgccttctccgacacatatgctacttctacccatttcccttattttctacagaaccagtctaattgtaaaacagtattatacttaagagaccctccaattggctaccaacaccatcctccaatggataccgtgaccatgcagtatcacataggaagaccaggtgtgtcttctttaagtcctggggatcaaatctatcccagtttttcaggatacagttcaaaggagtgaggctggaattgttagctcccgtcttgtccttaagaatcttggacaagcccccaagatgaaggttgttgctgaaccccacaaagacgccgggattcttggcctccagaggagaagaattcaattaggggccagagacgaggcttgatcactcagagtttttgtgtaataaagttctattaaagtataaaggagatagagaaaacttttgacataggcatcagaagggggcagaaagagtacctattccatttatagcctcctttaaaagaataaaatatctaggactacgtttaaccagtaaagtgaaagacttgtactttgcaaactataaaacactggtgaaataagcagaataagacacatataaacagaaagatataacaggtgcatttggactggaagaactaatatgttaaagtgtccatactacacaaagccatctacagatgtaatgcaatccctgtcaaaatatcagtggaatttttcacagaagtagaacacagaatcctaaaatttgaattgaatcattaaatgcctggaatagctatagcaatcttgaggaaaaaaaaaagttggaggtaccaaactctgctttcaaactatattataaagctatagtaatcaaaactctatgatactgacataaaaacagacacatacatgaatggtacagaacagaaagcccccagataaatttatgcttatgtgatcaatcaaacaacaaaaaagctaagaatatacaatggagaatagacagtcttatcaataaatggcattggggaaactggacagctacatgcaaaagaatgaaactggacaactttcttacaacttatacaaaaataaacttaaaatgactagagatttaaatatagtgcctgaaactataaaactcccagaagaaaacataggtaatatattctttcacaccaggcttagcagtgttttttctttttttttttgtatacatctccttaagcaagggtaacaaaagcaaaagcaaacaaatgggtcctcagcacattaaaaatcttttacatagctaaggaaactatcaacaacatgaaaaggcaccctactgaatgggacaatatatttgcaaaagtgcacctgataagaaaataaataagcttacacaactcagtatcataaaaataaataaaagcaaacagtccaggtaaaaaatgggcagagactctgaatagacacttttccaaggaagacttacagatggccaacagatacatgaaaaaatgttcagcattattaatcatcaaggaaattcaaatcaaaaccatgatatcacctcatacttgtcagaatggctataaacagaaagatttaaaaaaaacaagtgttggcaaggatgtggaaaaaaggtaacccccatgcacttctggtggagatataaattggtacattcactgtggaaaatattatagcgtttcctcaaacaattgtaagtagaattaccatatgattcactaactcaaaacaatatatgcaccccaatattcacagcaccattaattacaacacccaagatatgatagcaatctaagtttccataaataaataaataaagtatatacttcatatatacaccttaaacttgtacagtgctgtgggtcaattatacctaaataaaactgaagaaaaaaatttttttaagcagccaactatgcaggcccagatgccaaactgttcctggtagttggtttcacagttgtcaccgcttgacacttcagaaatgcaccagaatttaacatgcatgtcactattcctgtatttgcaccatctatcccagtgcttttattccttaggttaatatatacactattacccgctcccatgttcaaattcagacccagtttcaactgtatcaaatttgagactcaattttactttctaagagggaaaatcctcaacttcctttctttgccttacctgggatgagtctcctgttagcacgatatacttgcagggagagtttctgcactttttcaccgcgagaggtctggtcgcgaggtcacagaaactctcactcacttgaatgttttgcgcatccatgcacttcacttgccgatatgtctctcttttcttacacgataccgagcactagaaacacaatgatgaaatgaaaacactctctcactgaacggctgtgtgaaagtttacctgacaatactcacatccaaccactctcctgccgcccagtggtactgtatgcagtcccgaggccaacactctctctgaaaataaggccgcgtggacggatcacacttttcttccgccacccgaccaactcctctgagtctgcagtacacatccctctgctgaactccggagccacaggtcacagagcactgtgaagaagcccaaacgatttgaataatcaactactgctgctgctgctgctaagtcgcttcagtcgtgtccgactctgtgcgaccccatagacggcagcccaccaggctcccccgtccctgggattctccaggcaagaacactggagtgggtggccatttccttctccaatgcatgaaagtgaaaagtcaaagtgaagtcgctcagtcgtgcctgactcttagcgaccgcatggactgcagcctaccaggctcctccgtccatgggattttccaggcaagagtactggagtggggtgccattgccttctccataatcaactaacaaatataaaattatgtaaaaatcacaaaatagagtcatgacctattttcttgtttcttttaacgtagcctggtattatatcacgaataagaaaatacatgcaggaagtatttttaacattgtctggtctggagcagctattcgaatacacaaatagatgttctttattttgcaatatttattcaagtcgtatagaaactatgatctgatactccatccgaattggtaattgtcttctgacttaaacatgcttaatatctacaaaatttgccacaacattcaatcaaactattctactattacattgcttttgaaaattatttaaatccttacactgtatgcataatttccctcaaagcaacaataatttccaagtttgggttcatctttatacctacagtaggtactatagcatgggtgtcctaatatttgttgactcatgattatatttcaatagagaggtgtttgaggaaactgtgtcagcttacagtttacctaggcaaccttgccttaacctctccaggtctcatttgccttatctgcaaaaagaagattttgcgttgtttgtaaaatttcatagaacttgttccacccatttattcctgacagtagatcttcaaaggaagtaccaagactgaggtcctgagtctcagagatgttaagtcttttgcctgagctgctgactggagtcactggtgaagcagatttaagctcacttctttccaaactctccttgtgctgcctccagggaacagagaaggacttggcagcctctcagggctttttcagctccacaaggccaagccataaaacaacagaacctgaccacaaccaagagctgtgatgccaacagtaataaagtatggacaatgtctaagggtatttatttaatttgtgagcttggtttttatactctttgttattccagaagggattggaggtcatattgagtgttatgtggggccttatcattgttcccaactgtgatagtataaggataaaaattcaggtttttcattaaggtctttatttatacaagattcccagagtcactgatctctctttcctaacagtaaatatttatctgcagaatatagtttcatcatgaacttaaaaaaacttttaaagcccccaatgctaaaaaacttagttcacttgataaattcaaatttctctaatagattcttatagcagttttactctagaggtccctttaaatttagttttttgtgttgtgtctgtaaatagcaaccactgactcaaaagagaatttttatattattttttaacttacgaagaatattctgcatatctacgtagcttacttatacatgcatgctaagtcactttagttgtgtctgagtcttcatgatcccatggacgacagcccaccagactgatctgtccctccaggccctcctccaggggatcttcccaacccagggatcgaactcgtgtttcttatgtctcctgcattggtaggctggttctttaccactggcaccacctgggaagcccataagttacttatactaaccctcaattaatgcttttgcagttgaattttgccaacttgttgaatgttttttttaaaaaaaaaaaaaaaacatggctcctttgtatgcagataataatcacatattattttgtgtattttgtccagggtacaatattaagcaggcaaagatgttgggatgtggttttgcttgtttgaacctctggtgaaaatgtttagtctataaaataagactcctgcaaacattttccagcaataattacagaaatataaactatatttagaaaactttctacctctaaacctgaaaaaaaatattcctgaaaaagaaattcacaaaagacagcttagtaaaaagttttgtcagacaaatgtaatattctgttattcaataatccaagttgctgattgatcctgactgaccatagcacaggtttagaagactccactggggccacaagtaactactattgtggagctcatcctcaaaggaaacaaaccaacaaacaacaaaaaaaaagaaaaaagaaaaaactggactattggactactgcttgcttttcttttcttttcttttctttttttaagagagaagaatataaaagactaaactgatgtatttcagatttgaacagagaagagaatcaattgcttaagtgaaacatttcttagcttagtgtcatcaataaccctaactgccaagtccaacaaaaacttttcatgtcttttcttagttaatctcactgacacattcaacaccactaaccatgttctgctgagccattctggcttcagtcctctctggttccaggtacttttctcttcgagtccttaattgactctattttctttgtttagcctttaaatgttagtgtttcccagggtttataacttgcttctctttatactttctgaggtctctctgagcaatttcttctatataccaataatttctaaatctgttctttccatctggaatagcaacccactccataattcttgtctggagaattcaattgacagaggagcctggagggctacagtctatgggaatgcaaagagttggatacagatgaacaactaactctacttttttacacttttttatatattgacaagattttcatgtgttttctacatagatttgtcaaaggcatctcaaatccaacatttccaaaggagaacttatggccttttcccatcagctcctcttccagttgtaaatggtgtgaagatatgataactcactcttaactccagcaatgtattactattagaatgatctcccaaggtatacccctaactccaaaataggcaaccttattcaacagctttatagagccacatatttataagcatgttaaatgtttttctttaaaaatccaggtaactcatatgaaggcaatttgaggctattattacatgtatgacacaaataattgatttaaggcactaactcaccaccactgtataatttaattcagataggaaaagtctgccaaatttcctacttatgcataaatgtactacagcactacaactgtccaacacaagcctggacagtggaagtgtagaagataaattttagccaatccacaggtacatagccatgttagctactacagaacagagatgaagaaatgttagaacatgctttgccaaaatgggttcattaatgctaattcactctgtcatttaataaacaatcatttaaaatgtaatagtaaactccttccttgatgcattatttataatttcttgttaatggaataagattttgattttattatagtcagttatttgtaagatttattatattattattatataattatataataatattatattattatttatattttatttcaagtgaatcagtattggagcagtagtagaagattttgagtttaaaaagactctggaaatatctaattccaatttatcttcaatactgaaatctattttacagcagtagtgaatgaatgaacatcaaatccatccagacttccatagcttcatatattcactatatcctaaaagcattctggttttggtttggctgactctgaagttagcaaattctctcttatattgagctgaaatattcttctttaaacttttacccactgtttagaatctgtcctccctaccaacatagaacaaatacatactgacttccatgtgagtaagtatcaagatgtgaggcctggaactgtggcagctattttacgacctttagcagttgatcaacagaactacagaaatgacaatccagcacacttgccattgtagaactcctgaatctaacttaaatctagtgactttctgattttattgtgtaaagaataaatgtcttcgagttcaagccactaataatcagggcttttcctgcttgcaacagaatacaatggaacttatacagactagttacaattcaactgtgcttctctggggatttggtaatttgccaagacttttcttttagtgtaggtctaagaataggtactattccaaaaatctgagcagaatttattagtgcaaagatatgaacacttcatctattaatgtaatctactcaagggtttccctggtggtgcagaggttaaaagcgtctgccttcaatgcgggagacctgggttcgatccctgggtcgggaagatcccctggagaaggaaatggcaacccactccagtattcttgcctggagaatcccatggatggaggagcttggtgacctatagtccacgggtcgcaaagagtcagacacgactgagtgacttcactttcactttctttcaatatgttgctagtgatttaatacatgatcaatagaaccttcaattatttacctatgatgtgtgacatccatatataccttaaattgatgcaacagacttttttatataaaaataagcccgtaatgaactcaacacaacatggaaattacatttctcttgaatgcattattatgtgtagcccagcgacattctgcaattgttgactttaggtgctttgtaagaggagcaataggttgctaaggaagtaaagtttgctaagaaaatataaagacaagctaatgtaaaaggataaaaataaaataattatggtagcaattacagtagggaaaactcagaccagtattcaaatgctcgcccctctccccatcacttcctgccagtgacctgcacaagctacttaaaccatttaagccttgtttcctcatatacataatgaataatcccgacaactgtgaggaatacagaagtctctcacacagtgttaggaggtcagtgacccttgctgcttcctgcctagtcccattttttcacttttcttacagagatacaattatccctgccttgaaaaatttctcaacacatgcctcaaaccaaagagtattagtcatctcagcccactcaaagacagactgtcctaagtatcaagaaagatgataaaggaagagatttcacaggcagcatacaaatgcaaaaacagaattgctggtactagctagaaaagattgagaggcatattcacccattcccagagcaaagagacatcctccttcaccttgggctccaagctgtcttcccagaagaaacactcaacctgggtataaagataaggacccatgggagcttaaggttcactctctttgtagattataaaggatatatatgtgtacagtggaaatttttcaagtatgactatatacatatatgcgtgtatctgtgtgtgttggaaatatataaaatatggaactacagaaatacgaaatcacttaaacatgccagcatttagcagatagtttccaaaaaagttttttcctgatccgagggtttgggaaagggggcactaaccaatagatctgagatttttggaactcatatcacctttggttccagctctgatcttaaaatactagaaagaaaatgatgggtctctaagaaggggaaccaagtaagtgactgtagtcacaaggcttttgattcaatagcaaggcctgagattaggtcctttctaagctgtcgagcaggtttcccttgatcaaggggagggagaattctgaacaacttttttctgagcatgtaaactacattctgatggcactgaactaagcatgagacatgaggaatctaacaccagcctagccttaaaagcttgaatttataagtaaagctggtactctcaaatggataaaattaggtgaaaacataaataaaaaatgtccagttccagaaagaaaaggatgagctcttttttttttttttttttttttaatgattctagtatttctgttacatctaatggcatacatctggacccaggagacaaagaactctatgcagttatgtttgttcctgtttggttgcagtcattaaaatgcattactaaatcctttcattaaaaacaatgatatcaaataccaactcagaagtgttaacttcaaaactcattgagcacctctgtggtcacaatttgccaaacaaatctttccattagaggtataatgtaaaatagtaataaaatgaaattattttctagtgagtgctattaaagcaatgttacaatttatgcagccagaacaaagtagcaaccagtaattatctcttaactacctctgaaattacgcttctgttaaatatattattatatgtagcacagcgacagcctgcgatccttaactccacgtgggtactttttatagaataaatcaaaaaccaacgacttcacaagtggtcatttgtttctggcagagttttgggttctgtgtgggtgtatgaagctaatttctataacaaggaaaaccaattcaaagagaagaaggttgactctgtacaaaagcatctgtgttttttatagtctttacatattcatatctgtatcttacaaactcctggaatatgttcctttagtgaatcttacataatttcagacttggtggcaagccaacactgagttgttagcaccagtgattgatttactattgtgggaccggaggtcaagggtcaggaagagtccctcatgaatagcaaccacagcagctgcaaggcagcgaaagagtcctgggggtcaccagggctactggtggccaaaaggggagtctctcccactcccatcctccagcatctcccacctgacgtcagaactgaaaggtttctgccatgtgctgggtgcagggcctttggaacgtttacctctccagtggaaagctgctttgtcattacctgccacatcttggtccagaaaaaataaagcctacccctactttaagcaaaaccacaacatgacaaatgtataaattaacagatggcaggtcctttttatttttatttttttttgcaactgaattatagaattcaaagtaagaagtatgtagctccgtactaagctgggcacttagtgaacaagatatccattgtatctaagatttcgaggcctgtgataatgctgaagaagtaggcatggttagataagtggtaaagaatctgcctgccaatgcaagaaacacaggagacacaggctcaatccctggattgggaagatcccgaggaggaggaaatggcagcccaggccagtatttttgcccgaaaacacccatggagagaggagcctagtgggctacagtccatggggttgcaaggagtcggacacaactgagtacgcactcacaaagactttaaactaagtcatagaagaattaagacttcttccagagctcatactatatgtaagtaaataatgacaaaaatatacgttatgaagtcacctggaaacagatgatgatgaactggactggggtgattgccatggagactcaagagtgactctgatgggagaattgagagaagctagggctaggaaaccccatggacggaggaggctggtgggctgcagtccatgcggtcgcgaagagtcggacacgactgagcgacttccctttcacttttcactttcatgcgttggagaaggcaatggcaacccactccagtgttcttgcctggagaatcccagggacgggggagcctggtgggctgccgtctatggggtcgcacagggtcggacacgactgaagcaacgcagcagcagcagcagcagcagggaataactaactgtggggtcaagggaaacaggatagacccagtgtttctttcttgaacaacttagtgggtagtagtggcattcactaaatagaacagataatgtgaaatctttaaaatcatggtcccccaaaaaataaaaaataaaaaataaaatcatggtccctgctaaatcatgaaaaataatttcatttactgtgtgtgcgtgttcagtcacttcagtcgtgtccgattctttgcgaccccatggactgtagcccaccagactcctctatccttggattttccaggtaagaaaactggagtgggttgccatgccctcctccagggcaatcttcccaactcagggatcgaacccatgtctcttgagtctcctgcattgataggtggattcttttccagtagcaccacctgggaagctccaatctcaaggagtgaaggataaaatttaggggcccaggggaagcccacttccagctcctgtctgagcctctatcttccaaatgtggctcctacatcaggcaaagacaaggaagttccatcagcagaagatgggtttctttttcccatggcaggactagctcttttaagagatggatacataccctgagatacggcagcaagcagccaggtagctttgagaaagcttagccccactgacatcaagcctcaggaaattattctggttaacatttctggcctcatttatgtttttctcctctttactattacccacgctggcctttgctgaacaatcacattcaaatatatgcctttccaagtttagatttagagtttacctctctgagtgtgccaaagcaagtatccatcagccttcttctataacctgacattcttagccctgttctcttctcagtataagctttgcttttgctgagtctttcaaagtctgtccactctggccttagaccagccaggctcccttgttctgtcatgtccctaactcttaaaccatctccaattacgatccatgtggaacttaccagtcccttttccaagttgctgctactgctgctgctaagtcacttcagtcgtgtccgactctgtgcgaccccgtagaccttagctcaaatccaagacttcagtgtggtaacaaggcagttactaaatacctcaacatatgtattttactgttagaccacctggaataatgttataatcattggtagcctcccttgtattcagtaaccgaatttcttgtaaagtttatagcctccaaactaatcaagactaatttgttattaaactatgaacttagcaaatgtgttaacactgtataatatcaattcagaggatagcgtgaaaaaaaaatgtgtaatagaataaaatacatttagtggcataaaagtttcaaggttattgaaagcatgcagaatgaattaagattttctttttaaatgcaaacatacgtatataacgataaaacatcttacatacctccttccatctgttggctttccatgaagggcatcggacagacctacaagctttatgtgtccgaggtttctgtagatgactgcaatatttctcttctaattccctgtggaactggtcaatgcaaagcacctcacggtattttaaacctttaccacaggaagctgagcactggaagataaatatgaatacacttgattcattttaccttgactgatttatctataagaagcaggaaatgaaacaatcaaaacatcattgctttgatattttcatcaaattatactttgatatttctaaggagagaatttaaattttgccagtctaccctagaccataaatcaatgttggtatcataaggtaaccatgtattttataaaaagaattggttatcttccatacaccaagcactcttctggcacatacatgctttagctcctttaaggttaaagactatctgcaactaactactgttaccacacatattctaataaaaaacttgctttcaattctgtacggtcatgtcctactctatttttaaccctatatgtcttgccacagtgcaaactatgctttgaatgttaaaaaaaaatctcaatgtaggaaaatatgagagagcagaaaattgttttcaatacattaattcatttggcagcattgagtctctttcattgcagtgcacagactctagttacagcacacgactctccagttatggcaagagggcttagttgtttcatagcaggtggatcttagttccacgaccagggattgaacctacacctgctgcatcggaaggcagattcttaaccaccggaccaccagggaaatcctccaaatttattttttttaagcatgattcagttgaggttttttttaaatcagtctggcaatggtatcattccaacacaaaccctccaaactattcagcagaaaacttaactaaaatctctgtaaagatacaggttaaaaataatttggcttcagttttcaacaagttaccatttaatgagtgaagtcagtgcagaggagaagagctggagctctggcgttaaataccagctcttccacttactagctgggtgatgttagggatatttcaccccttgtccaagcctcggtttcttcattataaagatgataatttcaccatattactggtttattatgaagattaacatgagataaagcatatggaatgtctggtcctgttacacatggtgcatcctcagtgaatattagcttctcctaccattttccttcataaactctcaggatgttgataattctcagcatcatatatgcaccagggaagagttaagctaagaagacatggattccagataactcctgtcattcttctgggatagctggtcacatatggtttcatttagaaacatatactgagttctgagaacattagataatatagtatgcattttatgtatgagttcaaagactatatctaatagagactataaattgcctaaatattttaaattaaacaatgaatagtttgagggtaatttacctttattagatttgcactgctatatcccatttgaataggcaattaattgaacttgttgccttgattattaagacttattaccatatctgagatgttctctttcccttaacacctacacccttacatgtgacttaaaacatatttaattctgtgtgaattgctaatggatcttcatcaattgtattgtgttcattctttcttgctattgatcttctctttcagatctacctttctttatgacatacttctcctagctgtttatcttaggcacttccctgcctgcttctttacttcagcatttattttttcaaagaatattacatattttatactttagtataaagcatactaaacttttaaaaatcacatactgttgaataccaggcatatattatcagagagtatccatacatattcacacacagaagaacgcttttaccagcaaggacctactgcatagtacagagaactgtactcaaaattctgtattaacctataatggaaaagaatctgaaaaataatagatatacatgtatatataactgaatcactgtgctttacacctgaaacaaacacagcgttgtaaatcaactatacttcaattaaaaatatattaagctgcattttaaaacacacacacacacagacacacaaagagtttttcttctcaggttcatattattttttctaacttttcgattgtgaccttttgaacaaaagagcattcattactctccctgaatgttcgttttaaacagtaatcatttgtgaatattcatgatatgaatgcagcaatacttatggaagattggaaaacatttattattttactctttctgtgaatattatcatgtttctataatatactaaaagtagcatataaatatagattcattaaacaactctttcctttgatttatcctcaaagtgcttataatccagatgacacatatcacctattaaatgaataaatgccagagtacgtcttaaataatattactcaataaagatcagaataaaaatacaacacagtaaaaaaaaccattaaaataatacaataaaatttatgattaagacaatcatgaaaaatagccatttctttatgggatatttggtaaatactcagaaagacgtgatatttaaactcagtcttgaagatgtaggtttgttgatggacaaaggtggatggtcttatatatttttttgatgtgtcttatctagatattacccttttgtctctgtttgtcagcattctcatagttcttttatcagtgccaagaatccaagaatctcaaagtaaacatgcaataaattgatatttcttataagaatgatcaattcacttacaaaactatgtaacgcaagaggagacattaagccaaagatattactttagaattaacaatacattttctctataagcaacatgtttgtacggaatgtaaactgtgacactatagttcactactgaagtgaaactggcttctcctcacctaactcaaagcctcctttgattctttctcttctttgttattctagtctgtaaccaagactatccttaaccataattttaagcatactgctttttttctttgctcaacaactgacaatgcatccttattgtctttggtagtaaaccaaacttacaccttctttgctttcttgatccacgaaatttcagtcaacatccctttccaacctcgtattctgtttctattcaacacacaacctttgctctaattaggcataatatgattactttccctttaaggtgacatcttcactcacagcaatgcctgactggtattctttccttttacctggactactcactcgccctggcatttctaaatagtatttatccttaaagcttaaagtcaactccatggacacatatcatccacttctctgaactcttctgtctcactctgcttctagcatttcatcattttctatttctgtctcatcctttatctacccaaagttctagaggtcaaggaccttttagatcacccaggtgacccacaactggtaggttcaataaatatcagctgattaattgatgttgatcctgggtgcaagcagttctaatttgtttttattaaactctaaaataatttattaaaacagcttatgaaatatattcattggtattaaactcaaggtcctctaggaaagatagacaaaaaatataaaatcaaagaattgctaagtaaattatgcttcaataacacttttaaagaactttttccccaagatctgaataaatatatcattttgtcatgtctgatgaatttcatgtggggatttaagtaagagaatatgttatgcaaagagtcatgttttagttggaatgaggcagtcacagtgtaaataagtagtgaaatattactttccttctctcaaaccacaaaacattctgagttgtaaagattctaaaaaatagtttatttggtagaaagactcaacttcgctgttcttttctctgggatcccagtaattcttttcattgcttttctctattttatgtccctgatacaattttatctccttgaagatatattaacactgtataactcatttccagcatgcttctcagattttttctttaaaaatcacctcgacacctttgacagacaatcttctgagatttttccataaatactgtagaggagtagttacaggaagtggtgacattaaatacaagtaacctgaattgactattcttataaattaggtgaagacatgtgcctatttaaggaaaacagagcatttgaaacaaatgtagaatttgcaagccctaaaaatgcaatgaaatacccagaattgtgcaggctggatggcacattcaatcccaaaatggacagttggaattaatgagtccattctcacatgtttaactttggaacaagtctagtttttcaagtgaagttgtatataactacagaataagattctttctgatattataaatgtgggctattgctctgtttgtttacatataagaatactatagaagaataaatagacaatttgtgagaaacttgttgattaattctacgaacttaaattgcaagacaaaataaaataaggaaatgaagtttatctagctccagttctaggaaattggaaaccatgggtgtgcgtgtgggtgtgggtgtgggtgtctgcgcgtgcacaagcgcgcattgcactttcataaattttaacggtgatctaggtctctatcatctctgaaagtactgggaaatatactgatactgggttaattagtttgtatcctaattagaaaaaaaaatagccctgaaaagtaactattacactgtacattagccatgtgtaaattgccttttattgacaacaaactgggtgactttaggtaatttttaaaatctcattcaacccctatttttcatatgtaatattagtaaaagaataactatttcatataaatgtctgggtaaaggtaaggaatagaggaggaaatggcaacgcacttcattattcctgcaaagtttcacagaggagcctggcaggctacatggaacccatggggtcacagagagccgaacacaactgagcatgtgtcatgacatggcacagaggtgaggagaaagggattttttaaacaagagaaatgaccaaactcagaaaactctaaagaacttataaagctatagcaaaatgtaaaaaataaaattaataaagaatcctgcaaaatacaatgttgattacatgcaggacaaccttgaaaatgtctctcataatgtaaaagagaatgggaagatgacataaagaatatcattatctgaaaaatgctttgctcatccccatccctttgtacatgtcatttcctccaatcctaacacctttcttccattgcatccctgcaaatttttcaatgctaaattttaaattaccttccctccctcctttcctgatatcagagcccagactagattaggtgtggctcttacacagcatttatacctcaatactcagttacctgttgcatgtctcatttacctgctagactataaaatgctcctggaacagacctactgtaggaaatcacgaaaaatggaaagaacccagaatcactcatttttaattaaatgtgttatgaactattcttcgtctcagaggaggaagtaattcctgtgtaccatgaaccatcagttcagttcagtcgctcagtcgtgtccgactctttgcgacccatgaaccataggtcttctaaaataatagctatttcactggtggtacatgagttgatttagatgatatcttttaaatttaatgcttattttacatagcaatggtcaccctcaattttagctaagaagtagatttaaaaaaagaacgcaaagtttggcctactgaataacaagtgaaatcaaaggttaagtgtaagaattgattaccaattattttaattaagttcgactagaaggagcctggcggactacaggccatggggttgtcaatagtcagacaagacggagtcactgacataccatttataaatacatttagaaaagtatctagactagaaatttgactagaaatgtttatttcaatgctcctgcatagtgttctctatgaacaaaggaatatatttttgtttctatgttccttatgtaaattttagctaaacaactctaagggtaagtattaaaactaacatttgattcttaattttagaaaatcattattataaatacctaatattagaaaagagctctaacatcaactgcaagttctacattaaatatttttaatgactatcaggataagcaaccaatcagtaaaagtacagattttaaagaaaaactcaaccattcatatagattcttggtttttcatttaaaatttctaaattaatttgatatatagcctaaataatttccagttttctaaatggacttcagtcagtaaatttggtgatgaccccatttttaaagtgagcagagttagtcattcatggtcaattcatcataactagaagtatcttgtaacaataaaattacagcttccttaacactctcttcaattgctgataaggaaaatattaaactattatcaaaatttgacagtgctattgtaaacattttattcaatattacactttttcacaaaccatttcagggatggttaaagttataccatttggtttttcagctatcagaaataccttcactttagttttacaaaaaatgatgttatacaaaaatgattaacaagaaaatataaaactgaatataataagttgaaagtgaaagtgttagtcacttagtcatgtctgactcttcgcgaccacatggactgtagttagccaggctcctctgtctatgacattctccaggcaagaatactggagtaggtagcctttcccttctctgagggatatccccaatccaggaattgaacccaggtctcccacattgcaggcagattctttatcatctgagtcacaagggaagctatattaatcaatttatctttgcttttcaaaatttttggatttttctgattggtttttgaaactaattcttaagtcattaggtaatctgatgaagaaacaattttttactttatttctagatattgcatcatctctttgtttcatatatagcaaggttcacagtcattagttgcaaaagtaaaagctcacaactggatgactggatgtcatgtctacctgattgcttatggtatggcagatattagctaacttcttcagacaaccaagaaaaatctgctaccaagtgacaaaggggttcagcagagtctgttttgggagacctaaactcatagaaatgccatcattcaatacaacttcttactacaaacccaaagtcctttccatcaagacaagtgcaactgaatgagaagcatcaatttacaagcaataaaatggagtgatgtagatttaaacacagacatatcatagtagctaaaacataattgggtatttgaaaagtctttcttgaaacaatttgagaggattcattgtgtttttcttagtccttgtggcaactccaaaagtattaatgtgatttctctgtaggaatatgtattatttatctttgttttgtactaaacaaaactaaactatcatatacttctgttcagttcagtctctcagtcgtgtccagctctttgtgaccccatgaattgcagcacgccaggcctccctgtccatcaccaactcccagagttcatccaaactcacgtccatggagtcggttatgcaatccagccatctcatcctctgtcgtccccttctcctcctgcccccaatccctcccagcatcagagtcttttccaatgagtcaactctttgcatgaggtggccaaagtactggagtttcagctttagcatcattccttccaaagaccacccaggactggtctcctttagaatggactggttggatctccttgcagtgcaagggactctcaagagtcctctccaacaccacagttcaaaagcatcaattctttggtgctcagctttcttcacagtccaattctcacatccatacatgaccactggaaaaaccatagccttgactagatggacctttgttggcaaagtaatatctctgcttttcaatatgctatcttggttggtcataactttcctcccaaggagtaagcatcttttaatttcatggctgcagtcaccatctgcagtgattttggagcccccgaaaataaagtctgacactgtttccactgtttctccatctatttcccattaagtgttgggaccagatgccatgattttcattttctgaatattgagctttaagccagcttttccactctcctctttcactttcatcaagaggcttttgagttcctcttcactttctgccataagggtggtgtcatctgcatatctgaggttattgagatttctcccggcaatcttgattccagcttgtgcttcttccagcccagtgtttcttatgatgtactctgcatataagttaaataagcagggtgacaacatacagccttgacgtactccttttcctatttggaaccagtctgttgttccatgtccagttctaacttgcttcctgacctgcatataggtttctcaagaggcaggtcaggtggtctggtattcccatctctttcagcattttccacagtttattgtgatccacacagtcaaaggctttggcatagtcaataaagcagaaatagatgtttttctggagctctcttgctttttccatgatccagtggatgttggcaatttgatctctggttcctctgccttttctaaaaccagcttgaacatctggaagttcacgattcacgtattgctgaagtctggcttggagaattttgagcattactttaccagattgtgagatgagtgcaattgtgcagtagtttgagcattctttggcattgcctttctttgggattgcaatgaaaatggaccttttccagtcctgtggccactgctgagttttccaaatttgctggcatattgagggcagcactttcacagcatcatctttctggatttgaaatagctcaactggaattccatcatctccactagctttattcatagtgatgcttcctaaggcccacttgacttcacattccaggtgtctggctctaggtgagtgattacttctgtagcaaagctaaatttaaaatttttttcatgcgatatttttgatcattatttttctagagaattttttagaatgacattttggtgatcatgttaaatgtctttgtaacactaatgaaacaaaagatttgtctatgaaatgacatattacaaaggtaaataatagagcttcaggtcaaacagaccagaaattagatatcctgttgagtatatatgttccatttttttctttctgatttttaagaatagagaagctaaacaaacaaacaaaaacaggccaaacctaaacccaggagcagcatggtttttgaaatttcaggaagccaatgataactatccactaagagaaaagccccactacagaaaaactgtgggcttccaaggtggcactagaggtaaaaaaacaaccctgctgccaatgcaggagacacaagagatatggatctgatccctgtggcaggaagatcccctagaggagggcatggcagtgcattccaccattcctgcccggagaatcccgtggacagaggagcctggtgggctacagtctatagtttcacacagaatgggacacaactgaagcaacttagcactcatgcatgcatagaaaaactttagatatgaattttgtacaactactttgtaattaagagcattccctacaatggtagaatactatttaaaatagagctcctaaattattagagaagtaaaacattaacatagcaagaaacagccaaagtataatagagtatctctgtgtttaaacagaagcacacacacacaaaagtcaaaatatgcatattaaatgtagtgtcaactctataaaatagtactgctactgttcctttaattcgatgcatatgtgcagtaaggagtaagatactaaatctatcaacagggaccccattcacagtatttcctgaaagattatacttagagttttaaagtttaatggagtctgaaaatttcccttgtaacctgttacagacaccctttgactgtgtagctttaacaacccaagacagcatttggtttctaaaacatgtactactgaaatatttcattcagttgtactgcatctgattatatttaaaatttgtaaattcagacatctaaaatatttcaagtcaggtttatttgcaaagatgtttgagtttcaacttaaaggacaaagaaacatatgctaataacaaacatatccaataaattttcactacatttatatcatcataaaattagaacattttaattcctatttcatgttctaaaattttatttttgagtatctatgtatatatttgtgtacacacacaaaatacatttacagttcaaagctaatcaatgcaacatgattatctcatgcataattcatttggctaattcaattgtaagtaatgtttaaagatatttactataatatggaaaagttttgtgattatttttttaatgtaaaacccaaagaaaaattgcattaactcaagcaactactttatacagaaattttcacttattatacattttccacacacaaatattagaaaatcagaatgaaaaatcatcccagtaaatgataactaaaatattcaataattggattccttttcttcagcaataagacttgacaaacagtcattaaaaacccagaaacaaaagttactgaacttatgtttattgtgctagaagcaatagtaaagtaattctaattcaaaacataagcactatttgtagcaaaaaattgtcaagaaaaactgctattaatttaaaacttatagtttattgttttaatatagtttattgttttaactttctgtctaatagtatggtttgtgtgtattacaaagtagtaatgcacatttcagactcctctataaaatctgcttagcaagtggaacccatccaaagacttcctgttcagagattttattgactctctgagtaacacaaatctttacaattatatggccacaggactggaaatgatcagttttcattccaatccctgagaaaggcaatgccaaagactgctcaaactagcgcacaattgcacttatctcatacgctagtaatgcccaaaattctccaagccaggcttcaacagtacataaactatgaaattccacatgttcaagctgtatttagaaaaggcagaggaaccagagatcaaattgccaacatctgttggaacatcgaaaaagtaagagttccagaaagacatctatttctgctttattgactatgccaaagcctttgactgtgtgaatcacaataaactgtggaaaatctgagagagatgggaataccagagcacctgacctgcctcttgagaaatctgtatgcagatcaggaagcagaagttagaactggacatggaacaacagacttgttccaaatcaggaaaggagtatgtcaaggctgtatactgtcaccctgcttatttaacttatacgcagagtacatcataagaaatgctcggctggaagaagcacaagctggaatcaagattgctgggagaaatatcaataacatcagatatgcagatgacaccacccttatggcagaaagcgaagaagaactcaagagcgtcttgataaaagtgaaagaggagagtgaaaaagttggcttaaagctcaacattcagaaaactaagattatggcatccagtcccattatgtcatggcaaatagatgaggaacagtagcagagactttattctgggggctccaaaatcactgtagatggtgactgcagccatggaaacaacctagatgtccattagcagatgaatggataagaaaactgtggtacatatacacaatggggtattactcagccgttaaaaagaatacatttgaatcagttctaatgaggtggatgaagctggagcctcttatacagagtgaagtaagccagaaagaaaaacaccaatacagtatactaacacatatatatggaatttagaaagatggcaatgatgaccctgtatgcaggacagcaaaaaagacacagatgtgtatagcggacttttggactcagagggagagggagagggtgagatgatttgggagaatggcattgaaacatgtataatatcatgtaagaatcgaattgccagtctatggccgatgcaggatacggcacgcttggggctggtacacggggatgacccagagagatgctgtggggaggggggtgggcggggggttcatgtttgggaacgcatgtacacccatggtggattcatgtcaatgtatggcaaaaccaatacagaattgtaaagtaaaataaaaaataaaaaatgaaaaaaaaaaaagacacttactgtttggcagaaaagctatgaccaacctagacagaatattaaaaagcagagacattactttgccaacaaaggttcatctagtttttccagtagtaatgtatggatgtgacagttggcctataaagaaagctgagagctgaagaatggatgcttttgaactgtagtgttgactcttgagagtccattggacggcaagggattccaacctgtcaatcctaaaggaaatcagtactgaatattcactggaaggattgatgctgaagctgaaactccaatactttggccacctcgtttgaagaactgactcattggaaaagaccctgatgctgggaaagattgaagaaaggaatagaaggggacaacagatgatgagatggttggatggcatcaccgattcaacggacatgagtttgagtaaactccgaaagttggtgatggacagggaggcctggcgtgctgcagtacatggggtcacaaatagtcagacaataccgagtgactgaactgactgaactgagggaaaaaatgttattttcaatacgagactagtataaatcttgtctaattttaacaatttgttacgggccattattgtgcttttactttttcttgatgtttttatataaatgacaactgggatgttacttttgttagatggtatggcacattccatgatgcaaacccactcctattttattcccagggagcttattcagaaccatgagcatctgctttccttaatggaacaaagcagaaaactattcactgtgggtgggccataaaaagttaaggaaatcagaaaaataacggatacctttaaaaatatattgattttcaaggcattacttactatggtaacatttacaaaatccttaaaatcaagtgctaacaaaatagcaggatctaccatttcaagtttcttcaaatgtttttgcactagctgtgagagttaacagaagtcaagccaagaagtttgctttccagtagggttataagggtctgaaaaggaatatgtactgagaactctctgatgagaaataaaaaatgagctctatgaaggctttgataagggaaaactcaaggttgaaattaaaggaacaatatccagagcacctatttatgtctatttgtcatatgcaataaaacttgtgagagtgttatcgggattaattctgagtgattttaagctaatttttaaattaccttaatcagataaaagtaaattctttatgttaaaatttaaggttgggttttatagtttttactactgtgatgtggaaaatagaataataaaaaagacatatagattagaatcacagacctacacttgaacctcaactgtcagctgttgaacagccctgggctagatgcttaaccttgctggtcctcagttttctcatcataaagcagcaataacaacacctacacctcagggtggttgtgagattaaaggtgataatggatgaatgaatctaaaacagtgcttgacacaatactctaaagtcatattaaacttcttttcccctgtcttttttcctccttcccagatcctcaggaaatataaaataggtcatgaaaatacaacctatggtgtaggtttctctattaaacacttgaatggaacaggtgcactgttcaatgctcttacatttacaaatcattcatagctgagagaaggaggataaccactttcagtgaatttcaataagatcctatcttgtttttcctgcaaaaaaaaaaaaaactctgtttaccaagatactaaaaaacacatcagacatacctcaagttatttcagagtcgagagaaagaaaagaaaatagaatagaaggtgaatagacataaatccatagtcaaaaatccataatcaatttcagttaaaaatggtggagcgaccgtatgtattcatttcccctccctgatcaattttctttttcaacccacaatatcaaagtaaataaaatagaagatgcaagaagagaaaagactaatgtaaagtaagacaaccttgtaccagcaggaccagtgagtggctcagtacctggatgcaacaaggaaagctacaactcctccactcctccttaggcagtgagtgaaaaatcgctcaatcctatctgactctgcaaccccatggactatacagtccatggtattctccaagccaaaatactggagtgggtaacctttcccttctccaggggatctttccaactcagggatcgaaccaggtctcccgcattgcaggtggattctttaccagctgagccacaagggaagcccaggaatactggagtggggagcctagcccttcaccagcagatcttccgacccatgattcaaactggggtctcctacattgcaggtggattctttacaaactgagctatgagggtagattaggggtttattctacagagaagttaaatatgggagccccagagctgaggatgctggaggatgaacagggaattctgcacattgaattcttgacccttggtctctgggggaatagtactcttgctcacaggcaaggcattccagggtccttctttgagaaacagagactccaagagaaaagatctaaaatactgacttacagggaaaatcaccaggcactaaactctatccaaatgcagttttatatcaagtctctatttcctcttaagtaagaatgagctgcagaggattatcaactttagaaaaaataaaaaacttccttaggaaaaccagaaaaccacttccattcttatcctaaaaaaaagggtccaaagggtaaagagtcaattaagagagactctcccctcaaaaaacagttattaacgagaggaagactagatgttatatggacaaaagaatagactagtatgaccccaaataatgagaaggcaagaaaaaacttagaattaaacatgtaataacattaataactcaagagatggcttagacattgacaaagtttcccattaagtaaaaccaaatgatagagatagaacataagataataaaaacaaaagaactagaggatcaattcaaaaactctaatattcagtgagaaaaagttgaacaaaagaaaaacaaaggaaatagttgcatagatattaccaaagaaataataaaattgattttctcagcacaaatctccttaatgaaaaggcctatagaatgcatatggatttccctggtggctcagatgataaagaatccacctgcaatgtgggagacctgggttcaatccctgggtggggaagatccctagagaaaggaatggcaacccactccagtattcttgcctggaaaaatcccatggacagaggagcctggagagatacagtccatggggtcacagacagtcagacatgacggagtgactaagaacagcacatatcatagcatagaatgcctaacaaactaaattttaacacacacacactaagccacttcacacaatatcagaacaaggacaaggataccaaagtttcagtggcataggcacaaagtcaaaggcacttacaacaaggattcagaatcaccagatttctcaaaaggctaaagaataagataatgccttaaaattctgagggaaattatttttctgctagaagtctataactggccaagttatcaaggaaatatgaggactgactaaagacattttcagatttgcacaaaaggaaaaatgaatcccccatttttcatctttcaagaagatacagggaaaagtgctttcatataaaagagtaaataaaaaaaagtaaatgagatgcaagaaaaagtcatcaaaagaaattgagtgaaaagacctcacaggatgagagaatgatcagcaaggttaagttcatcctaaccagatcagagggagaagatcatggtttgggggtgggtggctctgggaacagttcaggaaagataaactatctgagcatttaggggaaaaaattcatagagcttttatataactgttcaagcttaagagaaaaaataacaattggaatgttaaaagaaactaagccaatttttaaaggatgcaattattaactctaggaaaatcaaagagttattcaagaaaggagcagtgattcaaagtacattacttgacttcacagtgacataagaataactattgactgaatcaaaattcatttggggtacttccctggtggtccaatggttaagaatctgctttacaatgcaggggacatgggtttgatccctggtcagggaactaagatacatggtgccatggagcaactaaacccccaggccataactactgagtctgcacggagaacactattcattactttatgaaaacatgaaaagcacgtttcccaatttacttttgacataaaattagaaggatttatttaactgacaaaggattaatctccaaaatatacaagcagatactcaatatcaaaacaacaaacaacccaagcaaaaaataggtggaagacctaaatagacatttctccaaacagatggccaacatggaaagatgttcaacataactccttcttagaaaaatgcaaatcaaaattacaaagaggtatcacctcacccagtcagaatggccatcaccaaaatatctacaaaccataaatgctggagagggtatggagtagagaactctcctacactattggtgggaatgtaaattggcacagccaccatggagaacagtatgctgctgctgctgctaagtcacttcagtcgtatccgactctgtgcaaccccatagacagcctcctaccaggctcccccgtccctgggattctccaggcaagaacactggagtggcttgccatttccttctccaatgcatgaaagtgaaaagtgaaagtgaagtcactcagtcgtgtctgactcagcgacctcatggattgcagcctaccaggctcctctgtccatgggattttccaggcaagagtactagagtggggtgccattgccttctccagagaacagtatagatgttccttaaaaaactacaaatagtactactatatgacccattaattgcactactgggctcataatctgagaaaaccataactgaaagagacacacgtaccccaaagttccttgcagcactatttacaaaagccaggacatggaagcaacctaaatgctcatcaatagatgaatggataaagaagttgtggtacatatatacaatggaatatcactcagccataaaaagaaataaattgggatcattggtagtgatgtggatggacctagagtctgtcacacagaatgaagtatgtcagaaagacaaaaacaagtctcatatattaacgcatacatgtggagtcgagaaaagcagtacaaatgaaccgatttgcacgacaggaatatagatgcagatgtgcagaatggaaatgtggatacaaagggagaaggagagggataaattgggagagtaacattgacagatatacactaccatggtaatatagacagataatggaaagtttctgtataacacaaggagctcggctcagtgctctgtgatgatctagaggaatggcatggggtggaggaggctcaagagggaggggatatatgtatacttatagctgattcacatggctgtacagcagaaacttatacaacattgtaaagcaagtatactccaataataaaattttaaaaataaataaaatgaatcctttcactggaaaaaaattaaaaaaataaaattcagatataagaatttaaaaagatatgtgaatccaaaatattacagaaaatagacgttctatacttttgcttaaaaatatctactgctatgataaataaaatgattcataaccctatcatatacgatacatattgggcttatactgatgtaagactagtatagaaaaagactaggtgactaagtgactgaattttgatgcaatattgattatattgggcacagtgtttatatcaaaggtggcattattctttctagctatattcttaacagttagaccatgtttgccaatgaatgaaattctagatatcagattttatgagaataatgataaggtgattctgatgattgaagagctgaacaaaatagatatatttaatgaggaaaaaagaaaaatagctgccttcaaatatttgccctgtggaggaggaatttgatgtattcttacttcagggtgcagaatgagttagagatgaatatttcatatatatcaacttcagctcaaaatacagaacagaaatcacataattttcctagaaagaagtgggttatgttatgtataatctccaacctttagaaatgttcatcaatatagaaactgtgtataattcagatgagaaacttaataatgtaagctttgtgaggtaggatatgaaagaggaaattgcaagtctttcccaattttaaagatataataccaaaaaatgtaagaaaacagtattttttaaaatatttcaaatattgcaatgatctaactcttcagacatatatatttaggggtttattttttaaattatattatttactaaaatgataaaatgaaattttctgcacacgtgaattataggacatcctttggttagagaatatgccatcctttaattcttaagaatttcaaatcaattttatattttgatattgccttatttactatgacataggtattgaatgaaatcctgaagttattcccagacttttaaattttaatttctgataaaatagtttttaaaaaataatctgctttttattacaacaaatgtaaaagaaaaacattccaactttaataacttttaaataactcttccagaaatttcctaagcactctatatggaaacattttcccaacagataaggaagtgaattttatttaaaagttttctccatattttgactttaaaagtaactataaagaaatcctcatagtttaatagtgacacagtcataaaaaacttgaaagtgaaagtgaaagtcactcggtcgtatctgactttttgtgaccccatggactatacagtccatgtaattctccaggccagaatactggagtgggtagcctttcccttctccaggggaatcttcccaatcccgggattgaacccaggtctcccacattgcaggcagttccttaaactgaagaaaatatttaatttcataaaatacaaaaaaaatctccagagcttttctcagtataagccataattttaaacggcctatttaatatatctaaataaataccatatccttcttagcacaatagaaatttagatatcaggattattttcatgtttaaattatgcatcaacaaaaataactagattttctatcaaagtatgcacacatattaaaggtgctgaaataaagaataagtgagaattctaaacttaataaggtcagaaaccatatctataaatgtttactgaataaatactatatagaaaaaatgtatgagcaaatacacacaaagattatttaaatatgcagtttatgttacctgaatgaagtagagttgtagcgtttgtagaactttagttctacaaaaattatatcaaaaagaaagcttcatctaatttagatctctttcctcaagatttttgatgttgttctgattctatggggtaccctgtgggtcagcagagatgagaagaatgcaatcttctggttgcatctaaaattaagatcttgcagcaaaatgctgacttggaaacaggagctcatatgaactctactgttcttttgagcttggacacggatgtgggaggagccaagcctggctatcttccctattccgagatgtgaaaatgctccaaatgcctaagaataaacagtaaaaaagtttccctcagatggaagggtgtaaactttggtggtagaacatggaaacattttttaattagtgtggcagtaaaaatttccttttattctttcattttcctatagactatattcccaaagagcacacatagtcatttatacagtataattggcacattttaattctcacactatatttaatgatatcccaaacatagtgaataatctttaatcacagaaaatgctttttggttctagctgtcagtttttttatgatgggtaacatctattataagaaagaaactttgtgaatgtttatattgttctttagttgctaagttgtgttgaactcttttgagacctttaggactgtatcccacctggctcctctgtccatgggattttctaagcaaggataccagagtggattgccatttccttctccaggggaatcttctcaaccctgtgtctcctatattgtaggtggatggcttaccattgagccaccagggaggcccaaatatgtttataccctgaaaaaaattacagcctataaacaaaaacggttctactgtggatgagcctttttctggcaattttaataactggaccaaatttatgttccccagaaatctgattacttgtcacagtattttcaattatgtttttatttagattttggaactaggttcaaaactgacctggaaaagggcagttttcattccaatccctaagtaatgcaatgccaaagaaagctcaaaatacttcacaattgcactcatctcacacgctagcatagtgatgctcaaaattctccacgtctgtaaagtaattaatctccaattaaaataaatacattaaaaaaaaaatctccaagccaggcttcaacagtatgtgaaccgtgaaattctagatgttcaagctggttttagaaaaggcagaggaaccagagatcaaattgccaacatctgctggatcacggaaaaagcaagagagttccagaaaaacatctatttctgctttattgactatgccaaagcctctgactgtgtggatcacaataaactgtggaaaatgctgaaagagatgggcataccagaccacctgacctgcctcttgagaaatctgtattcaggtcaagaagcaacagttagaactggacatggaacaacacactgcttccaagtagagaaaagagtacatcaaggctgtatattgtcaccctgcttatataacttctatgcaaagtacatcatgagaaacgctgggctggatgaagcacaagctggaatcaagattgctgggagaaatattaataaccccagatatgcagatgacaccaccattatgacagaaagtgaagaggaactcaagagcctcttgatgaaagtgaaagaggagagtgaaaaagttagcttaaagctcaacattcagaaaacaaagattatggcatccagtcccatcacttcatggtaaatagggaaacagtggaaacattgacagactttatttttgtgggctccaaaatcactgcagatggtgactgcagccatgaaattaagatgcttattccttagaaggaaagttatgaccaaaatagatagcatattcaaaagcagagacattactttgccaacaaaggtctgtctagtcaaggctatggcttttccagtagtcacgtatggatgtgagttggactataaagagagctgagcactgaagaatggatgcttttgaactgcggtgttggagaagactcttgagagtcccttggactgcaaggagatccaaccagtccatcctaaaggaaatcagtcctgaatattcattggaaggactgatgttgaagctggaactccaatactttcgccacctgatggaagaactgactcattggaaaagaccctgatgctgggaaacattgaaggcaggaggagaaggggacgacagaggatgagatggttgggtggcatcaccagtcaatggatatgagtttgagtaaactccgggagtttgtgtgggacagggaagcctggcgtgctgcagtccgtggggtcacaaagagtctgacacgactgagcaactgtactgaactgaactggaactaggttaaagttatatttcctgctattgataaattacacattataacaaacatttgcctctaatttatgatagtcataattaaatgtataatttgtgttgttttcgtcttttcttcagagaaggcaatggcaaaccactccagtactcttgcctggaaaatcccattgatggagcagcctgatgggctgcagtccatggggtcactaagactcagacacgactgagcaacttcactttcacttttcactttcatgcattggagaaggaaatggcaacccactcctggagaatcccagggtcgggggagcctggtgggctgtggtctatggggtcgcacagagtcggacacaactgaagcgacttagcagccacagtattttcttaaccagtaatatgtacttaacttgcaatatgtactaccttctatctcttgatacatttgtatttttaccctccacatttagtgctgtgtaactatcactaacacattctaactgttatataaatatccagtacttcttagtagatcagtgataatacatatcaaaataatggaatctttaagtaatgagctctatgtcaaccactttacctattgttccttttaatactaaaaaatgtcctctttagataggcactattttatactctaagaaacaatatcttagaaatgttaagtaactttccaaaggttgctctgctaaacaatagccattttaaccaaaacctaggcatgctaccacaattcttaatctcaagatgtaggaaagacttaatatttaaagattcaggaggcttaagaataatagtattgcttcaaagcttttttggtaaatgaaaaattatatttctcttggtgaactaaagattatattctcttacatgaaactaatgtaactaatgtaaggagcagcagctacactttgctggagcaactgtgaagagataccccatgcccaaagtaagagaaacccaagtaagatggtaggtgttgcaagagggtatcagagggcagacacactgaaaccatactcatagaaaactactcaatctaatcacactaggaccacagccttgtctaactcaataaaactaagccgtgcccgcagggcaacccaagatgggcgggtcatagtggagaggtctgacagaatgtggtccactggagaagggaatggcaaaccatttcagtattcttgccttgagaacaccatgaacagtatgaaaaggcaaaatgataggatactgaaagaggaactccccaggttagtaggtgcccaacacactactggagatcagtggagaaataactccagaaagaatgaagggatggagccaaagcaaaaacaatacccagctgtggatgtgactggtgatagaagcaaggtccaatgctataaagagcaatattgcataggaacctgaaatgtcaggtccatgaatcaaggcaaattggaagtggtcaaacaagagatggcaagagtgaacatcgacattctaggaatcagtgaaataaaatggactggaatgggtgaatttaactcagatgaccattatatctactactacgggcaggaatccctcagaagaaatggagtagccatcatggtcaacaaaagagtccgaaatgcagtacttggatgcaatctcaaaaacgacacaatgatctctgttcgtctccaagacaagccattcaatatcacagttatccaagtctatgccccaaccagtaacgctgaagaaactgaagttgaatgattctatgaagatctacaagaccttttagaactaacaccccaaagagatgtccttttcattataagggactggaatgcaaaagtaggaagtgaagaaacacctggagtaacaggcaaatttggccttggaatgtggaatgaagcagggcaaaggctaatagagttttgccaagaaaatgcactggtcatagcaaacaccctcttccaacaacacaagagaagagtctacacatggacatcaccagatggtaaacactgaaatcagattgattatattctttgcagccaaagatgaagaagctctatacagtcaacaaaaacaagaccaggagctgactgtggctcagataatgagctccttattaccaaattcagacttaaattgaagaaagtagggaaaaccgctagaccattcaggtactacctaaatcaaatcccttatgattatacagtggaagtgagaaatagatttaagggcctagatctgatagagtgcctgatgaactatggaatgaggttcgtgacattgtacaggagacacgggatcaagaccatccccatggaaaagaaatgcaaaaaagcaaaatggctgcctggggaggccttacaaatagccgtgaagaagagaggtgaaaagcaaaggagaaaaggaaagatataagcatctgaatgaagagtttcaaagaatagcaagaagagataagaaagtcttcttcagcgatcaatgcaaagaaatggaggaaaacaacaacagaatggaaaagactagagatctcttcaagaaaattagagataccaaggggacatttcatgcaaagatgggctcgataaaggacagaaatggtatggacctaacagaagcagaagatattaagaagaggtggcaagaatacacagaagaactgtacaaaaatgatcttcacaacccggataatcacgatggtgtgatcactcatctagagccagacatcctagaatgtgaagtcaagtggttcttagaaagcatcactacaaacaaagctagtggaggtgacagaattccagttgagctatttcaaatcctgaaagatgatgctgtgaaagtgctgcactcaatatgccagcatatttggaaaactcagcagtggccacaggactggaaaaggtcagttttcaatccaatcccaaagaaaggcaatgccaaagaatgctcaaactaccacacaattgcactcatctcacacgctagtaaagtaatgctcaaaattctccaagccaggcttcagcaatatgtgaaccgtgaacttcctgatgttcaagttggttttagaaaaggcagaggaaccagagatcaaattgccaacatccactggatcatggaaaaagcaatagttccagaaaaacatctatttctgctttattgactatgccaaagcctttgactgtgtggatcacaataaactgtggaaaatcctgacagagatgggaattccagatcacctgacctgcctcatgagaaacttatatgcaggtcaggaagcaacagttagaactcaacttggaacaacagactggttccaaataggaaaaggagtccatcaaggctgtatattgtcaccctgcttatttaacttatatgcagagtacatcatgagaaacgctgggctggaagaaacacaagctggaatcaagattgccaggagaaatctcaataacctcagatatgcagatgacacgacacttatggcagaaagtgaagaggaactaaaaagcctcttgatgaaagtaaaagaggagagtgaaaaagttggcttaaagctcaacattcagaaaatgaagatcatggcatctggtcccatcacttcatgggaaatggatggggaaacagtagaaacagtgtcagactttattttctggggctccaaaatcactgcagatggtgaccgcagccctgaaattaaaagacgcttactccttggaagaaaggttatgaccaacctagatagcatattgaaaagcagagacattactttgccgactaaggtccgtctagtcaaggctatggttttgcctttggtcatgtatggatgtaagagttggactgtgaagaaggctgagggccgaagaattgatgtttttgaagtgtggtgttagagaagactcttgagagtcccttgcacagcaaggagatccaaccagtccattctgaaggagatcaaccctgggatttctttggaaggaatgatgctaaagctgaaactccagtactttggccacctcatgcgaagagttgactcattggaaaagactctgatgctgggagggattgggggcagtaggggcaagggatgaccgaggatgagatggctggatggcatcactgagtcgatggacgtgagtctgagtgaactccgggagttggtgatggacagggaggcctggcgtgctgcgacttctggggtcgcaaagagtcggacaccactgagcgactgaagtgaactgaacatgaaactaatactaaaccaagttataaaccatcaaatgggtttttcaatctgcagtttgtaatcctaatactcttcaatctttgacttattgccccaaatatttactctctttaaacccaaacttaattgatctgataattatcaaccatgacttttctcagctttattatcttgacaatacttgacaaggttttctcttatacatcttttcctcccatttgcgaagtccaatagttccatgaatctgtcctctaccggcttcatctactcctgtgagctgtgagtcatctgtaaatatgtgataataactgaatggtccctaaatcatcaccctaaatttttagaagagtcctgtcctggatttctgtagtctctcatgttctgaatgttttcatgatgagaaatgcctattacaaatcttcctaagacatcattagcttccctggtggctcagaggttaaagcatctgcctccaatgcgggagacccaggttcaatccctgggtcgggaagatcccctggagaaggaaatggcaatccactccagtattcttgcttggagaatcccatggatggagaagcctagtaggttacagtccacggggtcacaaagagttggacacgactgagcgacttcacctcaccttaagacatcattgtgatcctactccaaaaaattcgatggcatataaaaaagaaatttttacagaaatttcaatttttaaaactctcaagtataatactcattggtcttccttgttgttgcccaactcatatttctaaccttattcctgccccttgtctctcacaaaccaactgacaccagtcaaatgaaactacttttttggcctctggctttgctgagcacgatctccaatttggcacttcttttcctacttaaatcctatctctctatcagggctcatgcctttttcagaaagtcttaaatttctccaactggatacataatattttctcactttccatgacatttatttctgtcttgttacagttatttgtgtgtgtatttatttttccctgaactgtgagtcctttgaatacagtatgtcattcttattcatctcgagcttttttagcccagtgcctattaagaatggactctctataaccttgaatggattgatgggagatttttttggcagctcagtagccaccattcccttcacagttacttccaaagtctctgagtttccctgagtcacaactgcaaaatgtcgaaagattgaaaatagctcagagtggtcttagaggatcgccttagagcacagtaacaactggtatagaagaatttgttatgtgatctaccaaaaactttgtaatacttcattgaactatcacaaatatatgaaaataatatgatatatatataatgatatatatacaaagctcatatcacaataggacatgatagagtaatttcctaccggatttaggtacattggtgagaagtacaatcttaggggtgggggagtacaaccaggaagcagatgatagcgtctatgaaaacaaattacataattccagtctttactgtgtagagtaggagattttagagatgttactgaacctttaagttttaagtgtatcttagagacaaggtgatacaatggagtacccaaaacatttttaataatttctgttcacatttgtttttacctaaaaaagaaaataagctttcctgtatggagttgtatgtcagcctgatatgtcaagcatataatacatcaggtaccctggcagggaggtcatcacttgcaactcaccttcagtgcactcaccacatgtcacacacacccactgagaaagatgcacgattatggttacacatttatacatttgtaacactctaacgagatgagtgtcatgacacactgctgctgctctttcttctgctttgggcccagtgtgctaaatcacttcagtcatgccagctctatggactgcagccatagtgtattgactatgtgtagccatgtgtagtctgcatgactctatggacagtcgcctgtcaggctcctctgtccatgggattctccaggtgagaatgctggagtgggttgccacgcccttctccagagttttacacattgtattcaaagtaccaaatgggctcatgaagatgaagtaattactaactctattataaaacgaggcttgttcaaaatttgctgaattttttctatgataatgataaaaatgtgataactggcacttaaaaaaaatagactaataatctctctttaaggcaaaggagacatttaacactggatgagaaaacactgcttttggggacttccttggtggtctggtggttaagactctgaactcccaatgcagaggatctgggttcaatctttggtcagggaactagcgcccacatgcctcaaccatgagtttgcatgccacaactaaggcctggtgcagcaaagtcaataataataataataataactgcttctttcaaacccttcttctaaatgcttggaagtatttctagtgttatgggatttgttactataaatataccaactacaaaaactctcaattgtatttaaaactttgaagcaaaattttctaatatctttacattgtttccaaatctttcaaagtttcactgagttttaacactatttattaaaatacaaagatataactccttttagtataatagttttcaagaagtgaatgacagaatggaaaatggaaatttgtcaaattttaatacatttttttcaataactagaatattggatttaaattgaattactactttataacaggaacattcagtggtaatgctacatggagatatgcacttttgcaaagtaattttttcagctatggaagctattgaaatcacatagtagaataaaccagacttttgaaccacttaactgtgctgaacaaagatttcaaactaatgaaaataacgaaacattctaccactttttaaaaattagatgactataacaatagctcactattgaaaaaaatagagaaaaattttgttatccataaaattaaaaacatattaaatattcatcttatcctcttaaattcttatttgtatcttctataaattatatttatatgttagtttatgcttgtaatgtatagattatataatactatataagggcatatgatcaaactattttactgagaaatatacatataattaaaaaattagaaattaattgtatagaaatgtcaaatagactttttaaaatattaatgtttgactttgtgttaattatataggcactaaatcttattctcaagctaccaaatgttgataaaaaattataacaaaaaagagtatctaataaatatgctaatttaatgtctatatatcttatatatatagttttatatagcacatagatattgtagaatactgagactacgttcttctaaacatttaaaaatctatttccagagatcttaaatattctgaagcactatgcctggaaaaatagaattacaatagaaacatgattgtctattttttaatattaagaaaaatacatatatcaccatttaatgatatactttaactttagttaactacaaactatagttaagtatgaactatataaacttttagttaactacaaatgtaatgataaagttaactttttagtgatttcaaattacattctaacttcactcaatcaaacacacatacaagtgtcttctttgcattctcatcatcagattgtctccttcagttctgcctagattgcacatgtcaaacctgcaaggcccacttgtgcctctaaagctgtcttcaaagcatcacagctagggcaaactatagtcagtccacatcctcccttttggtgattcatgaactctatgcattcacaaaaaaagaaaaagatgttgcaattacacaaaaacgaaagtattcttctagcatagagacttcaacaccactcatctcttgccaggttgtaatggaatatgtcatactagtttaggctttctaggaggaattgttggaataataatcatgttgtcaagtacaatcctcattacaaattctcgaataattatagtctactaagcccctaatattatgagtcttcactattataaatcaccaggttgttactggaaagagacaggaatcccattctgcttctgataatctagtacattcaccaccaaactgcaaattccttgtacacagagattgtgcccgatttacttctagtgactaacacaatgcctataacatgtagggaatgcttagaatttgggggagttactgaatgtaccatagaacggtatggaaatgtaacaaatagaaacattatttcagtagatttccatgataaattggtaatgaagtaaatttccagccctttgctatacttctgtgtcttttccaaatttaagaaaataaccaattactatagttttactgaacattccactttacaaagaattgacagcttcttgaaaccatttccccacacattaccttgttcccctggctgctgctggacttaggagccacagaggcagtaacaagttcctttccaagtgcattccaccttgagtgggagcccaacccctctgctcagaccctcaatgttcttttgttacacaaaactgttaaattgacaaactgcaaatttactaggtgtgtgcagctaccccattttgtgcagctcatttctgaaagtgtttttatttgtcacattccattgtatcttaatagaaatttagtcatacacacatacacacacacgtatagatatatatgttttaacacaatgttacaggagggtactattttataaagaaatgctttgggaaaagcactaggatcaagacggttcaagtaccaagctttcatcttttaaaaaaatattttctcaattttagaagaaaaaaacaatcttaaatgaaaaaattattctctttacttctgttggatcatcattaactccagaaaacaatggaatgcacattattgtcttaccaaatatgaactgattttatgtacagaatgaaaacattctaggaaaataaatcacttaaatgaggcctatgaggaaatatagagaaattaatataaatttatttaaagagcatttgctaaaatagtctatgttacatgtagtgcccctcactttatcaaagaaaaataaaaattttactcaccttttaaagattatcctgggcatgagtacatctattaatttactaagtaagtttgtttacatcataaatttttattcattatttataatatatgaatattaaaattcctagtatttaaaaatttatagctaaacaataaatcttatttttaaaaaccaatgttagtttctaataggattatataaaaataacagtagcttatatacatactcagtaaaattatgaaaacatatactattcaacaattaaatgtttaataagaaaaattaacaatttgttattttaaaaaaaccctcaaaagaaaagaggtattctttacaatacagaatcggttcagtgacttaaaacattttagatattggttcaaggaataaaaatacaacatacatgtgaattaagaaaagcacaaggccaacaacatcattaataagcaagggttaaaatacaatcatttcacattgactagtcacaaaaatgcagtcattaacagatatatgttaagattattttttctttaatcatgcttatagattattacaacacaaagtttccaacatggagaaaatttaaatgtatatttacaacttcattcctagctacatttaattatttagcacttggtattttaattttactttaaaatgaaaagtgtttaagatttcatgtcatttatatatgtatacttatatacatacacacatattttctcacttttctaacttagtaaataggatcttctgaaattaaagttatgcattaaagaatattaacctgatatgttaataagaggtattctgaaatctggctaatacatagcaacactgaaagaggtaaattaaaatgttataactggttttaacaataaaacttcagatcaattaaacccttttaatataaaaggctaatttaaggattaaaattctttatataataagaaattcagaaactttaatgatatatatttactttattaaaagttaataaataaaattattgtaattttaaaattatcttcaatttatcaaaagttttacagttctttactagtgcaaagactgaattaatcaatgaactcatttgtgggatatacatgtaataaacaatgaagaattatatacttctgttttactattttgtaatttgaaattattgttttcttggtcacttgtttttgtgaggttgacaaagttactctgcaaagggtctttagtgaacattcgggtttttcacttatgacataccaaaaaatatcatgatacaaattattggaatatagcatttgatgcaatctaacacaatcaaatttttgtgaggttgtacactttaaacttatacaatatgactacatatctcaataaagctggagcaaaattatgtaaacactatagtgaatatgtagaaaagattgataaaccttaagatatttgaaaatattaaacaaaggatcacaaaatctaaaactgactccaaatgaatatttgcaattccaatatgctataaatttaggtgtgtcaaatttttaaagtttcatgatgtttattaaatagaacaggaatcaacaaactttccccagaaagaccaaatagtaaatatctcaggctttgagggtcagtctctattgtacaagaaagtctctgttgagtctaagaaagtctcaaaagcagccgtagataatacataaaaaatgtgtatgcctgtgttccaataaaagttgtttataaaaatagacaatgggccaggtttgataatttgctgatctctgatatagaagatctaattcaaatcacttaattttaggaacttcaatatatagcacaaagcagaagccatgagtaaatgttgaatgctttgtgaatgaatgaattcatgaatgaatagggaaaataaaacctttatgtctgctgtcccaattgaggcaaattccaagaaggcaatctatggattaagtcttactaatgactaggcttataattaaaccaataaaacaaaagaaaacataacagatatagtacagagaaagtgaatttccaaccaaaaatgactaaccaaaaaaaaaatctatagtgacttcttacaggacttgaagtctctccaattagattgtaaactccatagggtaacaaatatgtctttatattatcatgacagtatagtccctaggatatagcagatggtcagtgaacattttaagtacatgtgaatgttttccatagcaaaatgcttttgttagttccccaaaagttatggctctctaattctaatgcagcaatttaagatcttcccataaagttaaaatgctctgctgttttgtatcagtcatagtgactaaaaagatgaatttagtctgaattagaacttgacctattcttcaaatagcatgaattgaaacaggtttacatttcactgtaaaactttgacctgggtgaagcaaaacaagtgcatacatcaggttcaggtataaaatcagagttaattattttccaaataaagaactgtttaactttataatcttaattataaatagattataggctccaatcattttatcactagaaagaagtgtacttggttgtttgtatttaaaatatcaaaattgatcataatgctagtttcaatgtatctatatattaattattcttcaaagcctgggtagttgaaaaatactagaagaaattaataattcatggctatttatgaatttttgtctatggcttcaaaaaataaaaaattaaaacagcccaaaacacagtaactccacacagtggaagatatgaacattcatataaattactatataaatcatactttttcatgatgtatgtaacaaattgtaaacaattaatttactttgtgtaagtaaatttctcttttttaatacaatattttcacatttccaaactattaaagtttaacaatgataaaaatgttatttgcttttagatcagttactggacattgacagacaaaagccacaaatagttatacactcaaacaagacacagccttaacttgccattgttacaagcacaatgttaacattatgtacaaatgtaaatagtaaaacattttcaattaatttgtggcaagccaaaagggtactggagaaaaacacttccattagattagtgctatggttcaaaattcacttataaaaattaaatacatgtaaaactattatatatatatgtatatattacagtacttgaatgaattctctttcaaactgtcaaatttaatgacataagcctcgagggccaatggtctgctttaaaaaaatattggaagataaaatgtgtgcatcacaatttataaagagagaaaattaaagaaaaagggacagaataaaacaaaacagaaggataaaaataagagtactatcgtaccgatttccatggtccccgatgccatgatacgtcatcagggcaagcatgtatatgacactgtaccacactaggtggcttgttcaacatttcacagttttgctcttgtgacagttggccattgggaaactggcatattacaaatcttgattttattcctcctccacatgtttgtgtacactaaaaataagaaggaagataaaaactatgtggcttcaaaaagaatattatgttggtttattcagtggagtacataatcagaactgctaaagcttaaagtttatcctttcttcataaccctcaacatttcttcaaaaataaatcaaagtttcggttccatcctttttttttaaaagacaaaattttgaaaattagtactgtaataggtaataactacataatgtatatggtatcctatcaaaagatacacagtcatgtatccatgaagggaaatctaaatttacaaagataaaaagatgttgaatatacctattacatgagaacagcaggtggcaaagcagcatgtataattaatgaagctacttctgaaacccacacagaactaaagtctggcaggaaattatcaaatattaaaagttcgtatcttttcacaatttttcaaattatttgaattttcacaagaattaactcacaactgaaaaagttactttccttttagaaaattgtaaaagtatattttaaagacatactttatatttattagcacccgatcagaagtgtatctttaaacaatgatttccaaattccctatggagagaaaataggtactgaaaatcattaaacaggggacttccctggtggtgcagtggataggaaacctgctaccaatataggtagcaggtttgatccctggtccgggaagattccacatactgcagagcaactaagcctgtgcgtcacaaccgctgagcttgcgtagtgccaattactgaagcgcatgcgcctagagcctgtgctctgcaacaagagaagccactgcaatgaggagtccgagcattgcaataaagaggaaccccagtttgctgcaactaaggaaagcctgagcgtagcaacagagacccagtgcaatcaaaaataaattaatttatttaaaaaaatcattaaacacaaatgtttgactaattaaattaggtggcttgttttatttatccaaagccaatgaaagtctttcttctttctcatgcataatataggtggaattagtattcattacaaccatttaaaaaattatcctcatatcccagtacctaaaagaaggtcaggacatgaagaaagtgctaaataattgatagctattcattttagattcgtaaaatgaatggttccataataggatattaacatggcctacatatcattctatttttctgtctttatatcaattaattttctaagaaattaagataataatatactagttttagagaggtattaggaagttacctactggctagcacatagcattctgtcaaaaatctggagtatatatttcctatcataaatgagtgatttataccatgatacaatgtttattaaaagattatagttttagtgactcaatttttaaaaaatctgtctagtatagtgaagtaagattattcaacagtaagggtatgaagtgcttaacttttggtcttaggggatgtcataatttccacaagtttaggagagagtaggacttacttctccccagcttccgtagttccactgtggacaaggtcctgaatcacagtgctttgactctgggggtttggacgctgcatcacagtaactggcactttgtccattttcatcctggcagaccacaactctacgttgaacacctccagcacaactgctagagcactggaaaggatgaaacacaggaacacacaaactgaagattccatgtcacaaaattatattataaagcactaaaataaaagaaaaccgaagattccatgtcacaaaattacattataaaacactaaaataaaagaaaaacagctctttgactcaacttcaagctcgccaaattaccgcccccactttggaatcataatttgaataaagaatatctgtcaaaaaaacctatggtttcattaaaatttattgataggaaggtaaatctttaaagtttgcaataaaaaaatcacccttgtcctaggcattaagtaaaaaggaattcaagttttcaggtctcactaggaaggaaaaaaaaaaaaaagataatgttaagtttcccaactttcacgttgtttttctttatttggtatcattaatctcataaaaaatacaaaccacaattgtaccttttgtacaaagtaatcatggttttacaccagtttactgcactgttatcatagttaatttctgggtttgatttttttcttcatagacattggtaatcttaacacttaaaacatttcatttttactataatggactctaagatttttttcaaatggattcctctgtaatcataatatcacattagggtataattcaattagaacactatagagatttgcaatctgcatcaaaaattgcttaatctttttaagatttaaactactgatcttcagaaataattagcattaaaagcatctgatgtcattatgtacatttctgttaaaaggccatataacataacaaaattacagaattagtataactcaataaagagggcttactgatccccatggtcctgttctccactggttttctctgattgatggatggaccccctgattttgattatcttctggtttgtgagttaatggaaaattcctgcctggaaaatggcttggctgctcagaggaactcggaaagtggctgtacgtgggagggcaggctgccagattacattcttgttctatcacagggcggacttcggggtcacagtaattctcattaactggctgatgatagttgatgcataaagcttgtcgagtcatttttccacggccacaggaagctgaacactgatcacaaatttagccaataaactgcattacctcaaggttcaaatattatatttaaatttctcatttcacttttttttgcaaaaaagtacttacaggtgaccaattccctgtttgccactctccacaagggctaaaacagacagctatttcagccggtcggggtaagtgggcacaaaatgattcatctgctattccatcgagagcatcacgacaacttacatagcgggcttgatttcctcttccacaagacacggagcactgaaaaattgaatcataccagagcattatacaggacactcctacatccctcacacttggtgttcaaatttctaaatctcaagattcttgaaaaaacttaatttataaatattatcacctggcatcatttctgagtcaaagacagggcagtgaatatgccaatgagtttaaaaaataaacttcacaaatcagatgcttgtgataataaaacaaaacactcaacttctcagaatagtgattagctatttgtcaaaattaaagaaaagattatagataagagaatcttaagataacatttaagacaactctgaaagacctaggtaatagagaagataggatctcataattaaaatattcagagaatatatgaaacttaaaaatatatctttcatataagactaaagcaagtgtatattccaaatctaataaaagtctaatatcacatctgcttctcataacaacctatgacataaatattatcattctcatttggtaggattagaaaacagacctagaaaacttaaattcttgcccacagaaacagagctcttcaaagacagaacaggatttagtcattaaattacctaattctaaaccctatgctcttccaacaccatctccatcaaaatacctgagaatgaatgcatatattaatttggcaaatctggagcaactgaaagcctccatagtagaaatactgtctctcttaaagaaattcacttactggggtccaagaaccatatcgccattgtgttatctttctcatgggaacagctggcaaggaagtggccccaattttagggataactgggcaaggtgtaacaatacaattctgtttgaaagaaaaatggacctcatgaaacattaatgaattaaccactatgattgatactaaatcctatacttcatttctcctttcaattatataagtcaagaacagctgcatagtaaactacaaataagcgatgtaaaggtttttattttccaaaagtacaaagtactatcaagggctagaagtggatagtatgactctgaaggttaaagtttggatcattctgcctgatgatttaaaaagaaaagagtaataatcttccaaaaatatcactaagctgaaaccttctgcatgaacacagatcactaccttaagctacacttgagaagttcattatgctcataaggcatcatccttctatagttcaaaggatggaaacataagttaaatgagtgatccaatatcagataaagagtaaaaacaaatccatcaataaagctggcaaaaccaagaacaataaactctctatttttaaggcatatatgtttaagtggaaaaatatatatggaaataattttaacacatcaataatcttcctgtatcaaacatttctgtttataatccatggagaggtgtcgtttacctgcctttcacttgggcgactagctccatggcacagtctgtcatctagcactgtgctaaatagctcgttgacacacttcacagcacgcatctggtacccctgtccacacgtggctgtgcactggaagaatataagcagatacaaaacaccattgctcagacattacataaacttaattttcttaacatgtacacagttaagaatctattttcagtagatatttttattagtcctttattccagattctagacttaaaatgaagaaatttaatcaacatatatctttattcaaatttatatagatactaataaaataagcaatgccaaagaatgctcaaactgccacacaattgcactcatctcacacgctagtaatgtaatgctcaaaattctccaagccaggcttcagcaatatgtgaactgtgaacttccaaatgttcaagctggttttagaaaaggcagagaaccagagatcaaattgccaacagccactggatcatggaaaaagcaagagagttccagaaaaacatctatttctgctttattgactatgccaaagcctttgactgtgtggatcacaataaactgtagaaaattctgaaagagatgggcatatcagaccacctgaccggcctcctgagaaatccgcatgcaggtcaggaagtaacagttagaactggacaacaaactggttccaaataggaaaaggagaatgtcaaggctgtatattgtcaccctgcttatttaacttatatgcagagtacatcatgagaaatgctgggctggagaaagcacaagctggaatcaagattgccgggagaaatatcaataacctgagatatgcagatgacacctcccttatagcagaaagtgaagaactaaagaatctcttgatgaaagtgaaagaggagagtgaaaacattggcttaaaattcaacattcagaaaactaagatcatggcatctggtcccatcacttcatggcaaatagatggggaaacagtggaaatagtgacagacttcattttggggggctccaaaatcactgtagatggtgactgcagccatgaaattaagacgcttactctttagaaggaaagttatgaccaacctagacagcatattagaaagcagagacactattttgccaacaaaggtctgtctagtcaaagctatggcttttccagttgtcatgtatggctgtgagagttggactataaaaaaagctgagcaccaaagaattgatgcttttgaactgtggtattggagaagactcttgagagtcccttggactgcaaggcgatccaaacagtccatcctaaaggaagtcagtgttcattggaaggactgatgctgaagctgaaattccaatactttggccatctgatgcgaagagctgactcatctgaaaagacccggatgctgagaaagattgagggcaggaggaaaagggaaagacagaggatgagatggttggatggcatcgccgactcaatggacatgagtttgggtaaactccaggaggtggtgatggacaaggaggtgtgctgcggtccatggggtcgcaaagtgttggatacgactgagcgactgaactgaactgaactgaaaatagtgaaattgaaatggcaattattattgtatctttaaaaagttatcatgtaaaactatcaatagaagcttcatattttggtggcagaatcaatacagtttaggcaaactaaatacttttcaaaattgattggtatatgcatgccacttaatatactaagtcaattttgaagagataaagaaagaaaagaacaggacagagttaaagggcagaagagagcaggtttcctggcaagcgtagcaatctacacagaatactaaactgcccacaactcatccatcagattatctcctagccatctgtttggcaaaacttcccaacaaggcctactctaaatacagtagagagaataatttaggcaccaaacatgaaaatgcatagtttacataaagttgatgaaagcataaattgtttattgaagtacagttgattaacaatgctatgttaatttctggcatatagcaaagtgattcagttattcatagatatattctttttcgtattcttttctattatggtttatggcaggatactgaataccgaaatttatagtattgtggttaacaaaagagttaaaagtcaaagctagaatatttaccacagcaaaattagcagtactgaaaaaattgtacaggtacagatttacatttcaggaatctttctccaacagccaccccaaaattagatgcagccactaaaagactgcatatacaataattctgtgctattctgtaatgatggattagagcagaaatccatatactgttatatactcacagaaccccaaggtcctacttgccaggaagtacatgcacgaagctcacagggcctctgagactcaggcttggtgcttgggtcacagaagccaccactcaagtgatcttcatccagttgacaccacacctgccgctgctttgttccttttccacaggtaaccagacactggaaaatacaactgaccattactttcagtatcagtcaacacaaatacccaaaaaaatgcaatgatcaatttgtatattcaaatatacaaaagcagagaaggcaatgacaccccactccagtactcttgcctggaaaatcccatggacagaggagcctggtaggctgcagtccatggggtcgctaagagtcggacatgactgaacaacttcattttcacttttcactttcatgcattgcagaaggaaatggcaacccactccagtgttcttgcctgcagaatcccagggatggcggagcctggtgggctgccatctatggggtcgcacagagtcggacacgactgaagcggcttagcagcagtagcagcagcaatacaattaaagaccatccttaaagacactttccctccatgcctcagaaaaaccagagatattcatggggtaaaatccgcgactccaaacttctgctgcccaaatcccagtgcaacatctatttgttccagaaataaaggtacaaaactgacttagaacaagtatgtatctcagcctactgtgtacaccatgaaaatgtacttattcactcagtcgtgtctgactctttgtgatcccatggactgtagcctgccaggctcctctgtccatgggattctctaggcaagaatactggagtgggccaccattcccttctccagaggatcttcccaacccagggatcgaccccaagtctcccaaattgcaggtggcttctttaccatctgagccaccagggaagcccccaggaaagcccactatgaaaatggttatagattaaacaccaattatgtcattgttggccagacagtgtaaatagcttaaggacaaaccatttttaaattttactaccttgataatacaattatttactaactgataaagcaaattgaaatattttttgaattacatagccttccactacaaagatctcctttacaatgttttaatagttctaagcctcaagtgcttaatgttacctcactccactcattagtggcccaactgggacaggaaaattcattgcaattctctgttgtcactcggggaagttcctggcattctctgtcagcaagacggtggccaaagttatttatacagtaagattctcgagacctctcccctcctccacaactcctggaacactgattaaaaaaagaaaagtggtgaaaaatggacgcaaaataaaaattttaacaaaacatgactctgaagtgacagatatttaattagatgtaaaataaaggagcaacttttcttaagctattcttttttctttgtacctgagaccattctaaataatgccaccttgttaagacacagtcaccatggcagggttctcgggttggaggtttaagttggtcactgcagtagtggtcatctactggaacagtctgtcctttatgaatggaatacttcatacaatggacgtccaatgacttgtatccttgaccacaaagggttgaacattcacttttgccaatgatgtgccacctacaaaaatgatgttattatgcttaggaggtatgctgatgaacacaatttaaaacatggactcagaaaaattcacacatattattcaattttaaaaattatgttagaaattatggacaagccacaataaaaatatttgatatatcattgatttagtgatgaaaacttcttagagatcatagagtccaaactttcatcatatagatgagaaaatgaagcccagtgatgctgtgcattcaaatggtagatatgcttggcttctgtcagaaattttacttttctctaaataaaatttaacatttattccagatccataaaagctggaggtagggaaccagcactacacccaggcatttggaggaaccccaagcctcaccctagaggaaccccaaggaaatgtgtgttctcttcctaggaatcccaagcctctccctagacttttaaaaacaattggttgagattaagattgagattaaggttactaagtggcagatttaaaattgtaaccaaatatatctgatctataatcaggtggtgtctgcctgtgcaacatctttatgtgactgaggatcacagaacatctgagcacatgactacatcaaaagcgtttaaaagttggtaaacttgccttcgtaaagcatgtcacatttgctcattacctgatacaatctacttttagacatgctttcaaagagaacattttttttccacaagtaaaatctgctagcgttagcaaaattatcccaattacactctagcaatctctcagacagtatgagcgcagcagtacagcaaagaagagaattcatggagcttctttccatctgaacagtatctcaaggatttcactgcacttcactctactgcaaggcagtggatgcaacttgtacatgccattctaccactagccttccaccatatgtctccaaacaacaccacaaatacataaaaattctcatccttgctgagtaaaggagattctggccatccctgaatgttgactgttgcctgctagacagggttattgctcttagcattactgtaagacctgccacaagaaaacaaatgacaataattttagaagaaaaaacttgcctgccatgatctaggatcttgttacttaatgtttaatggacaaaacgctgataagatagacaaatcaatctatcaattctttaatcctcaaactttaaaagtttattggtacatgagttcaatgggaattagaggatcatgcttaaatgtattgtttcagagctttaaaccataggttttcagattagagttttcctatatttattttacagataaatttgtttccatttcttatacaaaatattgaggtctctctactgaaattcagcaaatactatgaataaaaaactcaaaccaattgctgagtttcacaataaattagcaggtctaaagttttttatgggaatgggaaaggacagacattaattacatgtccaccttataccaggcactgcagtagattctttacatcttatctcacttattgatttttatctggatacattatacattatttctttttttcttacctgagttcacagtctgtattgcacctttcagtcaccagcaatggaagtggtaagtggtcacagctttgatcagacatgaccatatgatcactcttacgtacacaagtaatttttcttctatgaagaccttggccaaagtcaaatgaaaaataaaaattaaaagaaaaatcacataaggagatgttccataataatttacttctgctaaaagtttgaaggatgcagctaagaaagcaaaaacaatttcaacatagtatacaaataggctagcatattgagctagtcaggagtgactttctacaataagcaagatgaatcctgaaacactgaggagtttgctgagtaagaagatgtaaggaaggtggtgcaagtgtgtgaagtaggaagaaatttattacagctggatggaagggttgctagtggagaactgagtggtcagggtccatgctgatatgatacagtatactactgcttcccattatttgcttgccttttcactgcaacaaaattatacatctctacttgctacaacatttctataacttcctagaggaggagcagacttccctgcccatcgacagcaggtttgtgccaaccacctggaagggaatgtaactattccagttctaagcagaagctctaaaagtcttttcttgcttctgccaactcttttctctctgtttccagaacagccttctccagacggggctgatctttcagcctggaatcatgaatgaaaaggcagcatggtcagacttcagttgataataatggaccaactggaataaatgtgccacatgaatgcaagatggtaataacagggtaactggggaaggggtgtggaagaagagagaatataagaattttttgtagtttttgctcaactttctatacacctagtgtgaaagtgaaagtcgcttagtggtgtccacctatttgtgacctcatggatgacagcctgccaggctcctctgtccatggaattctccaggcaagaatactggagtgggtagctgttcccttctccaggggactttcccaacccagggatcgaacccaaacctaaaacccctctaaaatcaagtctattaatttgtttgagaatgacatggaggcagatagcaagctgaagaagagtcagaaccaattagcaaccaccacacagtatgagtgagaaataaatgtttgttgttctaagtcattgagatttagcagttgtttatatggtgcataaccacagtgaaggaaacttcgagaagtcagagaggccagagtagactgaactttgcactttccccgatgaggagacaggaaaacgttcaagctgtcagtggcatgattaaatttctgttttctccaagtccaagtgtatactttcagttggcgaaacatgagcgtgcatggttatctctgcatgcataccatctgaaagaactataaagaattctgaaaaggcaaaaacctgaaggaacaaaaagaatgaaagaggaaacaggaggcaggaaaaggacatgttaaatatgaaaagaagatggaaattactattctgacagagccaaggaagctgtaacctgagcctgtggaggaagaaagtaagaaacaaaccattcatgccgcagaatccaagcaaagcccaggaatcaaaaccaccagtttcctctgaagaggtgaatgtgtgaggcataggcctgaaaaaatggagaagcgattgaaaagtattcctgaagaacagtcagacttccacctaagagtcaacagtagcgctatctaatgaaaacaacgtgaaccacatgcgattttacattgtcctgtagtgacatgaaaaagtaaaaagatacaaatccaaacagggtcatttccacatgatgtcaacagaaacactgttgatgatacatctcactttcttttttcatcctaagtcttcagaactcattgtgcatttcacacttgtaccatatttcaatgggctagccacatgtggctaataactaccatactggatactggatagcatagctccagagcacgtgaacttggcagagacacagcagctgagggaagctggggaagtgctgaaccgaaaagagaggggctcagtacaagtctccatactgaaatgagattcaggcccactgggctcaccctccatttccctctggctccaagccgatttttacagtttctccagtcccctcactggccatcacaagatgggagaattcctttcttggaaaactctttagctcaagaaaaaagattaagtgacagcaacatttgagcctttccccaaagacacagtaaagaactataagaagacttatttaacccacacaggactttcaattagcattttagtcttaaatatgaataaacatcaaagatcagtaggcaatttaggaaagacactcacacaaaagagacctaaataagcagaaacagaattaagaggaaacacatatgtcatggagcagaagaaagttccaagactataattaatactctcacagacacaggtattgcctccatgaaacaaaagcaagctgttgatgagaaaaaaaaatgtacatttggagaggaaattatgagataagaaatcagaccaggaggctgtatatccagacaatataaattttacaaagatagaagagaaaatttaatgtggagaaattatcaaagatatcatacataaaacttctcagatcaaagaatctgtttccagtttggaaggcatcctaattaccaggaaaatagatgaaaggaaaagccaagccaacgcacagtgttctgacatttctcactcccagaatttaggaggggagacacaaaatttccataccaggaagtatcatatccaagcactggaaattggaaaacaagaatttcagcattctaaaggaaaataatctatcttagaattttatacgagccaagctatcaatcaagggtgagaactgaataatgccattttcagacaggaaaggtctcaaaacactgccttgctttctcaggaaatgtccgacagctatgttatcctcagtggaggaaataaaaagaggaattcacagaatttgggacacagggaatccaacacaaaagaaaattaaagagacctcacacgatgataaagaagggagagcatgtgacgacagccgtgtaacaggcctgaaaagcaacatggccaagttagggcagggtagaagagggccaagggaacaacagataagaaaaaggaaaggaaagctgaagccaataccctgaacatagagctccaaaatttacagcgttcacaaaatgtctggagcccgatcattttcagtgcacagggaaacaagtaaacaaaactaaagaaacttccctttagagaaacccaaaagttacacacatacaaaaggaactataatcatagtatatactttgtggcaattgaactaatggctcctttccttctgtaggaaagagatctttcctggttcagactctcaaactatctcaaaatgctttctccagcctttcattttggatcttgttatgtgtttatttgatgtgtcccccatattttagaatgtcccttcattcagctatttagttagatttcttctagctccccacatctactgccacagaccagtttacccagttatgttggaatgctggtcccagatgcccaaaccgcttctctacgctcttctgtaaagcacatccaggttctttttgtcaaaatgaatccctctgtcttctgtgttaccaaagctttgttcctacttgcagtgtttgcaccagtcagcctggcatcatctacttcaggcttcctccccggaggcactgttcaagcaggaatgcctgtttccacaccagcatctgggcactgctgtcctcgtaccacaggaccaagtctgtgcctttctctgggatgggataccacgattcctttggtaccttgaggtcagtttgttatctcgtccttcaagtccccatcttccgtgattgctgcctctggccacctaccttctctcagctcatttctgtactgttcggagctgctcctcctctgactcactgctcccctaattcccagaccttgtctctagtgcccctaggaacgacttttccactctacaccaatttctatcttcccatctatctatcacctcaaactgttcattccatctttcttggggtctccttgatgcatacttgtggcatggcttttaccgtttaaaattaagaaaatttactcattcttctgtttcatccactagactttaaaacttgaatgcaaaatcaggatcctaataatccaaaacaaaaatagtctgtcaataaacatttactgattcaacccagtgtagcatcacacaacaggtattcgtaattatagactgcccaaaggtaccagcctcttcacttgcttttctactataacttcacggctttttcatctctccctgtgttcctttcagttattcatccatcagtacaaacacatttccctgcggtcagagaagggaaataagagaatgagagaatgttgaccccacaacactaaaagaaggagatgcgtgtctgggaaagtggatggaagagaaggacaagaaggtgagcatttcaccagaaaacagtgtcacggtcagggaatctttctctaactgtgagaacacggctgaacaacttcactttcacgcactggagaaggaaatggcaacccactccagtgttcttgcctggagaatcccagggacggggaagcctggtgggctgccgtctatggggtcgcacagagtcagacacgactgaagcgacttagcagcagcagcaggaaaggagctgtgatgcaaaacattggaaagggctgagataagaaaaagggctgagataagggaggctgtaacataagcccagaatgagtggggagaaaagcatacagagagcaaagacgggaaacctttgtaagtctgtgtggtataagtatgtgggttccacaggcagccagattcaagagcaccccaaatcataccagcatgccacagctgaacttatgtcccttttatttaattctagtgtaccttgacacatttttgtacagtcttgccatggtccatatgggtcccatgtgaatagatcactcttctcttccacggggatattgaaggaataacgtacatcagggttgtatagattacccacacacaaaacctcaataaaaatacaaaggggcacacaatcaattcataaaagatatattcttaaaagatatcactctatgttgaataataaatacaaagcacttacttaagcatcatattttactaatatgattaaaactgtcttagtaacaactaccaagaatttacctgcaaaacaagttcttcttccagtcgatcagtactattaatcctttcaattgagttgtttgaaccactgtattcaaaaatagctccttgtacgttgatttcccttttggacatacttacaacaaaattcccattcaaaagaaaattcccttgagtgtccgataatgctgtaaaaggatagtgctcatgaaacagcaaaaccagtcaacggtccagaaacagttttaacttttaaaattcacattcttttcttctgcagttagagaatataaatataaactaatacagaggaaataaattttattttactataaagtggtatctaacccataagcagcgaaactttagcatatcagccaaacccatgaaaatacattcactctataatttttctttctgagaaggtcatcttccacaaagcatgcagcaccaggagagacatacaggaagtggaaaaacagagggaagtcatgccgacagatcagctaaatcaatcccggtcgtccacggggaggaaagaaagggcagccaggctgctgtagtgctctgtttaccttggaaaacatgtataaagcttcaacatcctagggtcaatattttaaaagcccatgcctctccactcctctctctgtaaacatctggatctttttcatgggaggcactcatcattggtctgtgtgagtggctgctttttcagaaccctcccactgccccctctgttcttgcccctggtgattcttgctctttcccatggataggtatcaacatcagcctatcaaataagtatatgtgtgtctatctatacactaatatttacatgtgtatatgagtatggaacagagtatgtagtcataatttgttacttttgtaaatacaaaattgcatggtgtccacagtgttgtggaagaccacaggacttagtacagttgatttaaattcaaattgttccaattaatttctatgtgatcttggataaactacttgctttttaattgcataacaggaataataaaaattcccaactcacagactttataattaaaatcaaatttggaaaatgtttctaaagtgtatagattgtaaagtgctgtgttgttagtttaaatttttgagagggtgtctaatattttaaattttacactaataaaacccccatgttaattaaatacatctttgctgatttactatacttctcagtggaataatctttttggaaaacacttacttggtcttccaggaaatcctacccagagcacacaagttaccatgactaaacaaatactacacaccctgaaccaatgctgaaggggatcctaccaaatatgtttgctgattctgtgtctttgtggactattgtgattgtctttatacactacactgaattcagtgaagaaccaacaaaatgaaaatcactctgtaaacctgcacattatcagaagtggacaggcctgtttaaaggactgcctgttacactaaaattaagggaaataaacaaaactttactgagaaaaactatatacatttcattatttttagttaccaaagcaaattacaagtcctttccaaagactccacacatatattttgctcccctatttagattttgatatttccattagtagttcttttacaaaatagactgatattttaatagtgaacatttttaatctttaaacttgagcagaaccaaatttctacatttggatcctaagagagacataataaattgtctataatacatatggcaaatgtctatgccaaatgataaatatggcatatatctatgtatatgtaaaagaaaaagcagtgcaactaaatgtaaacagttaaaacatttacatttgattttctttaggaatgtttttttatagaggtgaaattaacaaaaccagaattaaccattttaaattgaacaacttgatggcatgtactacattcacaatgttgggcaacctctactagttttctaaactttttcctcaccctggaaggaaaatctgtatccattcagcagttgttctttctacaattgactctataaagccagatataatttctgaaatgggctgttcattatagattcagattcccaatcaattcaaagccttgattacttgagccaatatttcacatttcattaatgtgaggcaggtgttttttcattatcagctttatatcatcagcttagtgaattacatgtaagtcaatattaaggtatttatcagacagaaacaagatttgtaaagcattcttttcatctctaggcctaagtgaaatgctttaaacttataagtcaatttccaaaaagtaagtaacaactgaaatgtatactctagaaatagctaaaagacaatatattaggactatgttcattaacatctaaaaatatgaaactatagtcctctttctgtaacataagagcaataaaaatacaatcacaagaaaaactgtatttaaagacttgtgctacatggtaaaaacatttaagaaaaaattttaaaaacatttcccttccctggtggctcagatggtaaagcatctgcctacagtgcaagagacccaggttcgatccctgggttgggaagatcctctgcagaaggccatggcaacccactccagtactcttgcctggaaaatcccagggacagaggagcgtggtaggctacagtccatggggttgcaaagagtcggacacgactgagcaacttcacttttttggattgggaacacgtgtacacccgtggcggattcatgttgatgtatggcaaaaccaatacagtattgtaaagtaaaataaagtaaaattttaaaaaaataaagaaaaaaaacaaaaaatcatttaaccccaatgaggtttataactagagaaatgtattctaactacatacacaactttaactgaatataacctctggttatctaaaacaccctcatggggaaaaaagcttaatttgtcttccagaatttaatttagtatctttaaaataggatatggtacgtaattcaaaaagagaacacatatatggagtcagatgacttggcttagtctgagccgaaactgcatgtttattcaaggggctcttcttgccttccaagaatttacaaccacagacctccatgaaactgcacatactggctgccatttaactaaaaatgtttacccagataattgtcatcttctggttttccagaatagctgtgctgaagaatatcaatgtttgttgctcctgggggaatctttacaacgacattataacctgcaatataattttatacatgttaactttcacaaaaagcagatggcccagaggctagtactgctgagtgaaaaatctgaatagtatagtcagaattaatttcattttatctctgaaagatgatatgtgcttattctttttgaatcaatggcttatacaaattactaaggattaagaaaaagtgtttgttgcctagaaacacacagtttgggattcttaaggtgcacttcctaatttctattacttttaaaattctgaatatagaataaaaatgaacctagtaatttagctcctgaactacttaacacacacattaatttttaaatgtgaccaatacttttacattttatacttcctaatggggaaaaatacaggattccaaatgctattcacaatccaggagatataaaaatagttgaccattgctagatgtttacacagactcagtgaacagcaaaatagtgaatgttaaagaggaatatttatcttaagcttttaggttccagtgtaagcaggaatctccatagctaccccctaaattttacattattttttaaagtctactaacaaagtgtcaagagaaaagtaaaaagtttactctagggaaatgttttatgaggccaaattcaataacactggcacttttcaaaatatgaggaaacactatatcaaatatacattacattacatatacaaatatacattaaacaagaaacatttttcctgcactaaaaccactcatgtcacatcattttcaaatactctcaggttttaagtcaacaattaattctgctctatgatattattctaaggttttcctttctcatattaggattttcctctttcatttaatataaaaacaaaaatttgaaatttttcacatacattaagttttataaatatgaaattaactttagaagaggaagttttaaaagaggttaagtctcatatgagattatcttgtgttttcagagcagccttatttatttatatctaagatatcatatttaaatataaggtgataaatggtatggttattctgtatacattaaatgcatactggttgtagcctacaaaatatacaagcctacaaaaataatttgactcatgattctttttcactataaaatgttcctaccagctccactatttatgtctttgctatgcttttcaagaaagtattccaaggcattgtaaatgtgacaagatgaaagctatcactagggggcagtaatgtgacaactgctgttcagaacctgcacatgaatttaatctttttccatttgcaaactgattaattcatagcacatttttagcaaggttaaattctaatttggtgcattcagctttatatagaaaaattacttttcagtgaatacagaccagaatttgataaatgtgtgccactggtgataaaaagggatcaaatatatataggtcccaagaaataaagaatcataacaactagaaaaataatgtcaaatcatctagtaacttagatgcataagcatgaccagagtagtaaatgttctacacttttcatataaatatagtgttctaaatgacactgttttaatcgaagcgattcctactaacttaaacaactctgttcaaaaacatgtgaatacaatttgaagctgaacaataaaactgtaaaacatacatcatttattttgcaaataaagttttaatgggttgattttattaccataaaaataaaaaacgtttctgagaaaatttaatggaaaatatctgatatattctcataaaatttttcaagaaaaatgaagccatggccaaatatcagttatatctgtaatccagacttactgaaaaatcaaatgtaacaataattccaaattaacatataagttaatggcttcatccttcaccttcaatcagtttcaatatatcatcaataaaaaacaacagacaagccagatcactcacacagaaaacatgtagttcagatgattaaaaataattgaaatcaaatttcctggaaagattataaacatatacaatataaattacagaagcagcagtaaaaacacttcattaactggtatgacagggggactatttacacattattgtcaagttgtcctggatttattctaataaatgcacctaaattttttttaagaattaaacttgtcttaagcaggtaaattcattaattcaatcatacaacttgtacaagatttaattaatcattttgaactaaaatacagaataaacaacaacaaaccaacactattattccttaatgatatagtcccattattatatccaaagagaaaactggaaagaaatgcagaactcaccataatgtgcactgttgaagacacctgccattgtcctgcaggaggagttatccccaccacacacgccacatttgtctctcctggccttggagtttaacacgtgatcacagccagcttgcttcaaaacacaataattacagtcaagattattaaagtgactagcgaagcactaatggggctttacaaagttctttccaaaaatattctttcaattaacaggaaattcaatacaacaggattttttcaggatatctaatgatcttgttatatgtacaccagtattttcacacagctgttcacatggttgaaaaagcactggtttttaaaggatcatctacatacttcctgcatcaaaatcacctggtgtgggatttaaagatagattctcagatgttcttaaaaatccctggaagtaaaaagctaagaatccacattgtaataaatattgacagtgattcctattttgattatttgagagtaattctttaaggacatgtgattcaaatgggacaaaaagtaacacactatagtaacttcaagaagaggtcattgatgatttactttattttttttttaacttatgaccttagaactctggggataaactgagcatatctgaaagaaataacttatttccttaaaattaatatccagcataataaagtgtttaagaaaaaaaatgagtaaataaataaaggtgagagtacacagtttgagccaaggctttgaaagaacaaatgcagctcttttctacacagatggtgccctcggcatacactgcagtaacatttagttctttggaacactcctttaaatttagtgatcaggagagtaagaaaaattcataagcctcatgactttgtatgtacaaggtaaatatttccaaaaggaaaattccatccagatattttctgaaagtaatatgcatctttatgttcagacacatgtcatattttctcattatatctgactctctgggtttaacttagataaaacaagttttcaggcaccaagtgccctttttctcacatttaaaagtcaaataaagtgaagtgaaagtcgctcagtcatgtccaactctttgcaaccccatggactagcccatggaattctccaggccagaatactggagtgagtagcctttcccttcccaaccccgggatcaaacccaggtctcccacattgtaggtggattctttaccagctgagccacaagggaagcccaagaatactggagtgggtagcttatccctctccagaggatcttcctgacccaggaatcaaacctgggtcttctgcattgcaggcagatcctttaccaattgaactatcagggaagtccaaagctatttccaatctgtcagttattttcagtttctctaaacatctcattagcctttgggtgcaaggcctttatcacctaggtaataacagatgtttggttatagggagaagaattggtcctattaagttgcacttaaggaatgagttcacagatgatacttatattctttagacaacattcactatccaagttctcaaactcaccatccattattaggactgccatctacaatttacacgctttaattcaggggctcatctgctctcacctaaaatcctgcctgcatgcatgtgtgctaagtcttcagtcatgcccaactctgtgcaatcctttggactgcagccggccaaactcctttgtccatggaattctccaggaaagaataccagagtgggttgccatgctctcctccaggggatcttcctgacccagggatcgaacccgcacctcttacatttcctgcattggcaggccagctctttactaccagcaccacctgggaatccccgctaaatggcctacctaactccagtttcctaacaactcagtacattctgaagatttcaacatgcaaatcaaatcacatctcttgcttaactccaaatccttggatcttcaaggacttcaggaaaacattttcacataacaaccgtcagctggtggccacctccaaccttggtcccttacttcttcactcttctaaaactttcttatcctaataattagatccagattcacaccctgcatgagcctccccaaatcctttacccacttccccatagactaagacactccatctacaatgtccacaggccaccttgcagataagccccacagccctgtgtgtgcccatctctcccacagatctgccaccatgtcagaggcgggtgttcttttctatcctttcatctcggtgactagaagagtatgttgcattcagtgtgtgtgtgtgtgtgtgtgtgtgtgtgtgtgtgcgtgtgtgtgtgtgtgtatgtgtgtgtgtgtgcactcggtcatgtctgactctcttcaaccctgaggactgtagccatccaggctcctctgttgatgggattcttcaggcaagaatactggagtgagttgcaatttcctcctccaagggatattcctgacccagggatcaaacctgtgtccctgtgtctcctgcactggaagatagattctttaccactactgccacctgggaagcccacagagaaatttggtaaaagtttgttgaatgcatataagaagtaggagaatggaaagcgggtgggaggatatcactgcttctaacacagaggtaaaaagtgtcaccacagaaggtcatgttcaaactagcaaaaggactttgcattccttgggtcctgagacatcttaggaagttaacttcatccctcatcttgattttgagcaccatagacaaaacgtgagtcactcctgatgacaaacaatagctcctaaccatgttcctatcagagaaggcaatggcaccccactccagtactcttgcctggaaaatcccatggacagaggagcctggtaggctacagtccatggagtcgcaaagagtcggacacgactgagcgatttcactttcacttttcactttcatgcattggagaaggaaatggcaacccactccagtattcttgcctggagaatcccagggacagaggagcttagtgggctgccgtctatggagtcgcacagagccggacacgactgaagcgacttagcagccgcagcagcaggttcctatagacagcagggtagcaacagaggatgctgcactgagactcatgagaatgtacatcaaattgcagaagtaatatctggctagaaaaacagaaggaaaacagtattctgaaagtcattttaaatgcagcgattttacttacccgacacaggccttgaacacagatgtcatttgtttccgttccacaaggagtaccatcggcaaccctgtccttcagttggtagaagctagtggttccagccacccggcaatagagtttacaacgatcttttacagcaactgtaagaaaaagtcaaattttggtggacacgaacacagctgtatgttcctttgtctcaaaactgttcacagcagaaaaatattctaattacttactcccactgtactttggaagccacctcacgttaggggagagaccattgatgttgaaatgtttaccatcaaaatcagagcactgcttctcacggaagtcttgcttgccttttggacatgaatcagtgttacatgatcgaaatttcatcctgcggcccacacagtacttgcctccgtttcttggcctagtcaaattcattacagtttaaagcacatcagtacaaggttatttctgccatttcattctaaaactgttccatccctttccaggatctggaaaaccactgatgtcccactaacacttatgtttttaacagaagtatgtaacatgatttggaagcatctctgtggttaatgaactatagaaaatccattttaacatggacattgtggcctggaggacagaaatgatgtcttagtcacgactagattaactaacaaagaactaatggtggggatttgtttattcattttggaggcagggagacatatagagtgaatacaacatgatcacaaaggaagatgacaccatgttaaaattaaaaagaagtatatatgactctttgttgtgtatatcctatgtatcactcagttcaaagaatttcatggtatcaatctatagacatccaactccatttcaatttatgttggaagattaaaaacttatatgaagactttcagcataattcaactattttaaaattcaaataaactaagtcgtattctattcatagtatgtcatatttctgcattaaaaattctttctttatatatataataagagaaccattttttaatttttttatggaatccctaaatttttttaaatagtttggtgagcaggatctgtgcttcagtacttattcaagctaaagacactgaagcaactataagatgaaaatacgaaaaagaaaatatgacatgacaaattataccaaacagtaagaaatggtaacaaaaccacctattttacccaggaaaaccaaagcacagttgaaaggggccaggctctttcaacaaaagcacagtaaaagtaaaaatgccattatattactgttgttattttcaactatttctcaaatttacactaaatcaaaaaagaaagaaaatggctgtcttaacttaaattcttaaaagtattttacttttttttttaaggtttgaatctaccaagatagaaagtaatatggcttaaagtattccagaagttttctgaatctcagaaacttacagactgacctccagttttagaagtgaatgaaactgatgtttactttctggtgccttgagataatcttaatttacagtgacataaaaaagacatactcggggcgattacagagcctgcttgtgcttttgattccacctccacatgttcttgaacaagaactgtaaggtccccatggtccccagtctccatctacaggacgtgtttccatctctttatttacacatagcccatggtggcaatgctatgaaaatgacacaaaaagaaacgattcatgtgttatctagttaggacatcacagtaataattataacagcaaaagaccagtagaagaaaatgcatacaacttcaagcagaatgttatcaagtcagaaatgaaatgacatttgataccattttgtgaatatttcctgagtatatactgagtaactggaaacagatcaacagaatgcaaaaaggaacaggaaatttactgtgcttatgagagctagagtctcgctggagagggaagacctatacctatggggaaaacaataatgaaaagcatttttgaaaaagaagcaaacaaatatttgattaatatggtatataaccatgtttctaccttttatgcaaaggtatctatcactctcctactcttttagctaactttctactctatcttactcaaagactcaaagaccactttgtttcttgttttcatcaagaaagtggaaatctacaaaagaaggtgtccagaatctcccagaacctcttctacccacccaacacccaaaatctcccaccatcccttatgcccagtacgcggccttcctgcccatgagtagacatgaaaattccaaaatcaacccctccatcgtgcacctaatctcatctcctctcaccactccagcaattctcccatctctcctacatcatcactgttccactggccactatatgaaagctaatcaaactgtagtccatgcacagatgctggtctttgaactagtcactgttaactgggagaaaatgagtacagaagatgaaagtaagcatttagaaactttcagaagattaattttgtttattaaagttaataatgatgaaatcagcttacattttattttttaatatttatgtattcatttatttttggctgtgctgggcttctgttgctggtcacggccatcctctggttgtggtaagcaaggtctgctctttgttgcagggtgcgggcttgtcattgcagtgactttgttgttgtagagcacaggctataggcaagcagactcagctgccctatggcatgtggattctttcctgaccagggatcaaactatgtccctgcattggcaggaggattcttaaccactggaccaccagagaagccctgttctatttttaattgtggtaaaattcacacaacaaaatgtactcccttagccgtttgtatgcatagacttcagtagcattaagaacatttacattgctgtgcaaccatcacatagaactctttgtcgtcccaaatggaaactctgcacccattaaacctggcaaccaccattctaccgtgtctatgaattcaattgctctgtatatctcatataactgaaatcacacagtatttgtctttctgcatacgtgctaagtcattttggtcatatccgattctgtgcgaccctatagactatagcccaccaggctcctctatccatgggattctccagacaagaatactggattgggttgccatgcccttctccaggggatttttcccaaaccagagatcaaaccctgtctcttaagtgtcctgcattagcaggcaggttctttaccactagcgccacctgggaagcccatttgtctttctaggactggcttatttctcttagcaatatgtcctaaaagttaatccatgttccagcatgtgtcagaatttcattcttctaccaattgaaaaatattccattgtatgtatatatcacattttctttatccatatatccatggatggacacgggttgcttccacttctcagctattgtgaataatgcaattcttttggatatatacccagaaatttttgtgttaggtcatgtttctatttttaatctttttgaggaaccaccattttgttttccatataaaaaaattggctcacactcggaatgtctttcttcatttcatttttaccattttgtacaatagcatgtttataaatgaccagaaatatttaaaaaaagaatactagtcctttatgagagatagtttgagaagtactccactcattctttttaaacaaaaatataagatctcatttccctcaccagttattgtcctatttttccttgatagagttgtctttgttcatggtctaactctctccacctcttctcattaccagactgcagccagaggctttcacatcccaccttccacaaacctgctcatgtgacatcaccaatggcctccaggacaccatgaccagtggctggttctccgtctctgccttcgacttatatgacatagtatgtgacagagctaacattcttcttctttgattcactttttcttctcttggtttccaggactctacacactcttggttttcttttctctttaatgatttctcttttgcagtttcttcttttttctaacctcttaatgtctctgggctcagaccatggtcctttagtcatctatttcactaatcactcccagtccagatctctttcctgaactccaaactctatggacagctgcttcctcatttttgtttcaatgtctaatagccacttcaaggataacatatccaaagttgaacctgcccccctcaaaatctgctgagtggatctcagttatcagccaaatacatagtcatcttatctcttcctcctctaatattccatagctaatacattagcaaatgctctgctgctgctgctgctgctgctgctaagtcacatcagtcgagtccgactctgtgcgaccccatagatggcagcccaccaggctcccccatccctgggattctccaggcaagaacactggagtgggttgccatttccttctccaatgcatgaaagtgaaaagtgaaagtgaaatcgctcagtcgtgtccaactcttcgagaccccatggactgcagcctaccaggcccctctgtccacgggattttctaggcaagagtactggagtggggtgtcatcaccttctctgagcaaatgctctagttccttcaaaaacatatataaagttgacttttaatcatcacctgatttgagccaccaacatctattttactccaacagctccctgagtacatctcctccttgtctactcttggcccttagagtttagtctcaaaagttgtcagaacagccatgatcctttttcaatgtagtttaaaattaagtcaaattagatgactcctctgtcaagtctttcaattagctcactttgagtaacacaaaattctcataacacctaaaagattttctagtaattcccacacacatctctctctctctctctctctctctcttctctctctctctctctctctctctctctctctccctccctctctcttcattccactcaaaatggcatctttgctcttccctgaacactctaggaaaattccagatttagtccggctgttccctttgcctggagctcaactcccctgcgatatcctcatagcaaactccctcacttcctttaaaacagctcattaggcaacttcccataagatcacccttgaccatcatattctaaattgcaatctgtcctctcctaccacacaaaaaatctaatcccttttctgctctatttctcttattcacagtcccattatattgtttgtaatactgcagtatccaactagaatataagctccaggacaggggcagggatctttcctcttttgttcattgatatattctgagcacctagaatagtatctgacatgtaggaggcccttgacaaatttttgttgaatgaattaatcatgtaaccaagattattagcagaaaaaaaaatgctttgcaccctccattagaacaaatcatttaatatgagaaagtcatactagaagtgaacaaaaacaaaatctcaaatagaatatactgtgtgcatgtaaattctgtgggcatcttccagaaatgtttaaataatcctggcacactcccttttcatttatttatttctgagggaacagagcatgaaaaagaatgctatgctgttcattgtgcagtaaaactaactcattgtcagatgggctcagcacgtctacatgcaaatagatttactaagaaaagcatttaacagcattacccatgtaagacagtcacaagataaaagaactaaaggaaaaattaaggatatttgtttaactttccttgaataacaggagctcttaatactcaatatggctaatgcataggggctcactattttcagttaatttttttaagggaatttatacctcgcatgatttacattttatgccaaatgtcacctctacttttaatctacatgggttttaaagtaggtctcggtatctcaccacatttacctggattcaacaaacccatgctttccatactgtctcactggggaaatagttaagcgagctaattaaaaaaaggtgctcaaaattgataataattaggataaaacaagtcaaaataagaattaaattctattttgtaccccctagaatggctaaaagtttgttaaggctaacaaaataaacaattggtaaggaatgcagaataattcaaactttcttatattggttggtgagtctaaaatggctcacatactttggaaaatagtttggtattttcttatgaagttaaacacacacctaccctatagcctaacaatttactcaagagaaatacaaacatacagccacaagaagatttatataaggatgctcacagtggctttatacataaaagccctaaacttgaaatgacccaactatctatcaacagaaaaatggtaaacaaattatggcacagctgaattaaactgcaacataaaggaagaagcattgatgcacacaatgatatgaataaaattcaaaaacatcatgaacaaaagaagcctgacccactagctcctagccaagagagagaatactagatagtttcatctactttaaaataaagaacagacaggagatggggcaaagatagtagaccctgagctcacctcctcctaaggacacacaaaaattacaactatttatagagcaactatcagtgagagtgacctgaagaccaaagaaaagactatagctaaagatataaagaaggaaccacgacaagatgggtaggagggaacatagtatagttaagacccacacccctgggtaggcaacccacaagcaaaagaataattagacttgcagagggtctctccaaggacccagaagtctaaacctcacagcaggctccccagcctgggagtcctgcaccaggaacacaagcctcacagtgtttggctttgaatgccagcaaggcttactttcagtaaagtcagaaaaatgtaggaaacagagactccactcttaaaaggcacacacacacaaaatatcacatgcttcaagccccagggaagaagcagaaatttgaaagaagcctgggtcagacccatttgctgatcttggagagcttcccaaaaagaaagaaagcatctgggactcaccctggtaacacagatgctgacagaaggcattttagggagctcatcccaccacgaggacactggtactggcaagcaccactttcacgccttctgctagcttattagcatcaggacctggccccactcactaggttgttggcacatatcttgggtcaccccatgacaagcaattacctgggagggaacacagacccatcttccagccagccagtttgccatagaacccactgagaccccagccactccaaaagctggtcttgcccaccagagggcccaggacccagccccaaccaccagtggatcatcactaaccccaaggttccaagagatttgcagccaaccatcagagaagatgccacccaatgggggcaggtaccagcccttataacccctgggctccagccataccacctgctggcccacactgactctgggaccagcagggccctgaagccaggaacccagaccacactcagccaccagtggaccagcaccagtcttagggcttcctgggcctttaagctacccaccaggaaaataacaccagctccaggacatcccaggtacacagggaccccagaacccacctccattcgccatgggcaactactagctctgaggccagattcggccactagtgggcagggacaagtgcctggactctctggacccacagacaccatccctgggagtaccaaggctccatagccagctgtgtaaagacctggcccacccatcaggaagacattagtggactggcactagctctgggacctcttgggaacctcagccaactgccctggaattgaggtccaaccaccagtgagcaagcaccaagaccaagcctccactgaccatgcagccagccacatcaggaccccatcaaatgtacaagtggccagcagtctctgcacaaggtagaatctggcaaccaataagaccaagaagactgaaatcatatcgagcatcttttctgaccacagtcctatgaaacctgaaatcaacaacaagaaaaaatttgcaaagaaaaaaataagacacagtgtgaaagctaaacactgtgctactaaaccaccagtaagtcacacagaaattaaaaaaaaaatacctggagacaaatgaaaacacaagaatctaaaatctatgtaatgaaagcaaacgcagttctatgaggaacatttgtagcgacacaagcctacctcaggaaagaagaaaaatctcaagtaaaccttctacctaaaggaactagaattaaaaggaaactcggtgttggtagaaggaaagaaattataaagatcagaatgagaagaaattaataaaatagatacaaaaaaaagaatagaaaagatcaaagaaactaagagctgatatttgaaacgataaaatttattatttagattcatcaagaaaataagagaaggctaaaatctggtggctcagtggtaaagaatctgcctgcaatgcaggaaatatggttcaatccctgggtcaggaagatcccctgaaggaaggcatggcaacctgctccagtatttttgcctaggaaatcccatggacagaggagcctgacaggctgcagtcaatagggtctcagggagtcagacatgactgaagcgactaagcagcagcaaatcaatgaaataaaaaatgaaaaagaagttacaattgacaccacagaaacacaaaggaccctaggagattacgatgaacaattacatgccaataaaatggacaacctggaagaaatggataaattcctagaaatgtacaattttacctgattgaatcaggaagaaaacataaaaataccagtttatgaagttcactagtaatgaaactgaatcaataattttaaaaactccttttcagattttattttattttattttactttacaatactgtattggttttgccatacatcaacatgattccgccacgggtgtacacgtgttccccatcctgaaccctcctctcacctccctccccataccctgaaaaaaataaaaataaataaaaataaaaactcccaactcttgaaagtccagagccagatggtttcccaggtgaattctaacaaacatttagagacgagtaacacctatttttccgaaagtgtgaaaagcactcagtcatgtctgactctctgtgaccccatggactatacaagtccatggaattctctaggccagaatactggagtggataacctttcccttccccaggggatttcccaacccagggattgaacccaggtctcccgcattgcaggcagactctttaccagctgagctaccagggaagcccattcttctcaaactattccaaaaaattacagagaaaggaatgctctggaattcattctacaaagccagcatcaccctgataatgaaaccagacaaaggtatcacaggaaggaagattacagaccagtgtcactgctgaacacagatgcaaaaatcttcaacaaaatattagcaaactgaattcaacaatacattaaaaggatcatacactatgattaagtgggatgtattgttcaatatccacaaatcaatatatgtaatagatcacatttcattatcatggtgaacccagtcacttcacatcttgttggcagatttacataagtttatcattgatgctagaatggaaaagatgcggtatgattgacagtttgtcttagagatacaatgtatttaaaaacacaaaaaccaataaacttaaacctttcatttatatttatctgaatttttaggagaaatgtatacaatggtaaatccttaaatttgggagtatttcaggtatttgctgaattacttatagctagatacatctttaataacaagactataatatgcttacataagtaaatgtccatgtaattatgttaactataatatccatctgctttatcttgaaaaaaggataaaatttaaattctaactcacttgaaaacatacatcaaacaaatacagcaaaaacattaattcaactagcagaagaaaatatgacggtgaataatgaagagcgctgaaacacagagcaatcacatccttggataatctcttgatacaaaactcacccttcgagaaaacctaccatcccaggaccacagtttgttccatctgccaggggcatgtgttgagtgcgacagcccctgtgaactccttctgcactggtacaccagagacgcctgcattgtttctgcagagtaataaaaggcaggcaaacaagagtgaaaataacactacgaccaccagatcaattcagtatcacgcattgatttataaattgaccctagatccttcctggtttcatggtcggagctggaaataatcagtaataatctcttactagggtctcactgatggctcagacagtaaagaatctggttgaatgcaggaagcccgggttcgatccctgtgtcagaaagatcccctggagaagggaatggctacccactccagtattcttgcctggagaattccatggacagaggaacctgatgggctacagtccatggagttgcaaagagtcagacatgactgaacaactaacacagatacacataataatctttactaagtcagtcttggtcatcaattttcctctaaacataaaatggcaacatttagttttttaaaaattggattatcatcaaacactgaataatggaaaagatgacttggagcgaagcattcaaaattactgagatagttttctctctttgcaagacatttttctaaaggattttttgttgttaaatgttattcacaaggagtttccaaaagtcccttttgatccaacagtggaatatatgaataatgtgcatagaaaaactgtataatgtatattggtttcctattttgtaaatataatgcatactttcaatttttgaaaatttgttcacaagatatgaaaacccacagaggctcacaggagccatgcccaaaataatccctttctttctttgaatttaaattcaaagttgattcagtatccaagtcagtatgaaaaaaaatgcattttttataaaaaataattgacgtatatcttctcttcatagtggatatttaaagacataaataattgtgattttaaatttaagattttaggaataatatacactatatgcagtatgctttgcatgtccctgtgctcattgttaagtacctttcatttattcatccatccatccattcattcataaatcattcatgtattcactcattcaacagtccgtaaacattttttttttggctcctattatatggcagatctgaactaaatccttggaatatatctttatttaaatgaatgaacaaggcgagattcctggttcaatcatcttcacaatctagttgtatagtaagcagtttagcaaaggtctgcacaggattgaagaatatgaaatgagtattctgcttgggaaagtaaggcatggattcaccaaagtactgacatttactagaactaaatcctaaatttacccccaaaaaaagacaaaatcttggctacagagtcaataaaaatgtcaactcaactttttcagaggtcagtgttcattctagtcccaaagaaaaggcagaatgctcaaactactgcacaattgcactcagctcacatgctaataaagtaatgcttacaattctccaaaccaggcttcagcaatacgtgaattgtgaacttccagatgttcaagctggttttagaaaaggaagagaggaaccagagatcaatttgccaacatccgctgatcatcgaaaaaccaagagagttccagaaaaaacatctatttctgctttattgactctgccaaagcctttgactgtgtggatcacaacaaactgcagaaaactctgaaagagatgggactaccagaccacctgaactacctcctgagaaatctgtatgcaggtcaggaagcaacagttagaactggacatggaacaacagactggttccaaataggaaaaggagtacgtcaaggctgtatattgtcaccctgcttatttaacttatatgcagagtacatcatgagaaacgctggactggaagaaacacaagctggaatcaagattgctgggagaaatatcaataacctcagatatgcagatgacaccaccctaatggcagaaagtgaagaaaaactaaagaacctcttgatgaaagtaaaagaggagagtgaaaaagttggcttaaagctcaacattcagaaagcgaagatcatggcatctggtcccatcacttcatggcaaatagatggggaaacagtggaaacagtgtcagactttattttggggggcttcaaaatcactgcagatggtgactgcagccatgaaattaaaagatgcttactccttggaaggaaagttatgaccaatctagacagcatattaaaaagcagagatattactttgccaacaaaggtccgtctagtcaagtctatggtttttccagtggtcatatatggacgtgagagttggactataaaggaagctgagcactgaagaattgatgcttttgaactgtggtgttggagaagactcttgagagtcccttggactgcgaggagatccaaccagtccatcctaaaggatcagtcctgggtgttcattggtaggactgatgctgaagttgaaactccaatactttggccacctgatgcgaagaactgacacatttgaaaaaaccctgattattggaaagattgacggcaggaggagaaggctacaacagaggatgagatggttggatggcattgccaactcaatggacacgggtttgggtggacttcaggagtcggtgatggatagggaggcctggcgtgctgcatttcatggggtcgcaaagagttggacatgactaagtgactgaactgaactgaactgaacctatgaaaaatccttgaaaccaattataaagtaatgattaaagaaaatgaaacaacagactccaaacttctttcctttgtattcaaatctaccgtaaaatatagtctatgaaattcttggggtctttaatacaattcattatcaaagcacttgtattatctctcctacccacaaaacaacatcatttgaaaataactatttgaatgcttttaattttcattaacctggatatttcataggattttgtgagagttaaagataatttttaagtaactaacaaagtgaaagtgaaagttaatcactcagttgtgactaacaaagagtgactctttgcaaccacatagactatagtcatccaggcttctctgtccatggaattcttcatgcaagaatactggagtaggtaggcattcccttctcttggggatcttcccaacccaggaatcaaacctgggtctcccacattgcaggcagattctttaccatctgagccaccagggaaagcccatctaaaatagcacctggcgaataataagtattcaataaattatagtttccctttttttaaaaaacctctttctgacaaacaccaaatttttctaatatttaaaaatcaagataagttcagcacactacctgtccaagagaataaagtacattttgaaatatatcttttttttttttttttactttacaattctgtattggttttgccatacattgacatgaactacaactttatggtagttttcaaacaaaagaacataatttctcttactaaatagggacacacttgtgatccaggaccaaacataagctcacattgcttgtttacatcatacattaatccaggaagctgtgaagatagatcgtatattcttccatttggtttgtcaaggaggcattccccatgaccggtgctgcaatgacgacagggaacaaaatgttgtgaatacacatggatgtatttaagtagaagattcttcaccacatttttctgtagctctgcactttcaaagagaacatcagtattttttcataatttaaaaaccaactcacatcaaagtcaataagaaaatctcacagtttatataggacttattctatgtgtttgttctcatttaatccccacaactgccttaaaggtaaattttttttaaagaataatgaaaaataaacaaaaatgcatcgaatataatgtttaaaacatgcattcctacgttgatcacactacatttttggtctgctttgctatccaacaggaattccctatatctaattccaatctgtcaaaatgtaaaaagtaacattttcagatcatctgagaaagttcgtttatagtcgacaacaaaataaaggaatttcagagtgctatgctgtctctgtctcaaacagattttcttaggaaaagaatataatgcagagtaaagaatgccagctttgggattttgcatttgagtgtcaccactttccgaattgcatggtgtggacaagttagttagtctccctgggtctaagacttctcaactgcaaattgagagtagaaatggctgctttgcaagttgctattaaatgcattatttaacatctttaaaggagtttgcaaaatagtagatagttgcaaaaatgtgtatttgctactcctagtttgtcaagtaatatacagtatatagaaaactgtgaaaatgttcagccattccaattcagttaaaagcaatcatttgttcaatttgaaataattggaagaaatattttggagggaattttttactggctagaaggcataataaattttgccaaaaaaataaataaataaataaacatttaagtttcaaaatacccattggcaagaatcatatcacccccttccaaaaataagcatacctactggtatttttaatcagtgcttcagtcagcaatcaaacaaagctatatgccaccatgtacagatgagcgactatgtgttgtgcttttaaatcaagttcccataaaggataaataaccactgttaatcataattatacatttataaatatatattccaaaagatggtttcattcattcccatagttctcatagaggtaagtaagtgaaactgtataaactggtgattagaatatgtagtagaaaaaatcaaacaatattgtgtttataccaaaagattacctggaaagaggttggccttgcttttagaacaagtttcaataactaggtagaaacaccatttggataagttgggaagcagagaaatgtaggagatgaagaggcaaggctagaacaatctgaatctgagctagcaatagcctccaaaggataggtaaacccagagactccatatctctttagggaactattaggaatattcataatttgacttcagctattctctgtccttcaaggacaacctcaaacttgagccactcaaactcatctcaaaatattacttggcagcttctgaagaaattttaatacacaaggaatctttgattcccattaagcatctccctaagaaggagtttttatcataacaggaaccccaatttttttttaaatgatagctctgaattaaatcccccaccaaaaaacatatagttaagaatgaaataataaaactctttgtctttaaacatccatttgtacagtggaagcaaacttaaatttaagcaataaaaaactcaacagagattgaactattctaaaagaatacatgtttcaaactttataatctaataagtgttcaattatataactaaagtaacacgaaatcacttactctaggaattcggtgatatatttctgactacattttgaccaggtccaaggacttgtgtggtaatttaaagttggagccatgacatgatactgatgtttaattccagtttctttacatttaaaactatcatcgtgtggaacattaaatctaaaaataaaaataaacacttaaaaaagaataatgaaatgtacacaacattagaaacagatctcttattttataatataatctaaaatgtagatcaatctgattatatcaggatttgtactcttgatctcttcataaagtactgcaatgctagggttaccttcatgtttagaagcgcatgatgtttaagaaacagtagattataactctgatcagtagcacagtctgttgctttggtatgtgaatttcaacaatcaaattatttggattccggctcacctcatcacaacatcaacacagcattcacataaaacaattataatttccaacatgcatacccgaggcaatgtgtgtggaaagattaggtaaaggctctatcacagtaacttccagactactgactatcactacagaattaaaaaccaaaaaaacttctttaattcttaattccatatcactttatgctttccacctatttcacatgaaacagcttaactgctctttctggtttataatcataaagtgatgactgatagaactggaataataaaaatattcccaaatggcaaccaaatctttataagggcaatgacattaaatggtcagctggtcagcaacagattttacatatattttgaggatcccagtaaaaactacgtttagaagggataattgattcagtccttgattcagtccttacctgtcaaaatatgtacttaatatcagtgttttaattaaactacttactgatattctaaacacacctaaaaagtttctcaggaagaaaataaaaggtagtatcctttgcaagaatactgtactagttaatacccttggtaaccagcaaacactgccttcaggatgttacaatacatgatataccttgagcatgctgctgaacctgctctacttcagcaaacaacgtaaaaatttggtgggtagtcatgagatataatgatgctgggaactgaagaggaactagtttaataaaaattatctctgcctgaaattattccagttgaatactctaaggatgtcaaggcatgaccaggaaaagacaatggagttcaagagaagcagctccagctttaattccttattagcaaataaccaaaaaatcaaaagagtactgtgggtacattgggaatcatttttcagaggatgaatttctaggggtttctgactttctatgggagcttcacgggtatcatgggaaaccatggcctccacattcttagagcataaaaccccagtagaatttttaataatataggaacaaatagaattccaaatgtttaccaaaaaaaaaaacaaactatagatctgggagaaaaagttttaagaaaatatttcagtgattaagaaattcccacagaccacatactctgttggggctctgagcaataaaagcaagaaatgaattgatagtacaaatatttgggggagttccctagaaccaggggaccctacaggccctcccataagacggtagagcacagtacctggtcatgcataggataacaagggacagaggccagaagtgcttgtcatataatccaatacagtaagtgaaagaaaagagttccaaagttctagttctttgcttagtctgttgatctgtgtagcctgtctgacctaacatagatcacaaaagagccagagttagcatttcaggggttaaaattacactactaatattttgtaaagatataaagatgccaattactccgttaaagacagaattatagacattcatgcaacgctatgtagaaggcacactaccgaggtgacagaaggtacttacacatgaccaagctcatgggctatggtaaaggcagcactgagcccattttcttcactaatagagcagctccgtaaagggtcacacagggtacctaattctgctaaacctgaaaaatttcatgtttgcatttcaacaaaatggggaatagcagaatcataaagaaagcactaaagcatttatcatttggcattactacttagaaataaatgccgagttgactgttaatactgcacagacgttttaaaaggcaaagagaaaaaaaaagaacagaatgatttatctgtagctgaaaccatatacttttactgaagaaaataatccagaatatgggataagcaaacaattttttaaaagacaggaaaaggaaaaggccacaggaagaatgaaattttaggccacgttagtgttattagtaggaaaggtaatgaatgtctaaactggtaacagtactaataaagaaaatggtccagaacaatataaattataaattttatttaattttttaaagctttgaagcagtatagacttattcaattaccatacgataattaaatgactaaaaatatgttaaatacttagaatagtgcctggagttaatagatgttaaataaagcatgataatgacataatcattggaagcacttattttgtaaccatttcagcagtggaacacgtatcacacatcaagatctagccactcatttaaacaacaacttgtaactggaattgttgctgaaagatgatgacaacatgaaatggctggacaccaaagacaatagttacaactgatatagtcttttaatctaggataagaaatataaaattaatgctcattacaatattccatatttcatcatcaagttatcattccattttaccttttaactggagccaattatacagagtgaagtaagccagaaagaaaaacaccaatacagtatactaacacatatatatatggaatttagaaagatggcaatgatgaccctgtatgcaggacagcaaaaaagacacagatgtgtatagcagacttttggactcagtgggagagggagagggtgagatgatttgggagaatgacattgaaacatgtataatatcatgtaagaatcgaattgccagtctatgtccgatgcaggatatggcacgcttggggctggtacacggggatgacccagagagatgttgtggggaagggggtgggaggggggttcatgtttgggaacgcatgtacacccgtggtggattcatgtcaatgtatggcaaaaccaatacagaattgtaaagtaaaataaaaaataaattaaaaaaaaaaaacataacacatagcttttactattgctatccttcaacatttgcttacaaatttattttctctccgatgatgattccttctatttaaaaaaaaagattttcatttatacaataatcagtttcttattgtaaaatttttcatttagaaattccttaatataaaataaacagacatattagctactgtgttttagtctttcctattacgtgtacctaaaaaaagaaatagaagttaactaaagaatctaaaaatactggaaaaaagtcagactaatgagttcactcatcaatacattcttaacaaaaatgaaagatgccctctttctgactcttaatgccaaaaagtcttgcttgggcaaagtccccaccaaaagaactttttcttagttagaatcaagaccaaagcaagaagggaaaaaagaaagaaagatattctttctttaacagtcctctgataaagaatgagagaatttttattttctttaagatttaaaaattcatactgtatgggcaatttttagtgaatttcgtatttctcctttgtcaaaataagttaaactgtacacactgctttttaagaatatgtgctgttcccttgccttcactagtactttcaatttgcctagtggctcagttcctgtgtactattcatttacagtgctgagtatttgaaatacaatattgactccattgggttcccatggtggctcagacaataaagaaactgcctgcaatgtaggagacatgggtgcaatccctgagttgggaagatgccctggagaagggaatatactcactccagtattcctgcctggagaattccatggacagagaagcctggcaagctattgcccatggagcagcaaagagttggacatgactgagtgaataatactttaacttttcacctttttcattgactccattaccacccaaactttgcttcatgctcaaagatgggcgggatttcctatagctcagatggtaaagaatctgcctgcaatgcaagagaccaaggttcaattcctaggtcaggaagatcccctggaggaagaaatggcaactctttccagcttaagatggatatattctaagttgaacatcttagtcacgtgacgtatctgtaaaaattagcattgcacacgattaaagatcaagctcaagcatgtccattagataaataagactaacaaaaatcaaagtgaatgtatagccttatagtaccaagcagttggctgatagtttatgcctagattcactcattctgattcagggctctctaaaactgggcagagatattaacagaataaactagcacagcccaaatttgacacagattccctgtgtttgaaagtgcaagaagctgcacaaagtcaccaatctatcatcttgaagaataacaatttttaacttactttgtaaaatatgcccagagactaagacaacaatacttgcaaaaggagatataagcaggaaacttagtcattattgccagtatctggtatttattaagaactattcttagtttgttattttttccacatactttagaagggaaactaaaatactaaaacttgggttaatacaagttgtatagccttgggcaaattatttatcctcatgtataaaattggaataataggtcttaatagatttgttgtaaagattaaatgagtataatcatgttaaaccttagtgtagtgtttgatacataggcactcaaatatatcagctatcattataatcactgctcctcttgatttaaaggataacaggattactttgatttgcatggtctatgtttctagacatcggtatgatttatgtgcacaggagtagctgaaaactgcaaaaaatgaatggggagtgaataacccaaaatttagcattaaatcatttttaaaaatagaaaaatatagcaaatatattcatacttaacttttagtataaatatgtgaaaacaaggcaaagataatctaagaaatacagaacatatgtatctgagtaccaagtcacttcagttgtgttcaactctttgcgactgtatggactatagcctgccagactcctctgtccatggggttctccaggcaagaacaccggagtggactgcagtaccctcctccaggggatcttcctgagtcagggatcaacgtacgtctcttaatctcctgcatagcaggcaggctctttaccacaagcaccacctgggaagcctagatatatagaataatacatctagatatataaatatatctaattatatagaatatatctacaaagttagagagtagcttgcaaggagaagagatgagatctgttgtcaaaattagagtggcagttgcctacttccacatttgtggaagattaacgtctagacagtccttttaccacaaagaaacacatccagtaataaaaactactttttaaatgaatactgagctcatgatgtatgagaactatcaaaaccccacacctccaaaacctcagatatgttctctccctgctcatctcatacctaataatgcatgcatacatacatataaacaattgtatcatgtgagtgaaagtcgctcagtcgggtccaactctttgcgaccccatgaactatacagtccatggaattctctaggccagaatactggagtgggtagtctttcccttctccagggacccagcccagggatcaaacccaggtctcccgcattgcaggaggattctttaccagttgaaccacaagggaagccccatatgatttatatcatgtgctaaatcctaaacagcaagcaaggaataggaagaataggagttactctgagagcaaatactgataaaagcaatatgatgcagagactaagagcttgctagaggaagcttcaaagtagaggatctgattctgaagtctctgccttaagtataagggaccttggttattaacacctttcagattacagcaaaacaactgaaaatctctctagaggaaagaacactttttaagcagtccatcactagccttatggataatttttatataaatatgaacttacacttagagatcatgaaacatacaaacaagtaaacacagcagaaaattagcagacaacacgtatttggtaatcaaatgtttagaatatgggaactgtcaaagatggcatatgaaattactccaaataaaatgtttcagtaaatatgaaaggcaatgataaatatgagaaaatataaaaagagtataaacaaaataaataggcagattttgaataacaactaagtagaatgtttgaaattgcaaaacatgttgaaatggaaaattcagggaagaatgaaataccaaattagatgcagccaaaggaaaaaaaaaaacaataaaatgcacattagagctgctggaataaagcatgaagataaaaagaaataaaaggatggaaaacaattataataaatgtaaatggactaactatggtagtaacaaagattattataaatagttttaaaaatccaattatatgatggatttatctaaagatgtgagactctgaaaaattgaaacaaaagatatatccagcaaatattaaacaagaaaaagttgggctagttatagtaatgctagacataatattataaaaataaaattataatgactatattttctttaaaaagcattattagacattaaaaagtcactatacaattgcaaacaattcaaatcaaacctatatgcacctaataagttagcccaaaaatagatgaaacaaagtatctcaacactgtaattgaagaaattttaatgtcaaattaaaaataaagagtaacaaagacatattcatgtttcaggttagtgtcctagtaagcaaaaaaaaatagtaaatatgtagttgatttgaacagcataaattgatttaacagacatagttaagaatatacattctgttggaacatacacaaacattttttaattggtcacataatagaccatacagttgaagtctagcatggaggattttgagcatgaccttgctagcatgtgaaatgagagaagttgtgcagcagtttgaacattctttgacattgcccttctttgggactagaatgacaactgaccttttccagtcgtgtggccactgctgagttttccaatttgctggcatatttagtgcagcactttcacagcatcatcttttaggatctgaaatagctcagctggaattccatcacctccactaactttgttgctagtgatgcttcttcctaaggtccacttgactttgtactccaggatgtctggctccaagtgagtgatcccaccattgtagttatctggatcattaagatcttttttgtatagttcttatgtgtattcttgccacctcttcttaatatcttctgcttctgttaggttcataccatttctgttctttattgtgtctgactttgcattaaatattcccttggtatctctaattttcttgaagagaactctagtctttcccattctaatgctttcctctattttttttttttttgcattgttcacttaggaaggctttcttatccctctttgctattctctggaactctgcattcagatgggtatatttttccttttctcctttgcctctcttctcttcttttctcggatatttgtaaggccttcttagacaaccatttgccttttttgcatttctttttcttgcagatggtcttgatcactgccttctgtacaatgttacaaacctctgcccatagttcttcaggcactctgcctatcatatctagtcccttgaatcttatttgtcacttccactgtataatcgaaaggtatttgatttaggtcacacctgaatggcttagtggttttccctactttcttcaatttaagcctgaattttgcaataaggagtccatgatctgagccacagtcagcttctggtcctgtttttgccgactatatagggcttctccatcttatgtacacatagagagagcttatatagaaaactggatttagaaaaggcagaggaaccaaagatcaaattggcaacatctgctggatcacagaaaaagcaagagaattccagaaaaacatccacttctgctttactgaatactaaagcctttgactgtgtggatcacaactaactgtagaaaattcttaaagagatggaaatgagatcaccttacctgtcttttgagaaacctgtatgcagataaagtagaaacagctagaaatggatatggaataacagactgattcaaaattgagaaaagagtacatcaaggctgtatattgtcaccttgcttatttaacttatatgcatagtacattatgcgaaatgctaggctggaagaagcacaagctgaaatcgagattgctgagagaaatatcaataacctcagatatgcagatgataccactcttatggcagaaagcaaagaaataaaaagcttcttgatgaaagtgaaagtggagagagaaaaagttggcttaaaactcaacattcaaaaaactaagaacatggcatctggccctaccacttcatggcaaatagatggggaaacaatggaaacagtgacagactttattctcttgggctccaaaatcactgcagatggtaactgcagccttgaaattaaaagatacttgctccttgaaagaaaagctatgataaacttatatagcatttcaaaaagcagagacattactttactgacaaaggtccatctaaacaaagctatggtttttccagtagtcatgtatggatgtgagagttgtaccataaaagaaagttgagcactgaagaactgatgttttgaactgaggttttggagaagtctcttgagagtcccttggactgcaaggagatccaaccaccccattctaaaggagatcagtcctgggtgttcattggaagcactaaccctgcagctgaagttccaatactttggccacctgatacaaaaagccaacttattggaaaagaccctgcggctcggaaatacagaggcaggaggaaaaggggacgacagaggatgagatggttgtatgacatcaccaactcaatgaacatgagtttgagcaagctctgggagatggtgaaggacagggaagcctattgtgctgcaatccatggggtcgcacagagtcagacatgactgagtgactgaacaatagaccatacagggatatcaaaagacttcaaagaatgggtatcacgtagatcatgttctgtaactacaatgaaattgaacgaaaaacagtaaatcttgatacattcatataattttaaatgcatttctaaattaataagtctagttaataagtgaagaaatcaagatggatttacacatacttagaatttttaaattttaaatgtcattgaaaacatctataaaaacatgtaggacatagcaaaatgataccttgaagtaacggggtagtcttaacaaaattagaaaagaaaaaattggggggtttgtgagctaagcaaacataagtaaattgggggaaaatgagagagaaaaagcagaaattaaagaaataaaaatgagattaaaagaaagagttgatcctctaaaaaaagaaaactgtaatagacaatatttcagtgaaattgagccatttaaagaagttcaaataaataatatcagaaataaaatgaggcttgtagacaggtatagacaagagagtttaaaagaaaatgctatgagaataatttaagttataaattttactactaaaagaaatggtataatatctagaaaatcagtttttaaagcacattcaaaaagatgtttttttaagtccgattatccttggagaaattaaatggtaaaatatattcccacacaggaaagataaaacccagatggttttctaggtgggatctcccatgctttcaaggtatagatcactccaacactacaaaaaatcttccagagaatgggaaaaaatatatactcccaacaaatttggcatggtgaataaaactttggcatctgtgtcgctcttcctactcatgacaccaactgtctcgctgttcacactgtctgcacttttcgctgagcccaggctagacaaggcgtgagctgagaggctggaaggagccgtaggaactacagacacatttattctcgcggggctggcacagcagccataacacagccactctcctgactcacgagcagtcatagcagcagccacaatataaccacaatgcagcagtaatatagccatggcataacctcatataacataaccacgatgccactccaatgtagccccaatgccatagcagctagggcttttgtggtgatgctctgacaggcgtgaggcacaaagcagcttgtgaccaagcaagtatctcgtgatgcccatgcgcagcgctgtaagtgatctcagctgttacacagttatcatttacaaaacgtgcggtgagagagcctgacctggccatcttggctaattcgctctctcctcacagtatcaaaatcagagaaatacaatcaaaggaaggtcatttcactcctgaaaatatatgcttggaatgaaatctagtggtgtgtttagaaacaaaaaaaaaaaaaggaaaaaaccttaatcaagattggtttagtgttagaaaactcataaaaggaattcataagattaaaataatcatatggtcacttttagatctgcaaaaatttttaataaaagtatacattttctaagtttcagaaattttatgttaagtttatcagccaagaagaacctgtggcaaatattcctaatggtgaaactttacaaatattccctttaaaatccaggggaaaaaggctatcgtcatcatttctactcaacattcaacaaggtttttatcttactttaagacaaaaaaaaagaaaaagatttttaaaaaggaaagaatattatgaggattgaagaagggaaaagaaaaacagccataattcacaatgatataaatgcccacaggtaaattatgagattaatgaatcaggtgtctatatttaaaatcaataatccaaataatttattatatttctatcaatcaacaccatacaccaatatactaataaaagaggtaaatgaaagttgggcacaataaactctgaaagaaaataatacatattactaaaaaatattttaaaagacattcataaatagataattatttcataatgacttaacatactggtctaaaattttataggagatcataggttcaggaatagccacaaactcttgaagaaaattagatggagtatatactctgtgaattatgatgatttattatagagctatataatttgaatttatggaattggtagatgaaataaataaaaagtattgattaatgaaacagcaggatgtttgcacatgccagtgcaaacagaaattttatatgtggcattgcagattctaaggaaacacattgcagattctaggaaactaatcaaaacatgatctcaggaaactggatatccacacagaaaagactcttacaaaactgatccttatttgataccatatcaaaaaaattcaaatagtatagagatttaaatgtgaaaggacaaaattttaaatccttataagaaaacagaataatacattcagattttgcactacagaatacttagaaggctataatttcattaagacaaaattcctaactctaaaattataatttcagctacagtatacattttcatacgaacacaataatcactaaggaactaatcattaagagatatttacaatacatataatcccaaaagggtttggtatcaggaagttataaagaacactaaaaggcataagaaaatgaaaagtactacagcagagaaacaggcgactttttttcatttatttcattcctctcagaaaagatatataaatggctagtaaatatataaaaagatgtccagactcattagtgaccagggaactgaaaattactactataatgaaatatattacatttagattggcaaaaatgagaaatttgaagattcttatattgataagaatataatcaaaaggaatggttatacacgattgataaaaaatgaaaactggtaccactttggaaaataatttggtatatcttataaagttgaacatgagcacatttaatgacatgaaattctaatcttaggaatataccttaaggtcttataataaagttcctaatagaaaaaagctgaaatcagcccaaatattcactgacagaataaagatatgtgaaccgtggttaaaacattgtgtaacagtgaaaatgcatgaactaaagctcaaaaataagcataatcaagcaatttcttttaagaatacatacatgtgctataaaagtatttttcaaaacaatggaaggaactggcacatacaacatttatgcaactgattatctcttggggaaatgcaagggacagaataaggacttagcacaggccatagaacagtactgctaaatttctaattcttaaatctaattcataaatctgatagtggattcatggctattcattttatttttcttgctttacatttgcatataagttattatgtactattttgtatggataaatgatacataataaaatacttatttaagtatgtcaagctttgcacagcacttgatatttagtaattgttagtagttcctattattctttaaaacttatagaagcaaaaatcaaataatagtgacactataatcattaatcaagtcaactaaacaaaatgattaatatgtaaattaagagaaagataatctaaacatcatcctaaataattcagtaaacaattatataagctatatttacaaattaacttacccaatgtgtcacatttctctctagctccacaaatatcttcccttaaaacaaaagattttgaagcatttttagaaaatatttttgcaacaagccaaagcaaagacaaagaagctttaattttgacatgtctattgccctaaattgacttctaagatctagttctctcaagctctcaataagtttaaacctagagtaatgcaccatttttgcataccaataagcaaataggtacagtataaaagtgactgctataaacagctggagcttaatttcaatgaaaagctttcttaatgtatttttcacctctctgccttgacctttgcagtagtatatgtaatactcttttcttgatgtttcatcattatgaactaaagctcttattctctgctgcaaaataatgatgttctcaaatgttaccaagttgcttcaactttttgcttctacattactcggtctctaaccattcaatatgacaattctctagtctctttccccgtggcctcctcttagagcccttttcttccctcccattttaatctgttatctctagccataacctagggcattagaatacagtgtataaatgtgagcaattctgctttagtttggaaaagagataaagcacatcgactatgtcagttgtttcacactgactgaagattttcatttcagggttctagaaagtcaaaatttctctgaatttgaccttcaaacaaaagatttttttcccttttggccaaccaaccaagcaaaacaaactacaaacctgggattcttataccatgacagtggctgaaacaacagtgtgaattaataatgtacttataaaataatcatttcattttataataatagctgtttttcatttaaataaatagggttgagaaaaaagcttagcaaaagcagcccagtaattaagatacgaactgagcaacaaaacacagagcagatagggcttttttaaagtataaggagccaaaaataaattcggaggctttcttttccaagcgattggaaggtcaaatagggaagaaacaaaatgcattctcagttccataactatgttaattttcaaataattttcctaattctgttattctgtcactaacatactaaggaaatcattttgtttaggtcaagccgttacttagcaacctaatgctgctaatttcctatggaatcaggccagtgttctggtctaaagaaacagaagaatgctttcattcaagggtatctttcgtaatacaagttctcatagaacactactacgtactactgataaagaattaaggtaacaggaagtattcgtgatcatgcaggagagaaagggtaaacaatttcattggaacggttatttctagaactgtaccttgtgataagaacagcagtatcatggtgggatgggtgggcatcatcaagaacattctgagtttgttgccataaacagaaattgcgtaacgtggtagctgcattgaaactgatgactggtccttcctacacacacaaaaaagcagcaattcaacaattacatcaaaacattcatgccctctcccttccaaacttgtcagtgtttttgcagttcattaaatagcatttttataggcaaatgaagaagtcacttcattgctccctcatacctcaaacatattttagcaatccttaaaacattgtgatcaaaacagaactgaattagatgcttctcaatgtaagcatccaatatttcagatcaaaaaaactaacttctaaaaatgatcatattttaaatctaacagtagaattataaaagtgaatatctgattgttttcaaccttaactttttaaatcgtttattacttgctgtgacttcctctgttgtcatttcatttccatcatgatggaaaaagtcaacctcattcctttccgaatcaagatttttaacatatttttcaattatcccatttcatgatctacatacatatattcctcctaagagcctattacaactaggaatattagttttagaactgtttcttacctgctcatcatgaattataactaattttacaattactatgtttataagatttccaatacttgagtccttgtagattgctgcaacctgcaaggaaaaagtataagatttgatgcctaaaatcaatatttttttctcaaaaggaaattaaaaccaatctgacagcatcaattctccaattcatttgcacactggtatctcctagggagcttttcataaacctaaagctcaggccacatcccccctcatcaatgaaatcagaagctttagggttgagacacaggcatcggtatcttttaaaactccctggcatttttctgattccaatgtgaagccaagtttgagaaacagtatccttaatcttgttgctgagattaatctgttgatcagcagcatccatatcacctagagctgattagaaatacaaactctcaggccccacctggacaagtgagtcagaatctttagtttaataagatcttcaaggcatctgaatatggattggggcttggaaatactgttctaggtgattcagcaaaaaattaactctattctgggtcacaatccacaatttatgtgaccaaaatactccataaaaataaacacataaattttacctattctttggtagttttacctaatctttcttgccatgactgtgtattttcaattctgaatatgcttatggtttttaattgcttagcaccattagaatccatggagacaaattcatcaagaatcacagagtcatcagttcagttcagtcactcagtcatgtccaactctttgtgaccccatggactgcagcacaccaggcttccctgtatatcgtcaactcttggagcttcctcaaactcatgtccatcgagtcagcaaagagccacagaagtcataggtcacaatctggtcttccactctccaaaactggagaatgcaattctacaagggactctgcatgggctcagtttgtgactcatagtgaaagtgttgtacaattcaccaattaatatcctcctcttacagccaccagggaggctgccagatagcaagagtgtattccatgaccaacacctctgcctaggatttctgtagagatacacctttctggagctgggccacccatgccacgaaaattgcttctgaatgtggatcaccatctcctggaccactgcccaaaccaagacagcaattccttcaggaggtgctacttctttcatttatttaattaatactcagcaaagattccttcctttattggctacagacccagagacagggaagagaagatggtccctgaccttgtagaggttacagtttcctagaagtaccagtagtggagctctgatcctatcagccaaagttgcttcaacataatgaataaaatgagaaccatcagaaacaaacccaaaagcatctctggaaatgctgaccctgtaggtcagcatgaacttaaataaagtttctagcattcttcctattgttttagctgtacaaccacaagcacagattgaccatctttacctgcagtgatgccttttgttctagcattttttggcaagacagatggtcaccccagtggagttaagagttcagttaaacagagacaggcagatgactggcaatttcacactggtcggctagtattgcagtattgctcactttaaactggcagctgtggaaaaatctacggctgaactaatatagagagagttacatggaaaatgggcatctattgtaaaaaaccaaagtatacccatatgtgtgccttctgagttatcctctgaccatgtgaggttaaaagtacatgcttccctaagtcaaactagaaggtaaacaaagcacctcaaaggcaagcacaaaggctcttttaatgaaagccaattgcgaagacttgccactggccagcatgcattcctggtcctccagagataaaagcttaggcactgtgaagtatctaaatggctaatttctctacgcattgcctgaaatgtgctgcctacaaatgacaatctggatacacaatataaactataaaataaccacaaaaatgttttcagtttcagaagaaaacagatgtggcaccttgattgacaaatgaccaagcaaccagctagaatttagaaacacgttcccagtgttctgatactatgtttttaaaaatatattacttcagcaaaatttcttttaaaatttaactttaggaaaaaaaaataattcaagtaattatgcaagatgggcaatgttatgaagtagggtccttttaattccaattttaactgccacttgttgataacacctaattaccaggctactataaagattaagtgcaatggtatacagaaagcatttagatcactagaaaaatagcgctgatgaacctattttcagggcaggaatagagacacgggcatagagaagggacttgtggacatgggccggggcaatggagaggagagggtgagacaaattaagagagcggcactgacatgcatacacttcgtgtaaaacagatagcgagtggccagttgctgtctggcacaggagctcagctcaacgctctgtgatgacctagaggggtaggagggagtctcaagagggaggggatatatatacacacatatagcccattcacttcattgtacagcagaaaccaacaaaacctcataaagcaattatactccaattaaaaacaaacaaacaaatgcaacaacaataaaaaataaagaacactagttattgtaaagaaaagcttttagatcagggtctgggtcacagtgatcaatgacagctactattactacattcagaagaaaaggcatatgttatatataatgtttattctagttcatgtgtttcaaattagttatcatagaatggcaaattgaaagcaaaggatccaaaagcttcacagttttatctctttcaatatttattaaacatctactggcttacctaataccattaaaaattcagtcttccaggggtaaaagacacagatggttcagtttaaataagtattcatatatgcccaaaaagaaatcctcaggatggtattttctaagtgtatacagaaacactaaaatgtcatgtttctatacatacttccatgtgtaaaatagataagctagtgggacgacagcatagagagttcagttcagtgctctgtggcaacctagaagagtgggacggtgggggttgagagggaggccctagagggaggggtgtatgtgtacagatagctggtccacactgttgcacaacagaaactaacacaacagtgcaaagcaaatgcactccaataaaaattaattaattaaaattaaatggcatgtctcttcaaggtcattttgcttatttaattgtagacacttacttcttactgttttatgtattgacccttataatctatgagctcacaccctatacatatgtattttttatagtatttggatatttagaggtgcttttattgaataactgttcagttaagctgaatggtgaatcaggcaggtaagtgatcagaaggcctacttgttatttcagaagcttttctaattatcatgacaacatgcttctcttagccctaaaactgccaccccataataggccaccacaatgatagggtatcatgtttgcaacttcctcataaatacataactagaaataatatttatggaatatttactgtgtgtcagatgtgatctaagttttaaatgtattaattcatttaataattctcacaacaaattttatgagctggaaactattgtgtccattttacatataagaaaattaaggtacggagaaattcataacacactcaaggttaggtggctgggagcaacagagtaatttccaccagaggtagtctagcttcagctctgactactttgtctgatcttatgaaatttcagcactctaccctaagtagctcttggcacaaacgttattttagaccctgacgtgattcatgccccacccctgacactgtcctgctagttacttgaccatggcctcagaagtcctaagcagacaagagacctagatttcagctctggctcttactagttacaagccagttgtccagctctggaaatagagttatctactttttgtctcaatactccccaccacactgagcaccaagcacccttggtcacaatgccctggtacactgcattagcattcaccagaagctgctgggaaaagggtgtgagaacatttgttttaaagaaaaaaattattccacagttggagaaaagttgagtaaaaagatatcttcatggatatcttggagtggataactcttagagtggataactccatgtgttaagggaccagacctgagccatgacaggctcaacaagctatactaggcctaagattcagattcttgtaaaacctgagtcatgattccgggaaaccacaccctgggaaagtccctgatggcgccaaacctgagccaatccggatagggatgcgggatttgaaaatggcgtgcgcgtagggctccgccaatcatcacccgccagctgtactaagaaccgcctgtataaaagcagctgtgattcagagctcggggctctcgtcaagactccactgcactggatgagacgggagccctagctggagctagcaataaacccctttatgcttttgcattgctgtggacgtcttattctctcagttttggggactcggacttcgggcataacacatggatatcttcatggagtcttgactaggctaagtcttgactagccttgactagtcttgacatgcataaatattaaatgtacaacagaggtatttattatatgcagcatctcactcaactgcctggccaaattctcttttcacctccatcaacaaaccacaggactagtatcccaccccacagactatactgtagaaaacactagatcagattactaaggtataagtaacttataaggtataaaaccatgtaatattattatatataattgtaatcactccattttagagtgctatgcatttggacttttattgatccaattaaaatgtgttcaatcctttatcctgtaagtgatttttttttcccctggcatatagaattcatattgctttacaggcctcataaaatagtaaacattgcttcatagataattagcaaaaggaaaagtgctataaattatttaaatattttaagaaaatctcaggcaacatacagttcgtgcaaagtatgaagcaaattatatctgtattaactgaccactattttgaaacacagcttcagtaaatgtttacatatggcatgtttagagatcacctttttttaaaagccatttaaaaaaattaagataattgacatatatcagtgtattagttgtaggtatacaatgatttgatgtgtgtgtgtgtgtgcatgtgtatattacaaatgaccactacaataagtttagttaacattcatcaccatatatagttgtatttttttttctaataaggactttttagatctactctcttagcaactttcaaatacaaaatacagtgttgctaaccatagtcaccatgctgtacattacattccccaggagttatttatcttataactggatatttgtaccttctgaccaccttcacctttgaagttatctataaaaaactgattttagcaaagtgaacagattttgttacacagatccttactcatcagagagatgttattgtttttaagttagaaaatgacattccacatatgtccaaagaaaatatatgcaaagaattaagaacaggtagagcactgagttgaaggaaaaggtaacataaaatgattgaatgtgatgtacgaaagcaaatcattagtttttattctaatgtggttgaaaattttccccatcctaaataacatcagtaaagacaactcaaagaattgaaagcaatgatattaaggcaacgtaatgcaggtaaaactttctagttgataactgcctctaagagcaactgtgtttttaaaaatagggctaattcctgacaaatgatgctcttgagatttacattattaaatctgtaacaaggtgaatattatcaaatcaaactttgtaaacaaaaggagtgtggaggcttctgacaatatttccaaggtttattaaacagtaagtcattgcatatcaaaataaatctgctgagaaaagtaattttcctaatttaaatactacttaatagtttaacaattaatttaaaatgacattttaacctgataatatcacccaaattctctaaggaaaaattttagagtagcaaaaagttgaacatctctgctcgtttaacacacacttatttcattaggtacactatacaccacaaatgtgtttttcccagctaattttaatgttatttctagaaactctttgaatagagatcactaagctatttttacaacatgagtaaagcactctaaaaggtgaattaaatcacatattatttctatatccactgcactcagctattgctaaaatgttgaaagaaaaggaaaagtttgagaagacagcagaattgtttactttgtatgggatgagtaaaggtagataatcccctctctaaagtatgtatacaatctatctgctcaatgctgaaagcattcggcagtctccctcactatatctggagctcaacacaaaatctctttcgtcactttgaacttttctttaaatgactctcaatcatattccaggtgtaaatcacatgttcttgtctttttcctaagttactatgaccaaaaaatattaccaatacgccaagtgtgtctgaataaatacagttaatgtctctttaaaactcaggacatacacaaaacttgaatggcttcttcttcaactggcaacatttggagacagttttggggagacagcattcctcttacttctttagagcaatctggaaatggtcttcacaaatgcagataaaacaagctggattatatttgacaagtctccatgtactgtgaccaactgtccctgtctgcttaggactgagggatttccagggatataagatttttaatactaaaactaagaaattcccaagcaaaacaagtctactgactttctccaagtttctctttacctttaatatggtttacatctacaaatatagctacagccactattgttaactaataaaataacaatgcatgtccaaaatcataaagtctgctgactttcctatgctgctaagtcacttcagtcatgtctgactctgtgcgaccccatagacggcagcccaccaggctcccccatccctgggactctccaggcaagaacactggagtgggttgccatttccttctccaatgcatgaaagtgaaaagtgaaagggaagtcactcagtcgtgtgcgactcttagcaaccccatggactgcagcctaccaggctcctccatccatgggattttccaggcaagagtactggagtggggtgccatcgccttctccaatatccttatttaaacacttaacgaaagaaaaaaggaacagagaaaacaaaaaacccaggtaatctgaagtcatctgaaatcggacctctgaagaggaaagaaagtatgtataaaaccaaaactacctcaaaagggagatttatcctcctaaatttttcctcctatagtccatggggttgcaaaagagttggacatgacttagtaactaaacaacaacatctatatttggaatattcccctattcctcaactgtggcaatatttccctatgaatgaaagctaaacacagattaactgacagcatctacaaacacttcatcttaactgaaatgggctctcctaatggaattaaacatctagggaatggtacgtgcatgcattggtctgtggcttcaagcagtctcagaaccagatttactttccatgacggcagaacgttgactttgtcattcatgaactctggttttaaaacccccatggacaacttcacaaggtacatcacaatatcttctaatcgatactgtgattataatgattttaatcataaaatacatatgacaaaacttttctgaggatggtaccatcatcaaaactatgtagttattcaaaaattacttttgtgttcctttacctcttagagtcagtatttccaaagcactgatacaggagttgtcatttaacatcaaaacatgctgtacttataaaatctagtaattttcttcactatctctatcaccttcccaattttcttaatgaatatcttcttcaaccatataaaatttccaagtttaacccacactattccatataaatgatataatttcctatatagtatcctccatgtcaatgttctcattagaatcccttcacaatgagcatgccactgctgctgctgctgctgctaaatcgcttcagtcatgtccgactctctgcgaccccatagatggcagcccaccaggctcccccgtccctgggattctccaggcaagaacactggagtgggttgccatttccttctccaatgcatgaaagtgaaaagtgaaagtgaagttgctcagtcgtgtccgactctttgcgaccgcatggactgcagcctaccaggctcctccgtccatgggattttccaggcaagagtactggagtggggtgccatcgccttctctggagcatgccacaccagtatctaaataattacacatctagataattatatacatctagatagttacttcagattcagaaagtaatcaggataaatctgtatgtagagctgtgttgtcactttaaaaattcaattcaagtaaataaaacacatctacactgcacaaatttcaaagcttcattttagatgatatgtttgttgcccattataatgtcactcactctgaaaaaattgttaccttaatcatttatttacttattcttttattaacaattgagtgctcatttcataccagatactttgtttaggcagcaaaagcaatgtattcccagcacgtataagaatttaagataaaatgctatatgtaaggaaaataacaaggtcttaagatcttttcagtcacaatgaagttgatcggagagttcttgctaagtgaaatttataatagatgtgtccaggtcccatctttccagccaagcagacctgatttccctccctgtgaatatgagatatgatccaatatcctgaatgtgtataaatagaggaaactataaatttcatcagctaaaccaagatactcctgagcatgaaagagctgctttcagtagttacttcaaaataataggatttaatccaggaatgtcccagacagtaggtacatgtgtgtatatatttgtgtgtgtgttagtccatcagttgtgtccgactctgtgtgaccccatggactgaagcccgccaggctcctctggccatggaattctccaggcaagaatactggagtgggtagccattcccttttccaggggatcttctccaagggatctttcccacccggaaatcaaacctgggtctcctgcactggaggcagattcttcaccatccgagccaccagggaagcccgtacgtatgtatatgtgtgcctatgtactcttatgtatatagagcgctaccactaacacagaactggtgctcttcactagcactagagatctattcatatgccaccactgctcaacagacgctaacatcagaaatcgatgccaccaccactgctcaacagacgctaacatcagaaatcgatgccaccaccactgctcaacagagacgctaacatcagaaatcgatgccaccaccactgctcaacagacgctaacatcagaaatctatgccaccaccactgctcaacagacactaacatcagaaatctatgccaccaccactgctcaacagagacgctaacatcagaaatctatgccaccaccactgctcaacagagacgctaacatcagaaatctatgccaccaccactgctcaacagagacgctaacatcagaaatctatgccaccaccactgctcaacagagacgctaacatcagaaatctatgccaccaccactgctcaacagagacactaacatcaaatcaaaagttcttatagttactgtgatcttactgttcgttgttgctgttcagtcactaagtgactgactgactctgtctgactgactcttatgtctgactctgcaaccccatggacttgtgcacaccaggcttccctgtccttcactctctccctgagtttgctcaaactcatgactcttgagtccatgatgccatccaaccatctcatcttctgtcaccctcttttcctctggccctcaatctttctcagcatcagagtcttctccaacaagttggctcttcatatcaggtggccaaattggtggagcttcagcttcagcatcaatccttctaatgaatattcaaggttaatttcctttaggattgactggtttgatctccttgctatccaagggactctcaagaatctcctccagcaccacagtttgaaagcatcagttcttcagcactcatactttacagtccaactctcacatccatacttgactaccgaaaaaccatagctatgactttatggacttttgttagcaaagtgataaaaagattaaaaagtctctgctttttaatacactgtctgggtctctcatagcttttcttccaaggagcaaatgtcttttaatttcaaggctgcagtcaccatccaacgattttggagttcaagaaaataaaatatgccactgtttctatttccctactatttgccatgaagtgatgggatcgaaggctatgatcttaagattcgtcttacatcctaagtttgttaaagcagctctattaataatagagctccttttattaccataagtacctttataacttaaaatatgtgtcccaatttgatttggtgaatgcaatagtagtaaaattagtattccctccttctatacagaaactattaaaaattcagagtcaaagggcaaaagatcaattctgtcactagggggcagaagttattcacatgatgaagtcaagattgaagcactttctgtaagcggtttgtttaaaaggtttttagattttttaaaaattgtccaagtaacagaatggaacacttgctatatacatctatatatttaaatttcattcagatattttggcttaaatgtaaacaatttgcttacatctaaagtttggggaaatttttaattaaatgtgaaaaaatattatgtaaaacattttagaaaatacaaaggacctgttaagtttacttacaattgacatcagagttagtacgtagtgctgcaagttctgtccatgatgatgaaccattttagagtcagctgtaaccataacttccacgtatcttggatatgataaaaaacgttttttcctggaatgcaattgacttctttcatcttccaaagatatattttttgaagtgtatccaaaaactctttcttcctttatattgagattttcattcacgtcactgtagttatgaaagggtagagtagttttctttatttcactttctggtgggggaagaatataataatatagagtcattaaattggatgtgactcaaaatactgcacagaatagaagggccaaaaatatttaatacttttacaactgcttccaatatgaaatataaggacaaaaatttattttaaagtcttacaccacattatcctaagcattactattgttcatagtaatataatgtccacattttcatatattgcactaacaaaaccgtatataagtcttagtttaacagccatgactattcaaaatgtgtattaaccactggagagaagataaaaacaaatcaaggagaacttaggcttttttcagtaggtaaattgagtcctcaagccactgactacatctaatctcattgcagagaaattatattttataggataaagcttcataaagtagagaaaacaaatatatttttttgttatgcaacatcaaaagagcaccaaatccatatagcaatagatggcttttcaaacccagaaattcaaaggttgatgtaaattttgtaatacttgattatataaaatacctgattactttgattatgtttgtttatatataaatatagcattaaaactgctaaaacattagggattattatggcaatcactttaagtccttctataaaagttaattctaaattcatgattacttgtgctaatggaaaaaatttcatcggcagcttgaatgtttgttctatttccttctccttcaatttattcctctactctctttcttatttttctctgctaatttttctgataattgtttggtgaaagtatttagaataggaaagtggatcaaagcaaacaggtaagaaataaaaggtcctggatagttcataagtcaaatcatcaatactccaacaatcaagatttagttgtattacaaggattgtgaagtcactcagccatgtccgactctttgtgaccccacggactgtagtctaccaggctcctcagtccatggaattttccaggcaagagtattgaagtgggttgccatttccttctccagggcatcttcccaacccagggattggacccgggtctcccacattgcaggcagacgctttaccatctgagccaccagggaagctcaaggattagacagaatataaacctgtattacaaaaataattcatttcccttaaaattagtagcaactctatggttgtaaaaaatgaaactgaagtccttgaacaatgtttctacagacgaactgcttttcctaatttctaaaactgtcctgccttttaatattactacgctgttaagttttaaaatatagctcagtgggagactataggcatctgaaaaactgaatatagattcctaacattttgtcctgccatatttttcctaaaggtgagtcaaccaccaaaatgtgttgtgctgtgctaagtcgctacagtcgtgtctgcaaggctcctttgtccatgggatgctccaggcaagaattctgtagtggactgccatgcccttctccaggggatcttcccaaccagggactgaaactgcatcacttacacctgctgcattggcaggcacgctctttaccactggtgccacctgggaagcccacccaccaaaatatccatgcctaattatttgaccctggagaagatcctagatatatctgatatatacaaatcccagtgttatcaggaaaaaagataaatattcatgttttgattatttgttcactcatttcattcattcaaaataaactttcattgagtaactgctcaatgtcagcaaacataagaaattaagcagaaaatagcatctaataaagtttatactctagtgggaagaataaaaaaaaatgaacacatatcaaaggacttaaagttatctcaaattagtccttaaataacaattcaatcaaaagttttaaaaagtgactctaccttaacaaaatggctaaaacttaaaagactgataataccaagtattgtctcagccactttagaatactatctggcaatttttaaattacacatgtacctatcctcatgtgaagtcactcagtcatgtccaactctttgcgaccccatggactgtagcctacgaggctcctccatccatgggattttccaggcaagagtactggagtgggttgccatttccttctccaggggatcttcctgacccagggattgaacccgggtctcccgcattgcagacagatgctttaccgtctgagccaccagggaagtcctgcaattacaatcctgatacctaaaagaaggaaaacatatgtccagaaaacactaagaatgtccatagcatgacctgcataaatacgaatggaataaagaaccaagaaagaaacctttacgtatatggtcaaatgatgtttgacaaatttgctacggacagcccatgaagaatgaataggttcttcaacaaatggtgttggaacaactagacatgtccatgcaaaagagtgaaattggacttcatcttacatcatatataaaagttaactcaaaatggattaatatctaaaactactttgaaaatcctaaaagaaaactgaggaaaagctccatgacagtgggtttgacagtgattatttcgatatgacaccaaagctcaagcaataagtgcaaaaaaacagataaatgtgactgcaaactttaacatgtatgtgcattaaagaacacaatcaaaagagtaaaaatgcaatgggaaaaaatacttgcaaatcatatctgatgaggagctacggaagtaatacccactgctgctaagtcacttcattcgtgtctgactttgtgtgaccccatagacggcagcccaccaggctcccccatccctgggattctccaggcaagaacactggagtgggttgccatttccttctccaatgcatgaaagtgaaaagtgaaatcgaagtcgctcagtcatgtctgactcctagcgaccccatggactgcagcctaccaggctcctccatccatgggattttccaggcaagagtactggagtggggtgccactgccctctcccactacacatatacaagtatgtatgatatatatatatatatatatatatatatatatatatattcttataactcaataagggcttctctaatagctcaattggtaaagaatccacctctactgcaggagacctcagtttgattcctgggttgggaagatcccgtggagaagggataggctacccactccagaattcttgggcttcccttgtgattcagctggtaaaaatccaccagcaattgcaggagacctgggttcgatccctagcttgggaagatcccctggagaaagaaatggctacccattccagtattctggccagagaattccatggactagatagtccatggggtcgcaaagagtcagacacaagtaagcggctttcactttcatgactcaataaaaataacctgattttttaaatggggaaaggaatagaccatttttaaaatagtgaatagacattttaccaaagataaaaaatggacaaccgcatatataaagatggtcaatgttacttatcattagagatatgcaaatcaaaactataatgagatatcgtttcaaacccacgaggatggctagtattaaaaagaacagaaaataataagtgttgatgaggatgtggagaaactggaaccttcatgaactgatggtaggattataaaacagggtgcaaccgctataggaaatagtataaaagtacctcaaaaatttatatacagaactaccaaatgatccagcaattctacatctcagtatatatccaaaagaattaaaagcagggtcttgaagtaatattttcccactcatgttcactgcagcattatttacaataaccgaaaggtagaagcaactcaaatatctattgattgataaatagacaaatgaaatgcagtatatatagaaaatgggttattcatctttaaaaaaggaaattattacattctctgatatggataaatcttgaggatagtatgataactagaaatgagccagccacaaaagtataaatactatttgattctacttattagctatctaaaacactcaaaaatcatagaaacaaaattgaatggttggttaccagggcctgtcaatatctccacctgagatagcccccaaagttctgtccagcctgggtgctacaaaattaaacatctcactggttaatagtaagctaaacaagaacacaattgaggaagtactgtggcttgaaggagtcagattgacagtaagttagaataggtgactctgtgtaggctgaaataatgaaagaaagaaagaagaattccaaactggaatgaaaacattggataaacaatatacacagaaaaaaaagaatccttagaacaaaaaaatatacaaattcaaatttaaaattcaattctggagtaattgttttaaaaagggaaaaataaacattaagaagatactataaacaacttgatacaaaaaaattaagaaatgttttctagaacatttctgaaaaaaacataacttatcaaaactgacccgtgaagaattagaaagtctaacagccacgtaacttaaaaaaactgaactctaatcaattcttccccaaaaacccagtctcaaagggcttcaccagcaaacatgactaagtaaagaagaaatagcactatttctcaaacttttctaagaatttaaaaaaagggaaagatctcaaacatgtttcatctgtcttttaaatgatgatatatcagaatatattcatgaccttggtttttgtttgaaaaaggactttaggacacaaaaaatactaaccaaaaagactattcatttgagtaaaccaagactttgagctgtgttcaaaacaacattattatgggaaaagggagagatatctggaataaatataaacaaaggacttatatacagattgtatcattaaccactgcaaataagaaatgagataataataaaaataagggagacttgaatacctcacaaaaggcaaaattcaaaggcataaacacaggaaacagtaccaaaaattaccaatcatctgggaaatccacattaaaacacaatgaaatttaactatatatcctcccaaatggctaaaatgcaaaatattgaaaataactaggcatggtaatatactgtggggctcctgaacctctcatatactgctggagacagtgaaaagcggaacattcactttgtaaaatttcagtgggctaagaagggattgggatatgtgacacagcttagtgcaaaaaggatacaattattacatccctttaaaatcagtgagtataggtatgcatatatactgctgttaaaacaagcacattaccaaggaaaaagatacttggtacaaattctaaattcaaagtgttgtgggatgacttaagaatacaaaaatcagcaaaagtaaggaaatagaaaaaaaagaaactgaataaaattaatataaatacaaataacacaatgtatattgtctattataaatcaagtggagatcatccatgaacagcatgggtttgaattgtgtgggttgacttatacatggattttttcaataaatatgtactatgatctgcagatctgaagacgcagaaccacagatatggagagccagctgtaaagggacatgcagactttaccctgaataggggagtcagcacctcaaactcctgccttgtttacgggtcaacttttcatttctaacaaatttatttatattaactcatctaatttttgtttaatcactaagtcatatcccactcttttgtaaccccatggactgtagtctaccaggctcctctgttcatgggatctgccacacaaaaagactgcagtgggttgccattccctttctcaggggatcttcctgactcatgagtggaaaccacatctcttgtactggcaggcaggttctttaccactgaaccaccagggaagcccaacttatttactagtgcatataaagtaagtgctattattaactctactttatagatgagtaatccacaatatgcagagactaaggaattaacatacacagttaattatatttttatgcgggtcaggaaacaacagctagaacgggacatggaacaatagactgattccaaatcaggaaaggagtacttcaagactgtatattgtcagcctgcttatttaacttagatacagagtgcatcacaagaaacactgatctggatgaagcacaagctggaatcaagattgctgggagaaatatcaataatctcagatatgcagatgacaccacccttatggcagaaagtgaagaagaactaaagagcctcttggtaaagtgaaagagaagagtgaaaaagttggcttgaaactcaacattcagaaaaccaagatcatggcatccagtcccatcaatccatggcaaatagatggggaaacagtggaaatagtgacagactttatattcttgggctccaaaatcactacagatggtgactgcagacatgaaattaaaagacgcttactccttggaaggaaagttatgaccaaccaagacagcatattaaaaagcagagacgttactttgccagcaaaggtccgtctagtcaaagctatggtttttccagtggtcatgtatggatgtgagagttggactataaagaaagctgagcgctgaagaattgatgcttttgaactgtggtgttggagaaaacttttgagagtcccttggactgcaaggagacccaaccagtccatcctaaaggagatcagtcctgagtgttcattggaaggactggatgttgaagctgaaactccaatactttggccacctgatgtgaggagctaactcatttgaaaagaccctgatgctgggaaagattaaaagcaggaggagaaggggatgacaaaggatgagatggttggatggcatcaccgactcaatggacatgagtttgagtaaactctgggtgttggtgatgaacagggaggtctggtgtgctgcagtccatggggttgcaaagttggacatgactgaccaactgaactgactgagctgaaaatgaaaacaaataactggttcatttctaaaaccaggaaaaaaaaagtaactggttcatatacaaataaaggtagtttaaatttgtctatcagaaagcaaaagctttatagaattagattagtaaaatacagccatatttaagtaataagtagcacatctgagattgaaatcctacatatcgggctccaaaattggtgattttaaccactaaaacatattgcttgacaatgaaagttaaaggaaaaaaagaaaactgtaatttaacaacaaacacactttcaccaaaacagatatcacgagtttgatctctatagacaatgaaataatgataagaatattgtgcagactttgtaaaatatttgaattatttggaagaaatctgatttcatgctttaacacacaacaatatgagtgaattttgttaattacaagtgacaaaaatgaaaaaaattaaatctgacacatttttatgtagcttaaaaaacaaaataaagatttaagaaatatgtatggatgcagtcacattacagaaaaagcagggaggtgacacgcatgacatttagaatgatcgggtggggggaggtaggtggactaaatgggaggggggatgcaagcaaaattgtgtggccatatatgggctgctgtccaaatgctgtatttcatattggtttatatattcatgactttcattattattatcaacaagttcttaacaaacagtaatttataaaaccaactactattaaaataataggacagttctgattgctatcatacagtagttttagaaatgctaaatattaggaaagaaacactgaatattagaaagtttttttgctaatgttttgattctgcaaatctaattttgcaaagacaaatggctttgataactaaaataaccaagaggtcacatttaaaactttttaaacaaacaatcctcaacaaaggaataattcaacaatggaatgttatgcagatatggaaaaaaaagtgaatgaggtctatgtgttttcataaggaaggatgttcatgatgcatttttaagtaaaaagtgtaagtggcaaaataatatgaatgatagtatgatcttatttttgtgaaaacaaacttttacaaaatatacagattcataaaaacttatatgatgagccaaaaatacatggaagtatatacctcagacttttagcactggtcataaggagaggtgtgactagacaactactaaattctttcattaatatctcagtctcctttaaatcatgacaatgaatttgtttactggtttctgaattacagtattatttttgaaaatagcatctgtaactatcttacaggctaaacattttatctcattacctttttctgatatttatgcttaagtactataatcaatgatcataaaaatgacctctccaaataccctaaataaatgagcactatgcaaagctctctgccaattcaattacaccatttctatgcaatgctccattaactcaaatgtttaagcaatgtcttgtcctttattaaaaacaagtgtattatgacccaaaactaatttagaccaaagcactacatcttaaacatcatgcaacatgataatctgcttactagaacataaaatacttaaaattacaaaagcaaaaatacagtattctagaatgcaaggtgattaaataatccatgcaaatataaactatgaaaaagtttgtcaaacaataatgaaattatccataatttgacttgaatgttctactgacacctcatattcaaagcatataaaaatgagttaattttcttttcccatcctgcgtttccctttttctatcaatgtgggcaataacttccaaataccatactgaaattaaactgtataccacaattgggctcttcctatctttccttctccctttgtatctgatcaccaagttttgccacttcttcacatttttccttgtattgctcctgtcaataatattattgcctctaaactcattcagagctttctcacttaagagtaacattgttggaatcagttcaattcagtcgctcagtctttgcaacaccatggactgcaacaccccagggctccctgcccatcaccaactcccggagtttactcaaagtcacatccattgagtcaatgatgccatccaaccatctcatcctttgtcattcctttctccttctgccttcaatcttcccagcatcagggtcttttcaaatgagtcagttcttcacatcaggaggccaaagtattggagtttcagcttcaacatcagcccttccaatgaatattcaatgattgatttcctttaggatggactggttgggtctccttgcagtccaagggactctcaagagtcttctccaacaccacagctcaaaaacatcaattcttcggcgctcagctttcttcatagtccaactctcacatccatacatgactactggaaaaaccataaccttgactagacggacctttgttggtaaagcaatgtctctgctttttaatatgctgtcttggttggtcataacttttctgccaagtagcaagcatcttttaatttcatgtctgcagtcaccatctgcagtgattttggagccccaaaaataaagtctctcactgtttccattgcttccccatctattcaccatgaagtgatgataccagatgccatgatcttagtttcctgaatgttgagttttaagccaactgtttcactctcctctttcactttcatcaagaggcttttcagttcttcactttctgccataagggtggtgtcatctgcatatctgaggttattgatatttctcccagcaatcttgattccagcttgtgcttcatccagcctggcattttgcatgatgtactctgtatataagttaaataagcagggtgacaatatataaccttgacgtacctcaggaggcaggtctggtggtctggtattcccatctcttgaagaatttttcacagtttgctgtgattcacacagtcaagggctttggcattgtcagtaaagcaaaagtgtttttctggaactctcttgcttttttgatgatccaatggatgctggcaatttgatctctgattcttctaccttttctaaatccagcttaaacatctggaagttcatggttcacgtactgttaaagcctggcttggagaattttgaacattactttgctagcgtgtgaagtgaagtgaagtcgctcaatcatgtctgactctttgccaccccatggactgtagcctaccaggctcctccgtccctgggattctccagcagaaatactggagtgagttgccatttccttctccaggagatcttcccaacccagggatcgaacccaggtctcctgtattgcaggcagatgctttaccatctaagccatcagggaagctcatcactagcatgtgagatgagtgcaacggtgtggtagtttgagcattctttggcattgcctttatttgagattagaatgaaaactgaccttttccagtcttgtggccactgctgagttttccaaatttgctggcatattgagtgcagcactttcacagcatcaactgttaggatttgacatagctcaactactcccatcacgtccactagctttgtttgaagtgatgcttcttaaggcccacttgacttcttaaggcccacttgaatactaaatcaaaataagacacaaactatctcttgaataatcccactaacatcatcagtctcttctccctcccattcacccttcatttgtatccaaaatgattcatttttaggactatccctttcatctattccttattcaagaaattacaatggatcttcattgctgataagattaagtcccaagcccctccccatcagcccaccactaaacataggcatccccactaccatcaagcaatacactctgtcaaggcctgaaaacactgctgggcaatatgttctgccctttggatatgcttaataaatgttcatggaaagaaaggaaaaggagaaggatgaagaaagtgaggatgataaatttggaagtgagatagaaaaaaggaagatagaaggagggagatggaagaaaggaatataatgaggaacaagacaataaatttatcagatgaacagggcagagcaggggtaatccaatcagttgtcagctgcttcgtgtgcaaatgatttctcccattctgactgttgtctttttgtcttgtttatggtttcctttgctgtaaaaaagcttttaagtttaattagatcccatttgtttatttttgtttttatgtttcttactctaggaggtgggtcaaaaagagtcttgctgtgatttctgtcaaagagtatgtaaatcagataactagtgagaacttgcagggaggtcagcctggcactctctgatgacctaaggaaatgggtgggaaggaggttcaagagggagggcataaatatatgcataaagctgattcactttattgtacagcagaaactaacacaatattgtaaggcaattatacttgaattaaaaaaaaatacatatcaagtacaacattcattctggtctctgggctgaggctggaattgatactcctccttctgtatttaaccagatgagtaaacaaattttacattctccaacagcacgtaatcatccattttaaaaacaagcatgaaatcacatgaagctcattctagactttcactatttcaaactacttgttaaatacccaataggactctcagctcaaagaactgagtgtgccttgaaataaaggacgatcatatcacatatactgtgaaatctcaattatattttctcatgatttaaatggccttctggatttagtatatgtcctatattgcaatcttattgagttttcttcttaatactactagcaacaataatggcaaacataatattcaatgaatgctaactatgtatcaggtacttgtaaattatctcattattaacaactttataaagtgggtattttgattatctttatttgaagaaagcgaggaacaggagggtcaagtaaactgtacatgctaacatagcttgtaaatataattttagaacatattttttaaaacagtagtattccataacataaaaattcataaaaatctatagttctctgatttgtcaatattagaaatatcaaccacagttaaagaatttgctcataaaatactttataattctttatttcaaagaggctcacaagttaataattagaaccccatctattagtgataaatgtgcagaacatcatggacttgcctgtggccagctgaaacatgaaatataaaagcattattacatcattagtcctcattacatccctgaatcagctactattatggtgtactttttaaaacagagacatgtgacacaagttacataaaatttcaacagccaccaaaaataagtgcataacaaagagatgaattcatattttctcaatatcaattattacatctgaattccacatcacatgacccttttaaaggtcatgtgtgggtaatacatgcagaatgttaagaatttagtaattagtgttataatggaaaatcctgcctcctacaaaattaaaagaggagttagtcatatacaagaaaatatggggtcttgtcttctttgcattacagaaccatagagttgagctaaaattctgatataaaggggtttagctctatcttttactttactttttactttagtggccctcagggagaaaaaaaaagggggcactggaaacccccaaattactcccattaatcctacatatagcaagaaattctagttccttctgctatgtgttctgacaggacaaagggcacactggtaaatattacagagtaaatatcctttcttccacattctgaaaagtcaacctttggggctagctctgaagatgtacaagacaatttctctaataagctgaatcaaggattcttgcataaatcaagagttaaaaacaagcatacattcattcataaattcaaaacctttaagattttttaaatggagaggaatacacagccattgtctcctatcagcttttggcactccaacctccacagaataggaacacttgcactgcccttcccattttaggaagtgccttttcaggtcttaaaatcccatctcttttcagaaattctaaaaaaagtgagactaagacaaagtaaccaaatgatacaaatgtaagaagaatttgaatgtataattacgtatattgatataacaatgttatattgtatattgataataacaactgcttgaaaagatgctgaaaattttatcaatgagttaaatttatacccttagcaactaaacatgtaaataaaatgtgacattcattctttaaagaaaagtcagttattcagaattcatgctgaacactacatatctcattgatatgtagtgagcttattttgcaacagtgcacgactgctgaaattagaacatatcataacactattaaaatagaagccaattgagaattctgcctcattagtcttgtcttcctattttcagatgagctttcatggcaagccactcctgaaccacagccacctactattacttaatagtagataaaataactccctctgctttccagactttccataacttgctcctagagctccatttccccatattatctgacaatctgcctcatatggaatcattccagaactgccttgagataattttaagtactaagcatcctaaaacacctcccaaagtacaaagttagttctaagtaggcatttataagcattacatgctacttgggtcttccctgatggctcagcagtaaagaatccgccctcaatgcaggagatgcaggagatgcccgtttgatccctgggtctggaaagatctcctggaggaggaaacggcaacccacttcagaattcttacttagaaaatcccatggacagaggagcctggtaggctatggtccaaaggttgcaaagagtccgacatgactgagcatgcacacacaccctattttctctatccctgaactgatatactatttttccacactttaccaagtaactctttaaaatcttacactacctgtagtgttattaactatgatttatgtctcagattttttggaaaataaagttataactcataaaaatataaaatgtaatgcaaagatatactttaacttattctttattccaatgttactgcagtcattacaatttatttcttaaactaatatattatttcttaaacttaaacaatttatttcttaaactatatttatttctttatatatatttcttaaactatatatatatatatatatatatatatatatatatatatagttaaaattcctgaaacagctttggctgaaaatagacttcttatatgaaatattctttgaaactttaatatttgcttaagtttttttttaaaaaaagaaatattaaaggtatttcccaaagtaaacagtgaaaaacttagagatctaattaaaagacagtcattaaatgaacataaaatgttaaaaattaaaattttatgcaatatcttaacagtaattaacatctttgagtgagtgaagtcactcagtcatgtctgactctttgcgaccccatggactatagcccaccaggctccttcgtccatgggattctccaggcaagaatactggagtgggttgccatttccttctccaggggatcttcccaacccagggatcgaacccatgtctcccgcatttcaggaagacgctttaacctctgagccaccagggaagcccatagactaaatttttattcacattgcttttgtaaaggcttttattaagcccggttcttttagttgctgacaaaagtgggggaataaaatcaaactctgaaatcactgataggtcaaattcttatttgtaagcaggtattttgtttatcttatgctacacttcagtatttaacaaattaccactttctaaaagaatatttttgtcaatcgtacaccaggaagttattttatatctaggtacatttatatttaggcaaaagaagttgcaaactgcagatcagatcagagtgggaagggagtttttatcttcagttttctggctctcttccaaggaagaaaagcacaaggaagaagcctccttgggggaggtcccgagaactggatgctctccacatgaaacagatgtctgtcgctgacctgaccactggcccagctctcactctgccagtaatgatcctcacaaagagtggaacaccagctgggaccagccaagaacctggccatccttgtgcaattttccccaacatttgtactcattgtgaaagtagacaatctcatgtcttgatgtctttaaacagagctgtttttgaatgttgcaattctgaattagattttaattgcaaataattagaatcttgcatcttcttcatgagaaaagtatcatgtgactcaatactagtgatcaaagattaatacttcactagcatttgtagttaagtcatgtgttggaagaccaaaacaaaactctaaaatgaacaatctggctgattagtaaattaatactttacatagaaaattttatatttattactctccaaaaatctattgaattatttacttctttactttctgagtaattctcaaagaatatcaagtgtataaaacaaaaatcactatatagattatatttcatagtccatcattttaatcattctttccaatagtccttcatcttccttgctcttttctatgcaataagggaaaaattacaaaccaaatccattcataaacatagatgtagaaactctaaagaaaatgttaccaaaactaccctgataagaacccaagccagatttgccatttgagaatcaaataactaaacaaagggggaaaaatatgatcaccttggtacatgaaggaaaaagtgttttgataaaattcaatatccattcataataaaagttctttatgaagcaggagtttaggggaactttcttaatcagataaaaattgatttttcttcctaagaaagacctgcaacattttgttgtagacattgtgcacatcagaaaacatcaaaagctttcattccaaaactgctaatgaggcaagaattttcatcactgcaatttccattcaacattgttctagaaatcctgttgctgctgctgctgctgcttctaagtcgcttcagtcgtgtccaactctgtgcaaccccataggtggctgcccaccaggctcccccgtccctgggactccccaggcaagaacactggagtgggttgccatttccttctccaatgcatgaaaatgaaaagtgaaagtgaagtcgctcagtcatgttcggctcttagtgaccccatggactacagcccaccaggctcctccatccatgggatcttccaggcaagagtactggagtggggtgccattgccttctccatctagaaatcctagtcagtgcaataaggcaagaaaagaaataaaatatggaaataatctttcaaagaaagaaataaaactgtcttatattttcatatataaaatccaacagtctaaacagataaacagaatatataagcagaacaagatcaatgtaaaaatttgcctgcatttttatgtataataattagaaaatgaaattgttatatataaaatgtatacattttatgtataataactagaagataaaatttaattatatcatttacaatagtgtcaaaagcggctaaatacccaggaagaatccaaatatacaagacttctataaagaaatctagaagacattaaatgagaaattaagcaggactttatggatatgtcatatggatagattagaagataattctggaaagatgtcaatgcttcaaattgatctattaatccatttaaatccaataaaaatcccttttattcttttgtagaaatcaacaatatatatatcaagaatagccaaaacaatcttgaacaaattttgaataaaatcaaggatctgttgtaccacatttcaagacttataacacagctataatatttttaggactctttttagctttttatttgtcatggcacatatcctaaataagccaatagaagaaaaaaattatatataaaacagatccacatatatgaacacttttcaaaataaatgttatgctaaatgttttaaattcctatgaaatatctcaattgatttacatgaagtaaacttatttacactgctttcaaaagttttaagttcactatttctggattttgataaaaggaataaatcaaagtttgaaatggataaattgagctcttaatttcaaagatatagtttagtttagtttatgctgcattccaaggcttaatgtatcactttttctataaaagttttcaccattgacaggattagtcctcttaaagcctaaagatagttaatctaagtctcctttgtaataccttaattttatgaatttttattcctgaaaatattctggaacccattccaattaacacaatacttagggtcaccaatcatctctactttgcaaaatccaataatcagttctaaatcttcatgttctttgaattctcagcaccatttagccaattagtcttaccttttgaaaaatcttttatcacttagattgggacactattgcctcagctttttttattatctccctactttttcagtcttcctggttttctcctcatctccacaactgctaaaaatcaaatacctcattgttcagtccttggactttttctcttctgcatataatccattccctacacaattttatacaaacttatcttacaatatcatttatatggtctgacttcaaaattattatcccaagtttagactccttactgatcttccaactcatatattccattgcctacctgactattcaccttttgtatatctaattagcaccttaaattcaaaatatctaaaggctaatttcttgatattctcctctaatccatgatttccacagacttccccatcttggtaaatgacaatccttctacttgttcaggaaaaacaaacaaatataaaacataaataatatgtgacaattttaactctcaacccccacctcttttactctatttatataaaacataaataatatgtgacaatttttactctcaacccccacctattttactctattttttactctgtttaactctcaacccccacctatttttactctcaaccgccactcttcactccacctatcagcttgacaattaagatgtacacagtatctgtgtacatggctaacttcatgactattgcccaattcaagacatcatttatcaacttgatgactgcaatgtcctcttaaccttccttgcttctgcccttctgccagctttgcaggataccttacaacaatctgagtgatatctttaaaaaaacaggctgaccaggtcactcctacgttcaaaatcctacagtggcttccagtgttgaagttatagccaaagccactattgtgtcttacaaggtcccacatgttgaggcgggttcaccaagaatctaaaatagctgaactttcagtctctcacttacaaagtccctttcaaagaccttgaaggaaacctagaagcttttgtcctcataatttatttattgcttttgttaaagaagctccgccttgtgtaatccccaggtcccacaacctggattcacccacatgtatacgatctagccagccacaggagatgctcacttcctctccttctaccctctcaccctgctcacagcaactatacttgtgcaggctggtcatgggatgagttacacaaccccagcaccactgtagcgccagtgaaggaggtactcacatatatgtatcataagtgaatgaacaagtgaatgaacaaatccatgttagggtcaaactgagacctcatcctccagagttactgatgtgaaacaagacccagagtctcctcttagcagtcagcgtttctctccactcactcaattaaagctcaccccggaacatggagcaggggaaacctgcacacatatttcaccactgaactcttcttgcatcccttcttcattcttcttctagcacaccacaagacggacaggctttttatttattgaccctacatcatatatcttctccttcctgctgaatgctataaatggagtcccctagggccagtagtgaatgtactactatagtaaaagagaaagaattcagaaatttcttccattttcttgtagcacaaatttaaaagtcataacctgaatatcatcttggtctttctatttgcattctttacattaccgaaataaaaaactgagagatggtcaggaaatccaaatttgctagcatgtatgtaaaattattgaataccatgacagcagaaaaaaatgaattgactgaaaattctggacagtgttacactaagaacaaaattactactagttctcttacttgtaccatagcttgtattttagttattaatgtctcagtcctctactcattctgtatatttcaacacaaagttcagctaataatctgttaatgtcagaaatattctcttcattctgtatttgtcagttgttggcattttcttttgccagtgctcataggcaccaatttttataacaccagtattataactgcccatcttgtgtttctgcagtttcccctctctagcatttattcacctaacttctcacaacagtccccagtttctctttgggtatctatccccatctattcacttagtcaatagttccagttatactcacctgaccctaccaacagagcgatgtggctgattacatctctgtctcccagtaacagcaattaattcagaccaagtcaggccaaacaacataatcagaccccatatcaggatctttgtttgacctacttgaggagatgactctcaatatctacaggaccagtgttgaggtaaagcgcaaacccctaatccagtttatactgacctccatgaactttcccttgtttacctccccagtattagatcatcctgcttctgtatggtatacttctcacactctccctgtctaatccctactcttcttctgggtttcagataatgagttattttctcaagtaagcttctacaactttcatacctgtgttagactgtctttgtatgatgcaccaaatcaccttctaaatgaacctcatctttcatacctatctgtaagcagtccagttattttagtactaacaatttctcaactatttacatggcatgtattataagcataacatagtattagttgctgtgaggaatataaaaaatgaaataaaatataaccctttagtttaaggagcataaacagagaatcttaaaactgagatgtaggataacagagcacataaaaaattttaaaacaatacaagatagtgttaattatgtgcagaataaatagagcagtccctaaatagtgagatattacagagccagaaattcaaaagtccatgatcttaatctgacaaaatcatgggcaggtatgttaaccagaggagaatgagtaagatgctaattataagtaaaatgaatagcaacttttagtagagtaagaaaccatactaagacacagttagtaaaagagctaaaaattaataactccattcacatttttatctctataagtgaagagcatcttaaatatctaaataaacatatttacagcaaagggatttttttagaaatttgagaagatacctctcactgtagagaaaacattaaggagaaatttctttaaagaacaagtgactcagagtatgaaagaagccaaaggaaacatatggtggagacagagcactgaagaacaagtactgctataataaagggtaaatgaagatgtattcagttctagcagggaggcttatattaccgtcaagttaaaacacatagaaacttaaccaagttgcaaagtgactaagaacactacataagaaatttcaaaacaggaagtgtaccaatctaaaacaaagagagaaaagttcttaatggaggtggaaaagaaacacagatgcacagtgcatttcaaagaaggattaacaatttcagtctcacctcaacagagatttgatgaacacatgaaccagaacaagttgacattagaatgcctagcaacaaaaaaaaagctgtaattttacagcgagagataagcaaatctttaacagaaacataagaagtggtttggcactattatgtttaagacacaggtgtagtttcctcttcaattaggggttataattatgatcgtttcttttatacctcgagaagcacaactctccccatcaattcccaagttagtacaaagacatcaagaaaaagactacgcttcaaaactagaagaatggatcattattcctaccagcaaaacattctccagtttaaagacagagtgtgaaatatataatcccaatacagaggaaagatttttaaaaactgttaaatttttaagagtgagtagtcttcaggcagtccttcctggttagaactgttgttaccacagttaaaatatgaaggatcacagtgactttccatgatacatattttcaaaatgtacctgtcagactggataaatatatcttctggttcccagcatgtgggtttccttcttcatatcccatttaaaacacaattcacccaacgagaatcattaacttcattacaagtaaaactaggtaatacaagacttcacaaataaaataggacttcaaagttctggaactgctacaggcataataatgataacactaagtatcaaaaatggcagactgatccttctctttggaatgaattatttaatacatttcactattacagcaagcagaatacacaattggcaaaacagatcagctaataaaataatgctatatgcacagaacaaataattgtcacagcactactaggtcttcccctcacagaaaacatgcatgaaccaaggatgattacagctcagaattaccctaaggaacagtgacacatgactataaggagtgctttgaaaagtacagatccgtatatatatatatatgggcttccctgggagctcagcagtaaagaatccgcctgccaatgtagaaaacgcaggtttgatccctgggttgggaagatcccctggagaaggaaatagaacccactccagtattcttgcttgacaaatcccatggacacaggagccttgcaggctacagttcatatggtcacaaaacgtcaggcacgaccgagtgactaaacaacaacaagatacatatatatagatagatagatagatatcttctattccatagcattcacagtctcaaaatcttaataagttggtcaaatttcacagtttgggatttttcttttcttcggatgaaattgaacttaagaacattgctagtataataaaatgaagaatagccacttaagcaaataaactactttcatgaactttagcatgctgattaacaaatcaaaaaagaaaacctgaaggttgaggcaaataatctgttattcaaatataaatcaatcttttctagttaactgaacaggactttaaaaagcatgatactggatgcttagggccagagagatggtacggggagggaggagggaggggggttcaggatggggaacacgtgtatacctgtggtggattcatgttgatgtatggcaaaaccagtacaatactgtaaagtaattaacctccaattaaaataaataaatttaaaaaagaaagaaaaaaaagtaatacttgctaagtttgcatatagcatatgcttaatttcaacagaaatttgaacaccaaaaacatacttttggggagtgcaggtaaaaagggagatgggagagagagtaactttggattcagatgtattgaatctaagataccctgggacatccaaggaaacactggcatctggcagttgtaaccctgagatttcatcttaggacaagctgaagatgaacatgtttaagttctatatcatttaaattagtagctaaaagttagagaagtacaaagaaaatatatagactatataagaactggtataaagtggtggccaagaggtgcacttttaaaaaatgttcaacttagaagatgggaaagcaataacaaccaagaagagaaatgggaagaaagctaagaaagaaaaggacactgagaagagagaggcagagcagtgatggcagaatggggataaggctcacgcagcctcccagggaacacagaccagctctgatctgccttgaagagtaagtaatggcagaaccacacttaacagaatccagagggctatcttcattgctatcagcttttcagggtttccctcccccttgggttttaattttgttacttgtggttgtttgttcatctcatgggttttatgagcttattttaccatttccactggattttacttctaatatgtctgatacctacctggaaacctggcatccacaatagctaaggttcagctaccaaacataattcatatggccacatgataaaatctgatgtaaaaaaaaagttaatccatcaagactgaagcaactatgaattaaatcaatagaaatatgagaaaaaatggcttttccttttccaattaattctttgggttcctaagttaaagctttaggccagctacttgaagaattctcctcatgattttagaatatataagatcctgcaagtattacagaacagcagtgtgtgaactggggacgaaggaaaaaacctttgataacattttactaatgacatttacaactctccattttactaacaggatgatgattagcagctaattatttaggccattaattgattgcctttttagtgattaaaaatatgtatgttaattatacctaaaaatgtaggtaatttaagaattgaaaagaatgatgctactttagcattttagtagataaacattttgggaaaatatatcgtgattaaaagaacactaaaactcatagctttctatttgcttgctgtttgtagtttttataataaatctaatttagtacaaggtttttttttggttttttttttttgcttttttaaacaaaagggcctggcttttcttgaaccattctctttctgataatgaacggattgtaaatgcaaaaccctgcatatcattatgtgaaacatttacgcattcagagtgtctacttggtggctttcttcttaagaagctaaacaattcattaaacaagctgctcgtgaatggtggatcagaacaagcataagctgccttccgtagaattctattgtggagctgcacccatttgtgttttctttgaagccataaaaatgaaacccttatgctcatattaaaagcataagaaaggcatctattatgtcaatagatttaaaacacggccttagacacagtgagaaccactccaaaatggcactcatataatagcaaaggttaagaagtgcattcccagggaaaaccttcaaaggcctacatatcattatatccccaaacagatggtattgcagtgtttggaaccatagttcgcggacacctacaatctcaaataaatcctttctaatcccactcttgtctagattttatactttgatggtaagtgcaggtgcttttcaccattcttcatagagtgacataaaatgatatgatgaagattcatatatattataaggacacagctcttaatacaacttctatgcaacatacaagtattctactagcaacagacttacattttatagaaataatcaattcctaacttctaaaccatgaataatcttcatcagtttgaattttacaggaaaaaaaaaagaggaacatacttctctcatatattgctagaaataaaaattgattaaaaaaaaaacacttctttgcaaaataatgtggaattctctagtaacaatgtgtatactctgaatggactcaaacacaagagatgaggataagaattttcacagcagcattttttatagtagcaaaaaactacaaataacccataagctcattgacaggaagacagatatttgaactgtgatatataccctgcaatgaaaatgaacagctgctacatgtaccaacatggccaacccttaaaaacaatgctgagcaaaaaagtcccagaaaactatctgaaatatttcctttatacaaatttaaaagtatgtgaagttgagcaacatgttattgttactaaggttcagttttttcaatcatttaaattctgctgagaaaaatcatactactgtcactaacagattaaagtaaaaaatttctgattctttgttacaaatctcaaatacagtggactgaacacaggttagaattgcacaggtccacttttatggagtttttctcactaaatacctactacagtactatgcaatttatgattggttgaatccatggatgtggaactgcatataaggagcattaactgtaaagttatacatgaattttcaactgggcaggggatcagtaaccctcatgtttttcaaaggctaactctactgaatacttttttgaatgtaaacaatgtacaacaaaattgcctatagataaatttctaatggatccctcaggtcaagaaaatttgtttaaaatatcacatatatcaaaatttaaagaaaatacataaattctaaactaaaaaagatagtaatcttacagttttaccataaagagttttacttcacagtttacctgaaacatcacaaggcttgtgagactgcagaaaatagttcctctttaattcctgtctgtatataagatgtggcttgctatgatcatcgtcatgttcactcccatctgccctcattataggttctaagaaatattcaccgtcatgtgctttaaatgttcccatctggaaataaagaaaataaaaattaattttcttctgtcactaagtagaaaaaatgtgtgctgtcccacaggttaaaatgaggacacagaacaagatagccaggaggagttcattcactaaagtcatcaactgaacataatgtttcctttactggctcacgtcttcttatgtataaagtcacggagaatgaataatattccaataaacagaggtgaaataacaggcattccagctaggaagaatagcataggcgatagcatcaaaatgcccaaaagcttagcacattctagaagtgagaaagcctgtttggcttggtctatgtaaggtaatagtgtgagacaagatttaaaaggaaggctcaggtcagataaaagatctcgagtgtgatgctagcaatctaaactttgtgagaagttgagagccattgaagagttttcacaaagacctgtctcctgaactccagaaggcaatatctaacttgctttttgacatctccacttagatcaacagtagtattctcaacctccacatgtccaaaaccaaactctttattttcagtctaaacctggtattcttcaatgctccctctttcagtaaatggcaacagcattattcagattgcttcagacaaaagtccttagagaaaaatgaaggatggctctctctcaaatctcacattcaattcatctgcaaatccaaatggctcagccttcaagatataattgaagtccaaccacttctcccaaattttaccactatatccatgaactaacctaactttctttccttcctgaactaaatcaatagccctctacagtctctacagaggagctacaataatttgtcttcagtcaagaccatgttgctctcaaaaaagacgaaaacaaaaaaagtattataactgttcaaatcactcagtaagatccaaattccttatcatggtccacaacgtcctacacgatctgcccactcctttccaccaccccatccctccaaatacacagaaaaccaaaagctccgacttcatcctctgctcttccactctggctcattctcgagctccattcctgatgtctctgctattctttaaacatgacaagtattctcgtagctcaggacctatgacttactaaacttgcctcaagcacttttcccagctggctccctctgtgacttgtttaaggtccctgctcaacactcatgaccctatgtattaaaatgttaccagcctcctatgtctatccccactatccaggttcatttttctccataatgcttatcactacctgatagattattacttatatatgttacctgtctgacaccatccaccaaaatataagtccatgagagtagagctttgtccgtcttctctgcatgcctgtcatgcctgccacatagcatattggataatatatattaaaggaatgaataatattgtaggcagtaaaatttaatctagtgacactgtgtgttgaaatactagatttataaggtagaagctatagctcggaagggaggtaacaaaacctaaattatggtgacagtgatggtacagcagctggaagagaaagattacatgatgtcagtgcctaaggaaagcagaaaaacagtgagaggaagaatttatgacggagataattatctgggaaaatattatttccaaaatgacttcagagatggtaaaaatccaacaaacctctttactaccaaacaatagaaaagataccagagttacatcatagaaactcctggccttgataatttcatagaggaatcccaccaaacctagcaagagcagataatcccactgttattttcactgtttcaaactatgaaaaaaaaaaaactagttatttttatatatagtgtaaacacaaggagaaggcaatggcaacccactctagtactattgcctggaaaatcccatggacggaggagcctggcaggctgcagtccatggggtcgctaagagtcgggcacaactgagcagcttcactttcacttttcactttcatgcattggagaaggaaatggcaacccactccagtgttcttgcctggagaatcccagggacaagggagcctggtgggctgccatctatggggttgcacagagtcggacacaactgaagcgacttagcatagcatagcatagtgtaaacacacggtaaaacctagttaagacagcacaaaagcaaaacaagtaccaaaaaaacccaaaacaaatataggacaagctcacatatgactatcaagctaaaaatcctaaattatataagcaaacacaagtctgtaacatgagaaaatgaccagatggagtttatcataagaatataactatggttcaacattggaaatcttaattcatcatagtcacttacacgaatgtgaaaaaaaaaaacaagttttttgaaaaaagtcaacattattgatttttaaaacatcaataaaatataaatagacagatgttccctaaacaagatgaattgtaccacagtccaagacaatatcatgaataacaaagatatatgcaaggcactcctacttaggtcaggaatacaaggatgcccagtatcacctgttgtagataacagaattagataaaagattagaaacaaaaaattggaagagctaaaactgtcatcttcatcaatgtacaccttaacaaataagaattgaaaaactactataaaaactaagtgaatttagtcacagaatatacagattaaatagtattcacatatataaaaaacaatgagaagatattgtggaagaagcaatccaatttataaatgaaacatgacccagcaacaccaccactgagcatatacactgaaaaaaccataatcaaaaaagacacatgtaccccagtgttcatagcagctgtatctacaatggtcaagacatggacacaacctaaatgtccatcgacagatgaatggataaagaagacatggtacatatgtataatggaatattattcagccataaaaagaaaaatgaatttgagtcagttatagtgaagtggttgaacctagagcctgctatgcagagtaagaagtcagaaagagagaaacaaatacagtgtattaagacatatgtacgtaatctagaaaaatggtatcgatgaacccatttgcagggaaggaatggagatagagatgtagagaatggtcttgtagacatagcgggggagagaaatagatctctttctctagtttggtgaggctaaattatagaggacaggcatttatcatcatctcagtagctaattctgaaatatacagcagatatcattcatatacattcatcatttatttccacctaccaataactctgaggcaagttattattatccttactttacaggtgagacaaaggagtaacagtgaggttaagcaccttgtccaggtcttacacctagtaagtaacaggatcaaggtgtgaacccaggtagcctggctccatagtttgtgccttaataccgtgcactgtgttagtgatcggacaccaattctgataaaccctcaaaacagctaacaaatatttaaagagcaggcagaggtcgagggactagacatacagaggtgaatgtgacaaattttctgctttcaaagaattcatacttatataggaaaagacagattaaaaaatgcaatatgcctggtggtatatcggtcctattccctattggtaataggtccaataaagaaaaaaataaggcagggagacagaatcccagagggtgtggggatggaggcactctgggctgaggctggaataatgaggaggtagccatggaaaactctgggagaacactgcaaacagaagagcagtgactgaaaggcccagtggcagggaaaagcttggcaggttcaagcgacagagaagagtgaggctgaagatctgcaaaaaagggatacccagcagaagctcaacaggcaggagccagctgcactcattacacgtgacagtgaaaagcactcattacgcctccaaagacacaaatatacgtttacctacatatgaaacttggcaaatttccacttagaaaagcatatttctgtgaagagccaattcagaaatgaattactgaattatggatgctaatgacaactacagttttagtgaatgaggcttcatttccatgtcttaattgtaaatatccttaagttatttagggataataactttgaaattgttgctttaaatttcattgttaataatatatttaaatcaccattttaatcgaatagtcactcaaagctatttaaatgattcaggcaattatagtcataaattcttctctacattcataattattaccacacaaaagtaaccaagtctttactatgtctacagttccaaaatctaaaccattgcctgagacatagcaggcactcaacacatatctacagaaataaacatttttgtaacatggtaatgtacctgatttccccacaccatattcacattacttatcttttatttttttctctaatatttttaagttacaatagtttagggacttggctgagagtagcataatttctttcaatgttaaaaatttaaatgttcaggcattcttggtaacaaaatatataaatatattaggaatacacagtttaaaggcttaatataaaggagatttcatcagatatatggacattctagagtagaaaagatacatatatatatatatatatatatatatataaaacaaattcatctgtttcttagtatattatattctagcatatttcattcattctaccagtgctttttttcaaacacaactacaaatcacttattttcaacacataccagaattctagctttctttgccttcccagaaaaataattaactatacttagaagtaacagactatttctgaaacctgagtaaatggactcataatgaaaaatcactttctgcctattttaaaaagcatgctgaggagggaaaatgtgatagcatcctggtaaaagatacaaatagacatgaggaggcttgttactcatcccaaaaatgttttgaataatgtcacattttccccaagcaatgctgaaaatatccatatcttggaaacttttttatattcctttttgatcaaaattttactgtggggtacttcagtggtaatgttcaaataaacccacacacaagcccaactttcattctcatatgaaaggtgaatatggttgtatcaagcccattagtacctcctggagtcatgctagaacactctaaaagtggaagtgttagttgttcagtcatgtccgactctttgcaaccccatggactgtgtagcccaccaggctcttctgtccatggaattctccaggcaagaatactggagtaggtagccattcccttccccaggggatcttcccagcccagggactgaacccagtctcctgcattgcaggctgtttccttaccaactgggccactacaaaagaccctagaatattaccctgctaaaaataatactgcttttataactcaaacatcttttcttcaacaaaatttcatgttttaaaagaattagttcaagaaaaaaataattgtcctcaaaggggtttacccatatttatcagtgaagaagtattttgcttccaacaattttcctataaaccactctactgcagaggactttctgcacaaataataaaaaatattagagctttgcctaaaggctcctaatgaagcacttattttttttttaaacttggaaaggaacctggtaaggcattggaagacttaataaaacaggtggctcatagaattatatttagagcatgccgtatttttagcaactgcctgtgcacagagagtcactgcaacttgattcatgagaaatgccaatcaaattccaaactcttccttttgatgactattaaaagcagaataactagctttcactttagcaaggggttccaaatttcttgaagcaataacctgctacttgccacactgttttgaaaggcagtaagtgattatacaacaagttctaatttgctctcataggccaaaatttttatgtttagaggattttcatacaattgtttttccaacatgtttctatttcactattgtgacattcattcatacataattttttctaataacatggcaagcacatgtactgtggccacaaacaataatgtattctcagactttattaaagggtaaaaacaacaagcacaaaatataaaccatttggactcttttcccaaaaacttacagctaatcacattaacattggaaacaacagaactagttcaaaatgaagtactactgaacaagacaattagagccaatattgagaatctattttagtaacaaattgctcccaactattaacaaaatcagattttaaggattcaaacactggtaattaatatcatgaaatcaaaatgtttagtttctcagtctttaatcattgctgctgctgctaagttgcttcagttgtgtccgactccgtgcgaccccacagacggcagcccaccaggctcccccatccctttaagtcatatgaaaatcactttgacactatttgtaataaggaagtctgaatcctcggtttgcactcatggaatcctgggcaagccacttcatatctcaaacctcagttccacaacttgtaaaacaaacaaataattctatctatctaacttccttagaaaggcaatgtctgttaaaatgatgtcactgggctttccaggtggcactagaggtaaagaaccgcccatcaatgcaagagacataagagatgtgggtttcatccctgagtctcaggaagatcccctggaggagggcatgacaacccactccagtattcttccctggagaatcccatggacagaagagcctggagggctacaggccataaggtcacaaacagtcagacaagactgaagaaaaactcagcacagtccagcacctaacttccttagaaaggcaaagtgtatgttaaaataatgtcaataacagttttgaaagtcagtacattttgacacaggatggaacagtctccactaaaaccacaaatgttacagcgactattttttattctaaataaagtataagtgttaagtaataaaagaagataaagattaactctgagttttatctttattttagggtgctctattcaatgcaaaaggacttttcccctgacagctcctcattattacactactaatcatgccgaggaaatggtgtatgatacacaagcacacactgaatgaatgaacagatgacaggaagaacatttaactggccccaggagcctaaggcagaagatccattgcaaagtgtttgaaaagatgcgtcttctctcctctggttcagttcagttcagttcagtcactcagtcatgtcagactctttgcgaccccataaactgcagcacgccaggactccctgtccatcaccaactcctggagcctacctaaactcatgtccattaagtcggtgatggcatcaaatcgtctcatcctctgtcgtctccttctcctaccctcaatctttcccagcatcagggtctttttatatgagtcagctctttgcatcaggtggccaaagtattggagattttgcttcaatatcagtccttccaatgaacagtcaggactgatctcctttaggatggactggttggatctccttgcagtccaagggactctcaagtcttctccagtaccaaagttcaaaagcatcagttcttcagtgctccgctttctttataagtccaactctcacatccatacatgaccactggaaaacccatagccttgactacacggacctctgttggcaaacaaagtaatgtctctgctttttaatatgctgtctaggttggtcataactttccttccaagcagtaagtgttttttaatttcatggctgcaatcaccatctgcagtgattttagaaccgaaaaaaattaaaggcagccactgcatccaatgtttccccatctatttgccatgaagtgatgggactggatgccaggatatttgttttctgaatgttgagctttaagccaactttttcactctcctctttcactttcatcaagaggctctttagttcttcttcattttctgccataacggtggtgtcatctgcatacttgaggttattgagatttctcccagcaatcttgataccagctgtgcttcatccagcccagcgtttctcatgatgtactctgcatagaagttaaaacaaggtgacaatatacagccttgatggactccttttcctatttgaaaccagtctgttgttccatgtccagttctaactgttgcttcctgaccggcatacagatttctcaagaggcaggttaggtggtctggtattcctatctctttcagaattttccacagtttattgtgagccacacagttaaaggctttggcatagtcaataaagcagaaatagatgtttttctggaactctcttgctttttcaatgatccagtggatgttggcaatttgatctctggttcctctgccttttctaaaaccagcttgaacatctggaagttcacggttcacatattactgaagcctggcttgcagaattttgagcattactttactagcatgtgaggtgagtgcaattgtgtggtagttgagtattctttggcactgcctttcttagggattggaatgaaaactgaccttttccagtcctgtggccactgctgagctttccaaatttgctgacatattgagtgcagcactttcacagcatcatctttcaggatttgaaatagttcaattggaattccatcacctccactagctttgttcatagtgatgcttcctaaggcccacttgacttcacattccaggatgtctggctccaggtgagtgatcacactgtcatgattaactgggtcatgaagatcttttttgtacagttcttctgtgtattcttgccacctcttcttaaaatcttctgcttctgtcaggtccataccatttctgtcctttatcgagcccatctttgcatgttcccttgctatctctaattttcttcaagagatctctagtctttcccaatctattgttttcctctgtttctttgcatttattgctgaggaaggctttcttatctctccttgccattctttggaactctgcattcagatgcttatatctttgcttttctcctttgctttttgcctctctccttttcacagctatttgtaaggcctccccagacagccattttgcttttttgcatttcttttcttggggatggtcttgatccctgtctcctgtacaatgtcacaaacctctgtccatagttcatcaggcactctatcagatctagtcccttaaatccatttctcacttccattgtatagtcataagggatttgatttaggtcataccttaatggtttagtggttttccctactttcttcaatttaagtctgaatttggcaataaggagttcatgatctgagccacagtctgctcccggtcttgtttttgctaactgtatagagcttctccatctttggctgcaaagaatataatcaatctgatttcagtgttggccatctggtgatgtccatgtgtagagtcttctcttgtgttgttggagtatttgctatgacccatgcattctcttggcaaaactctattagccttgtcctgccttattctgtactccaaggccaaatttgcctgttattccaggtgtttcttgacttcctacttttgcattccagtctcctataatgaaaaggaaatctttttggggtgttagttctaaaaggtctcataggtcttcatagaaccattcaacttcagcttcttcagcgttactggttgaggcatagacttggattaccatgatattgaatggtttgccttggaaacgaacagagatcattccctggtttttgagattgcatccaaatactgcatttcagactctttttgttgaccatgatggctactccatttcttctaagggattccggccaacagtagtagatataatggtcatctgagttaaatcatccattccagtccattttagttcaatgattcctcgaatgtcaacgttcactcttgccatctcctatttgaccacttccagtttgccttgactcatggacctaacattccaggttcctatgcaatattgctctttacagcctcggaacttgcttctatcaccagtcacatccacaactgggtgttgtttttgctttggctccatcccttcattctttctgaagttatttttccactgatctctagtagcatattgggcacctaccgacctggggagttcatcttttagtgtcctatctttttgccttttcataccattcatggggttctcaaggtaagaatactgaagtggtttgccattcccttctccagtgggccacattctgtcagacctctccaccatgacccgtccgtctcggatggccccatacggcatgccccactttcgctgagttagacaaggctgtggtccatgtgatcagattggctagttttccactaacgttctttattccccactccacaggacaactccagatctccagtgtgaacatgagaggaaatactgctgatcctcaccgaaaaagacgatgctctcaccacgtcctgacccatgaggattaagaatataagacagactctggattcatctacccaagattcatgcagccaaatgactcagctatataaacagtgtcccagagacatcactaacaaggagtaaattctgtaacttttctttttcctggaggaactgagatgtgtttgaagtcacatggactcactagaagtggagagaactatcaaagaaatggccatattcttgtggggtctgtgtagtggtcctcagaaaagtctctcccaacctcttactaaaatatctgtgaagacataaggcctaaagtcattataacaaattataaatttaaaacaataagaaatgattaagaaccactccatagatgtataatggaaagatgttcataatctagtgtcaaaatattttaaagtagtattacttaacaaagatttatatgtaagtattatatatataaaatagttagaagcacacatattatatacctgccagaccatctgtcatatttacagcatatgttttcctagtttcactttaaattttcaatttatttacaattattctgacacatggtactcttcaattattaagcaaatatcatctttatcactcattatgtcttcctttacatttttctctaatgattataatatacaagaagtttattctatcaatacttctttaatacagttggaatttggtttaccaaagatgagaattcaatattttgcttctcttcatagaagagtcttggaattcacagatttaatgtaaatgccttttaggttctggtaactgtcacaggaaactaatttgaagcaattaccaaaacttgacttcccatcagaagtcaacctggttttcgagattacattttccaagatacatgagcctagactaaagaagccctggacattttcattgtagaataatctacagaccctcagaactaccaacattctgtaggaagttaaaatttgaattacagtcatgctgtatattgggttggggtggtgcagataatttaccttttaattcagtaattgctaaaccacaaggagccacatctgaactttatagcaaagactgtgcattactcagagatcctgcacatgagcagaaacagtgcccctgaaggcttgtctccttatatacaatataaatatgtttgaagtgtaagaagagaaaagcacaggtatgcttggtgcacagaaaaacagcctacagtgaaaagtgttggtgatcaccagaatctactgtcctctcttcctcatggacatagcactgtccctcattttctagcccctgacatctaggcagaaccagggaacaaattttcatcaacaaaatgtagacagaagtggtgtgtgtcacgtttggactgaggaagtcaagaggttaggcatgcctttccaattctgttactatggtaataaagcattttatgtaactcatgaatatttttaattaatagatttactgctgttgtaataaggacacgactgtatgtcatatataacagtggctggtacataagcactgataaggatcagttaaaaaaaatgatctatttcttcctctaaatattagtatgaaatggacagcttaagtaacattattttatgggaaacagcagttacaagatacacagaaatacagccacaagtaacaaaggtacagtgtaagcccatgtaagtgttagtctgtcagtcaagttcaactctttgtgaccccgtagactgcagcccatcaggctcctctgtccatgggattttccaggcaaagatactggagtggtttgccatttccttctccaagccatataaatgaagtaataaatggaacacaactaacttggacatctgaaaaagattcaatctatatgaaaaaaattttaaatatgtccaagtatttcaactaaaattgataaaatacttttcttgcactgaattccagaaaagaattaacctaattacctggaacatataaataaaagttgctctagatcattcattcaagtaccaaacatttctatatgctatactgggtgctaaagtaaacaggactatcattctcttacttaaaatctataaatgacagaaacatggataaataaccacaattccatatatgatgtatataaagtctggtggtggaatgaaggtaggcctggtcagctcttcccagagaagatcagggcaaagaaagcaagtaagatgagtaggagttttaggaaaaggacattctagacaaagagaagagtaaatatgaactcaaatccttctgaagattaaagtatacctatggtaaaatcaaacaaatatttctagaataagtatctgtttcttgccacctcctcctggtattgactttcttggtcaatggctacaggatcactcaagtcatttaagtcatgagtcattaaaaccatatttttcgactgctcttctgatccaaaattctaataggtctcctacaaggttgcataacttcagcaccattgacattttggtatgcttcattgttctgggcattatgggatgtttggcaacatatctggcctctatgcacttggtgccactagcttcccctgcccgctgcacagctgtgacaccaaaagtttccccagacactgccaatgttccctaggggacaaaactgcagttgagaaagactggtctccatgtgcactgcccacagggacccactcttcttgccactgcaactacattactcccagcggctcccctaccctacccatacaggggtcgtccttacacaacggtggtcttctcagtgcctcctctgcccctgcacaatgtgcataagcggataccactcctaacacatcgggctaatataccacctacagtttaagcccttactctcgtaatacatttcaagccttaatccgaacttaactttaatattctccctcacttcccaagccactctatgcttcagcagctgagacccacaggaagccctcaaatgttcatatccccaggtgtttagtcatccctaagtccagctgagaagcctcctacagcctaggtctcataacactcttacctgcgcctttctcaaagttcacccagcacttcttatactcctctgttaacagcatcgaacagactatttcattgagcgggtgtgtgtgtgtgtgtgtgtgtgtgtgtgtgtgtgtgcttgacatcacggtgtggtggccctgagcaggctgagcataattagctaaggactcccacagtgggctttgaaagccatcgtgcttatgccccagcagtatctcacatgcaccggtcagccagtaaccaagtgtggcctggctatgaagaggaaactttctcttaggagggattcctctgccagacaaacagttttgagggggagctttgtggaaccttgcttagactgccctgcagcctggggtacttctacccaacactgtcatcctctcttcactggtttcagactccactgctctctccttctctctaacacagacactccccctaaataaactctttgcacagttaaccccaccttgccatctgaggacctaggctaacactacaatgttaaaggcagaggcataagaaagtctccctagtggtgtttacttaactgagtatgggaataaataaaaggggtccttgtgaattttaccaacaaataatacagaatagcatgtgtaatgatctaaggctctaggacttctgagcaaatagaaagtttagaaaataaaagttttacaagacaaaaaaacagtaaagagactattgatggtttccatgcagttatttcctgtctgaacaaggagttactagagcacctcaataatcagtcatcagagggcattagtgtctgacatgctgcagaatggttcacatgagaaacttcaaaaaagtacacacagacactgcaagctactccgtgagaatactgtaaaagccagatgcaacgtctggttttatgacatctggaaactgtttctttcaaccaaaaagactgcattgcttcaaatcccaccaagaaacagtgaagttaattgtctaggcagtcgggttagtccctgagggcctttggaagaagggaacccaccaggtaatgtaagagagctggtagagagacaggggttgtcgggaacgtctctgtacaatttacacatgccatcctgaccaggatatgcccccaatattatatcttatggaatactgacctctactttggcaactgtctatcaacattatgagaagataaataatatgaccgtgaaaaaaaaagtctgtagttgaatctaggggtattaaggcctgataactatatagtctgtgactttatcaatgaactaaaaacagagtttgattagccattatatcgcttatagataaccttatgatttggctctattttcatatctactatagattttagaaacataaaaataaccagaaatgtttgagtatgtgataaatacttatgagaaagaaaaattacagggaaggtaagattagaaaagcaaagttatacccacatgaaacaaagaaaatttctggcagactcatcgccccttctggttcttgggcccaaaacacttaagaaaactaaataatacaagttatggttcagtggtttaatgaaagagaaaaacatgtaaaacctaagacttccagaagtagggaaaatatagctgaatagaaattaaaagaaagcttcagttcatatatctgagttgcaacactagcaactaaaaggaatcaataaatatgttgtggtgtcagtttttttaaaggctgtatgttcagaggtgtttggaaaatagtaatttgtattttattcccttcctctaaaagtcaagttcctcagcagccaccagagaaaggaaggacagatgctacttcaagtgagaagctggaaggggaacaagtcaagtgaatgagacatgaaaggagaacttagtggattccaggaagaaaagaaggatgggtgcaaaggaaacagttgaaaggaggtgtgtgcgctgactcactggaggttaaggtctggaggcagaaagcgagttagatggtctaggggcactgccaagataagtgcttcagcgtgctacacaggattcagggaagggatttctctctgcaaggccctctcacacacacattgaactaaggggcaaggcagagtctggcaaggggaggaatcaagtccccataacctggagggtctcagaaccttagtggggtctggaagattaccaatggcatcaccaaaacaccttccatggggacagcactgcacaggaattaagtgaccctgtgtcgagggctgcacaatgcatccggcagacaagaaatcaaacaggtgttgcagccagaactcagagggacacacagcgctagagagaacccaggagggaatgagtcagtgaaacccagctgaacaaagaaaagccatcaggctcaatatatagctgctggtgccagaaaaatgcagagaccaaggcacaaaggacattggaggccagaggaactggaggacaatatgatttctccaccctcctctcaagcaatacaaaggcctcaaaacactttatggccctgtatgaggtcactttcatcaatggtcaacatttgcctgaatccagcaatgctcaagataatgaacattagcagggaaaaaaaattaggaagtttcacactcattcaagatattcgggaaaagcatttgattaagtacaacatctattcatgattaaaagcaaaactaaaagcaaagaacaaccagaaaaagagaacctcagtaagactcgctctaaatatccttcagtaaatctcaactttagcaattaacagactgacaaagatcaaagctggatcattacagcagcatatatacaaagtcacaaagatgagttgggaaatgagcaggaacagggctgtaggtgagcattactgacaacctgggcattgcatcaaggtggatttgcaaaaactcagctggttcaggttgtgggtaatgcaactttatctggatctaaaagctaatctgagatttaaaaaagaaatctggtgttataacaaatggactcaagcctaccagaaattctgccacctgacagaactatcattctaaagagtgctaaggagagagttgaagtagaaataaaacaatcataaagtgaaagctgctcagtcgtcatgtctgactctttgttaccccatgggctatacagtgtgtggaattctccaggccagaatacaggagtgggtagcctttcccttctccaggggatcttcccaacccagggatcaaacccccgcctctcacattgcaggtagattctttaccagctgagccacaagggaagcccaaaataatagctaatatctgctatagtactaatatcataagtgaaaaaaaatcaaagaaatggcactaatctcattagtgattcagacttataattggtcctcttcccacttctaaaagatttttagatcctggtacctctagttatctgctgtgttactagaaatcttctatctctgccatgactgatgtcttaacacagacttacacatacaaaaaaagtgagataaagctgagttatataggtatgaaaaatatgtttttaaatgttaaatcaaattaaactgataatatcaataagtctatcaaaagcaaagtacatacataaatcaaattaataacacagtataactagacaactatgtcctaattgacgaagtgagaggaaaggatgaacttctgttaagacttaaaaacattttcaaaaaggagatgctgaaaaataatttgaactacaccaacattgtgaatcaacatgagcagaaacatcattcctaataacgtttcccatctggacttttttccatgccttaaatactaaatcaagaaaacatactgactgtggcaaatttgtggtagtaaatctagaattgtccagacaaactaaacattttgaaagtttctagaaaagagaatatttttctttccttttatctgtagatggctgtgtaaatattagcgtgtttctgccattctgatgttgaattttacatttatctatagcaggaaagaaaattgtccaaggcattccttgtatgtataaatcaaaataataattatatctatatataaaataccttgagagatatatatgtaatatctttatatatatacatatataatatatatatatatatatatatatactaaaatagcagggaaaagaacaaagagacattccaaatctacttagtaatgaccaatactcacccagaaagacatcttacatcaattaccctggaaggaagtattatattttgcctagagggaactgttatcaattttctacttcatcagaaagtaaataatgttgatgttctgaaactcttctaaattttgaccaacaaaagccagaatacttgaagagaatcctgtagccaaattattagtgtctttttcttgaacacaaacttaagtttgtgtatgttttgatattaagtgttcacaactaagggttctgtgaacttggatagaaaagtgttacatctttattttccctaacctctgatacttaacatttccttcaattatgattgcaggtaaaactgcagacattgtgactttgttagcaacaaaagaatagttgtgcattcgtgctcagttgcttcagacatgtctgaccctttgtaaccccctggactatagtcctccaggctcttctgtccatggattctccaggcaagaatactggagtgggttgccgtgcccttctccagggaatctttccaatccaaggatcgaaccctcatctcctatgtctcttgtattggaggtggaatctttaccactgagccaccagggaagccccaaaataacagctacttcaacactaacataatgtaatatgaaactatctggattatttattctcattaccaccacagaagtatagaagtagtcttctccccaacagatattatttaatacattaataaagaaggaagtattatgacatcacaaattctaatacttataacattttgattattgttagtatttaaaagaaagtcaattaaagaacatgtatgctattttacacagtaaaattatgctggcaggaggtcctgggtttcccctagaatgctgaaaaagttgatggggagaaaaaaaagaaggtttagaacctctgttttagaatccaatatttcattttacttcctctctctacaatgagatttttacaaaatccacatcttttactcttgtcattctgataatcatttctcatttgctggcaccagatctttgtagatgctctacatttttaagtgtacattttaaacagacagattcaaccttttccctatcctgtaattcacagattaatgattatccccacactagccaaaaaaaccccaactcttttcaaaccctatattcactctctttttcttctatcactctttattcaaagaacatagtaaagtaaattcaggggtgttggcctcaacagagagtccagcatggatgtgtaagtgaaaaagcctgccttcctgctggaaaccgcacttcatgtgagggcaaagagccctgcctgcctccccgactagctcagcatctgacactttttctcacagctttgcaaaagagggtcagttttgcccagcagggagggacaggctgatcctccacacccctctgcccctgcaggaaggagtggcctctggcttgggttcatctaggtgttaacccctctggtggcgcattctgatcgcctgggtcccccaaccgcgcattcaggaaaagccaatgtccggcttactgaactggatcccaagaaaacgctaagggagcggagggcgcttaccaagcctccacagaggctgaagacggctgtgtgatcctcgcgagcattgacctggccgcggtagaagcagtggcgcaggtctgcgagcgccgcgctgcgctcctccgcccggtgcgcagaggtgcctaagtgcacctcggtgtatcccgcagccaggaaggccgcgtcggcgcttaggttcagctggaagagctgcccgtaggcgcggattcggtagtgggttctgaacggtgtgggctccagagtctccgagctgcgcttcctccggctgaagtggtggctctgcgggaatacttcgccgaactcattgacccgcgcgggggtcaccacttcgtaggaggccagtgtcctcactaaggcttctgcaatcacagggattcggccattgagccccacccgtttccaacttcccagcctcgaacttcatcaaccagacttcctttccaaagggccgaggccccaggtccccatatccccggccgggcgcgacaaatggacacacgctggccagcgcgcgcgcacacacacacgtgcgctctgcgagtgtgcctgcctgctttcccacacccccattctctccaccctccccaagcaggggctctgacattcagggtcctcagcagccacctccttcccgcgtccctcttctcctccctgtggccgccaactcgtgcccgctggcgccctcgccatcctgcccctcgcgcccccgccgcgtggtccccgaagggagacgtggtccctgcgcgcgcgattcctagaaaccccgcatagccgcagcctccggggatgcttcgggctgacggatcccggagttccgagagccccggcagggctacggtcccccaaaggacagagtcgctcccccccgcctccgtcctcccgccccctctggcccgcgccccacctcgctcctgaagtcgccccgcggtgaccttaccctgcctggggtggaagtgaacttcccaagacctggtgatgaagagcgagagctggtagagcagccccgtcagccacttgaccacccgcatggttccacccgggggatcccgaccggggaggccaactcgagccgcccgccgccccgccggcttcccagcgctccgctgcctctcctccctctcgcctgtcgctctccgcgccggccgctgcggcgtctcagcagcctccggagcagcagcctcggccccgggccggcccgtcgcgccacactgccagtcttcgctccctgagccgctgcttcatctcactgcagccccgcagcccccggctcgctctcagcagcctcgcttcgcttcttgcacccgcaccgccctcagaagccctctacaccagtccatcccagcgcgaggaagcaagccgacctagcaggaacggtgccaagatagccaccccgggccgggctagcgcgggggagagcccgcccccaggggccgcgccgggccaatcagagggagacgcggccccactccagcgagctgcccgcccccagctcccagccgcacgcggagtgccgtccctgagggctccc

SEQ ID NO: 104 - DNA, 7635 bp, Hippotragus equinus
  source 1..7635: mol_type = genomic DNA
gttaacattaaacagaagtggagaacaattcaccctggcgattcccatcctccaccatcattctacttcctgcctcccaacttaaccacgcccaggtaccaccctccgactcctgctgtaccccaaccccagcttaacagaaaaaaatctcctccaaaagagacagagtataagagtataggaaaagagaaagaattgaagataaaaagaacttagtttacctttaaaataatgactcattttattttttcttttaatatgtagttataaatatattttgtcaaaatatatgatcaatatggtcaaaacatttgcacgtaaagtcataaataaggtcaaggtgaatgtttagattttttttcctttttttttttttttaagataaaagtccagctataaggaagcagtctgtgtagtgtgtgggtgagtagtggatgggatgtgtgtgtgtgtgtgtgtgtgtgtgtttgtgtgtgtgtctccccaaggaaggcctgatctcagcggcacccacatccctccactaccatctcctgataattttttagaaccaccttgtcatactcatccaggtacagcatggagatggcgctgagttcggtgggaacacaacaggctttggggatactggaattgacagagttgaccagggtctgcacaatggcgtggttggttgagttgaggtggtcggccagtggaaaggggcagtccccgtggcagtagaacgcctggtagcctggtggggccacaatccagtcattccagcccacatcactgaagtccacgtagagcgagtggcgccggcagttcttattcttcttccgggccctctgtgggtgatgcttggggctacgcttggccctccggcgtcgggtcaaggcatgtccccggccatcatggccaaaggtgaccaggaggggccggagctgggcccaatccccactcccttgaggtaacgatcggctaatcctgacatgctggccctggtgggtccgtgtctgatggaggtgggtcacctcaatggccagcccataattgggctgcttctcccgggtccagcgaaggactgcagggctcacatcaaaagtttcccaccgtgtcacattgtggtggaccagtcttgtgtccagtagtcgtgtgatgaggtgcccaggcaccacttctgccgggggcttcataacctcataaatgtttatacgatgaaagccctgctcccagtcagggccctggtccacctgctcccggaagagtcgaagctcggcagacgagatcacctcattctctgggatgctgctgaggttaaagaggaaacgaaaagcagagttttcgctggtccctgggatgttctccagatgttctaggcaccattggggaggaaaaaaataggagaacagagaaaaaaagcacatgagctttttcagagactgaaaagtcaagaaatagctaagagctgggtgatgagtagtgaactctgtttatatagtggaagcctatttgggaaaaataagcatacctttaatttgacagagcagataaatgaggcagtgagcagacgagccaagcctagctagcattcagcaagcaccaaagacagaatctcccaacctcctttacatgtctaataatttccatgtgtcaactccttactccaccaccatcagactccccttttaaagccctcttggctttgtgtacacagttttctttacaagtggttgtaaagaagaagaggggccaacacagcagaggcaggagggaacatgcacacagccaccctctccctcttcttccactttcgagtatgttaccaaacatttccccagcgatcttggaaacacagagcatgccttgttgatcatgttacagagaggaaaataaattccaacacagtaatgatgctggtggattaataactcagatttactttggaaaagaaacatccgctaggaaacattcagatcggattacaaggcccctattgaataaacctgacaaacacacagctgtaatattaaattcagtaggtgctttgggggaaaaaaaaggcagaaaacctggcataaaaggctttgatatagcaaaaacacaccgcaggggctaacccacgtctgagtggtgtcattcccttctcaccaacccctcccttcccttctgtctccaaaaaataaattcagccacagctctggagactcttgaaggtaagcagctctcttttcccagtctcctggatttggggttctgatgtaacctgaattcctcgtcctcccacagcttccactgccccaccccagtccagattccaggtagggactgaccttcgtggtggaagctcctcacggtgttggcccgactggcggggcgctcaggatactccagaccgatgccctggatctgctcttcctcttcctcctccccagactgaagtctgtaaagatcccgcatgtaatccgggatgactgcgctcttgctaggctgcgggcggcggcgcagcccgaacatctgcagaagtgtggcctcgaagtcccgaaggagctcatggctctgccctgagcggcgtcctcccgcgtggccctgaatctcggcgacttttttcttccccgtctcaggtatcaaactagcatggctcgcgcctcctagcaggacttggcataataaaacgaccatcagcattcggttaccaggaatcatggtgtctctggggaggggaggaggtggaagggtaaagaataaataaacaccaataactagagagaaatggagatgtctctgcataggcgtggagagctacagctagagggtctagaagtaacacaggtcagaaagatcaagtttgtgtcttcccccgacatacaccgcccccccaccaccaccagctgcagccatgcacggcctgaaagtaggaattgccctgtaattacttggtctaacttgtttacagtcaaataaccccaaatcagatagcctccatcctgttaatctttttttgtcccaactgctatctgagccatgatctcagcctggcttcttcagggataaacagttaacagtgagaaggtaaagaagggtgggggagggagagttcaaatgccagcgctctcctctccacttcagaccttcaggctctctctcccttctcctccaccccccttcttcctccgcccttcctagcccgacttccacaacttccagctggttcggaggagggaaagcagagaagcaggagcagggtgaagacacggggcggcaggatctaggagcgtaccgagtggccagagggtttattttactgtggctgaggagtttgaaatgcccagcaaaaagcatctgatcgcgccctctcgctcactcccagggaagggggtgtgggaggggatgattccacgggcgacctctgtgagttttgacaagcagctaggagcgagccacaggggcactaggtgctcccagtcatgtggggaggggagcggtcagctcccccgactgaggactttccatttgttcagccccttctcgctcccctttcttgcaacgcagtgatcagagagccagtgggagcaagcggcactttaaccagaaccggtaggctccgagcgcagtggctgcccggcctagaagaaagcgacagcgctgccagaaagaagagtgtggactctggaaggaaggtccgacgggagggacacaaggcgagcgcgggcggggagggcagagtgaattcccgggaggagggaaggaagaggtgtctactcactgacagaaaacaaggcatataataacagtccatgattcttgacagccaatcttgaacaaacttgctggaaaggctcagaggagctgctgcagtgcgttgctctggatggcactacggaatggctcctaaaatgaatatttgaatataatgagactggcgcagacggactctgtttttcttccagcccctatgagtcacgtgagcgcagaggccccgccccacgcacggaggagcccgccctcccccaggcgggcggtgaaagggcccgggcgcccgcccccgccccccacccctcccgcccgcggccccaccccctcccggagaggccggcctccccgcccgcagccccaaacctccagcggatcgggaggagctcgccgtggcgctctgctgagccctcggcgggtgtccgggtgcggcgcgtggaggacgtggtcctcgcccctacctgtagccttcggggtgtcgggctgggccctcgtgccagcggcctgaagccaagggtctggggagtaccgtaggggttgcgcctttcagcgcgagcccgcctccagtggggccgagataggggaccgcggagtttcagccgccgaaagcctcaccaccgagggtcatttaaaaaggaaagcgctgagggacacacaaacacacacgccgcgcgcaacccacttcctccccagggtctcggagaggccaaatactgctcccagtgacagctagtcaccccctggcgaacgcctgagaatgtcgagaaaaactggacagccgctttagctcccagcccaaagctgcggaccctgtcgcgcgggacgggagggggagatatttaggcggttatcggtgtgggaaggtggtgagaaaaccgccgctaggttccttctccggttcctttacggagaaaaactccgcactacggcgatcccccgccaagcaaagcaaatccccaaagaaagtggtcggcgggccattcaaggcacggcggcggtcgcagggacgcaaggctcgcgacagactcgaaaagaggcgtctcctgagaaaaggcgcatcacacgtttcaggtctcaaggtcgcagaggttttacaactcccgacccgccgcagaaaggaaatcccaccgcattcccaggagtcgtgaaaaccgtgaacagctttcggcctgcgctcgacctctgcgtctgcgtctctctttctcgctctctccccagctcgtcttttttaaaccactactcctcccccgccacttcctcccccacccccttcctcctttgcaccagctgcagagtcgcagcaaatatttcttcaagaattttaccaacccacagctcaaggaattactagggttctgattctaatcaaagatgctgcctgcgtgggtcgctcagcacaggggccttaaaagaagaagaagaaaaaaaaaaacctgacctaccaactgcggcagccccgggccttttcaaaatcctgacccacgcaattctgcggcagccctgcccgccccgggatcccgagtcccacgattcccgctgcaaagcgcagggcaccggctgcccttttctggggctgttcccagatgctgcttcgggtcgcttcagagctcaagggctcaagttgcccacctcactatccctcgcaaacttgggggcacttggaggaagaggaggaaagggtcaagcgcttagccctctctccggccgcggctgcctagcgccgccagacaccgcactggccgagttgcggaggccgcgggcgcccctgcgcgacggtccacacccggtgagagtcgcgctgctttttgaccggctttaggttttcccactcccgagccacggctggggctgactgcgaaagggtttggaagagcaaagagttttgagacgcctagacccctcaaaatgcccgtgggaggagctccagaaatgggaaaagcagacgaagaagggccggtccccgcgagcgaagggacagtggaaagggcggaagccccgcagtccccagaccatcctccgaccctaagaatcttccagggcgccgcgcgagagcgcgctgcgctaaaacccagaaacctggggaagagggagttgtatttcaatttcagattcagaaggattcttctctaagcacatttttctcccccaattttcttaattaagagataaaagccgaaaatcactttcgtctccagaacattttcttgggggtcaggggtggatcttgtggcaattgtcttttgctttcttgctcgagttttctcctaactccaaagtttgttcagagctggcctcagtttaccaactcaatgtctttcggggttttaatgtctcacaaagacttcagctcataaaacgcaatgctaaccatccaccaattggtgcccgggaagcgtctaaggccgctggcccagctcctgcgggcagggggtctgcagggacctgaaaaccccaggaccctctcccgtcggctctgggccgggagggccagtaagagcagtgcgtccgatgtgcatctcgccagcgactctccaaaggacgggacaatccaggaacctgcgtccccagagcggctagcatcccggccatcgtcccgacagaccctacaccacgaatgatggcagagcgactccctggatgctccaagtccccgagaatagctcgtggagtaggcgtgttgggcaactgcggttcgcctgcgctcaggggctttcgccgactgggggctggctgggttgggtgacactcccctagacgcagccctccggcggcgcgcacgctccagaaaccacagaattgcgcttcccaccaccgaaccagcccaggttaggtgttctctctccacctcgacgcccctcaatcccctcactttctccggacttcagagccaccactcccttttctctccgactcttccagccagacagtcgcaaatgctagtccacgagcgtcatgttccgcttaagaccccacagtctttcccaacgacctccaacgaaaggcttctcctccccttttctcctgccctgaacctactaaacgctgaagtcgcccggggctaccaaacggagaaagtggtctgggcagaggcaatagtgtatatggaagtgtctttcagcaccagcatccctacatctagtaacctctagtaccaccgttgcgggggggaggacatattttgcctcgaccacaaccagaatcccctacttctcccctcaaggatgcgcctcagcacctccctccgcccttcgcccggtttagccttgctcaccataggtccctgcagtagcgggttcgccagcagcagctcctggggacctctgaacagctgcagtgaacctgggcgagggccgaggactggggcgcagcaggctcgagacggcgcggacgggaatcccatcagggagagaggcgagatactcagcactgatcagcagcgaagtcgcaggctcgggtccctcggctcagatgccaaactcacctaacttccgggccgagctccgctcccgttctctccctccttcctcctctgccttcttgtatctccttcctcctctttccctctctctttctttctttccttcctcctcctcttccccggcagcccctcccttcttccctcctccctcactcgcctccctttctgggatgggagccccgcccacatcctcccatccagccgccgggcctcgcctcgcaggccctggtcccggaaacccaggcagcgcccaagtccgccgctgccgccgcccgagctgggacgccgctgtgtccagctctgggaagcgatcggggcttacctggggaccacgtgcagaggtactagaaagcatgcaccgactagtcgcagtaccttccaaaaatacccatgggagtctgggcttccttgactttaggagt

SEQ ID NO: 105 - DNA, 25703 bp, Hippotragus equinus
  source 1..25703: mol_type = genomic DNA
gtgcccgtgagtcacgagtgtaaagtacgcccagggccttggcaggcaggtctgtgcaagggtaaggtgtcattaggtgaacgctgacaaatgctgccttctcgaactctggagataaaagatagccttcccgtgcagtcttttttatctctcccactgtgctggggtgggagctgcaggtccccgggcagcggggcagcgaggcagcgaggcagcgaggcagcgaggtgggggtgcgagcaggagtgcacgcgtgtgcgtgtgtgcatgtgcgtgtgtgcgcgcgcgtggccttccggcagctgtcccggcccccaccccaccccacccatcgcacccggccctgcgcgcagcccccacccctcgccgtgctgggtgcgccgcgggctgctgcgcgactagccggttccccagcgcctgggaggcgacccccgtgagccccgggttcaaaggcccccgcgctgcaactccagcccctccggggggcggggaggcgaaaggggtggtgcgggagccagaaaagccctaacccacagccggcagccctgagccgggatgggcagcgcgctctgaagtttgtgacggtcgcagccgactcctggccgcagcccgggacgcggcgagccagcggccggcctcgaagcatctgcagtttgagggtgaggcccgctgtgcccggcccgagcgccctttggcggccacaggcgcccgtcctccggcgcggtgcgcccgcgcccgatccgggttcatggagctggggctgtgcttccttttcggactcgctgtgacctccgccgcaggtaagcgggccgggcggcgcgcgtctcctggcgcgagcgcacacaaaaggaccccggttcgggggcccggggagggtgcctccccgggggagcgacgtgggggcaggctagagggcagaggctgagggcacggaccaccccgagggcccgggaggttgcagcccacacacaggcagacctggggcccggggccgacttggtcaatttttcatgaagtcgggaacttttccaaaagtttgcaaacgattcagaaactgtgcaaaacgattgcaaagtgttcagaaagcctgcacaatgcttgcacgttttcagtgggtgcagattgcttgcacgctgtggagtaagtgagaagagctcccaagattgtcacaaagtgtgcacacaacttgcaagcttttcagaaactgctgcacatagctttgcaaaattttccgaacatcaagagtagtttgaagacttaacaaaaagtgccctcagcttgcagacttggcagaaagttttgttgtccctttccccagtttctatgggatggtgggtgtaagggtctgcattcctaggaactcaggagcccctgcatctgcctcctgcaggatgggtgcctcacccccagtctggggatgctggcaggagcagcatgccccgggccccctctgcagccagatcggagggggacaccaaggagactgtggccaccatggcagcccggggtccaagccccagaagcccttggcgggagcagggaccaagtcagtttgggaagcagggggccgagggggtccctgtgcaccaccgagcccggcgctgtacatgttttacctacaaggacaaagagtgcgtctactactgccacctggacatcatctggatcaacactcctgagtgagtcagccctggggtgggggagttgtcccggggggaggggaggggggctcctggctaggcccctctcttcacactgaaggaggacctagttccttctgagcccagtcagcccagagcccacttggcacagccttcagccctcctgccaacccaggtcggctctgcaggtcaagggtgtgactctcatctcctctgagggcctggtctgggagaaacccaagcccagagtgtctgatctggtggaggggcaaatgaaacgaaccagccagagggattagatacctgagaagtccctctggggggaggaagccccgaaagttactcctgcccctgggccatgtgggtcctgcccctctgctgaccctgccaggctccaaggagtttcacattccttgaaagcagcctgttctctggggagtgcaggggtgggctaggcagggcctagtgaaccctcccccacggggtgacattccgtggaattcaggctccttacctcttgggtggtgagcccacagttcctcctctcccatatcacccctgcacccaacagctccccttctctcctccagtccgtaagaactctcttactgcaaaactgagacagtgccacctgagtccctcctggagtctccttaatataaagtacctcctgtcccgaggccgtgggtaatgactcagcttaggaaccccttctaaagaaacatcctcctgcaaactgtgaagagtgcttgacctcaatctgatcaccagcctttggaatttgctttcctggtctctaaattccaggacttggaccagacgtctctaggtgtctctgggtattcttgggataccttgggcatcctgcttagcctttccagagccctggacctggacaggcaactttgcttcagtgtttgggtccccttgatccaggggttcctttgtccctgagccatgtgacctctgagcaccctgggtgacagcttgatgggctgcacatagccaccttgttttaccgataccccgaggatgaagtgcaaaggagactgaacgtagcgggtgggatatctttcaaaaccaggtcatgagtcctctgagtacatctggtctggaaagtcaccctgctgtcctgcatggcaggcaggactggctccacccaggagcctggacacgtgtacaaggtcccggctcagaaggaccctcacagtttaaagtgtattcttgttgtcttgaaatgcttaatactttttaaattcaagtatagttgatgtacagtattgtgttagtttcaggtgtacaacacaatgaaatgcttaatattctttgaagcaagggctctacatttgcattttatcccaggccacccaatagagagctgaccctgatgccagaacttgcttgctgggttatgtctggtcagcacacagagggatgaccagaccagatcttaaaaagagaggtgtgctggggagggattcctggacaggctgccactgacagccttctattcccagacagcggtcagggccaacttctcctgcaatctccatcaccctgacactgtcctctctgattcttatcctcctggcatcgtcctctgactcaattagcgtcacagaaccctgggcaaccttggcaggaatcccaggctgtggttctagaaggagaaagaaggaagcaaagccagttaggggaaggggactttgcagaggataggagaggagaaaggagaggatattgggagaccacattagttctctgcctgttgccaagctctgagcactcgctgcatggaagcatttgctccgtccacatgacctggtgggaatcctgtctccccattctgagctatcatgtatgacctgagatgaagccatgggtctttggcttttcccaggatatccaacttgctaatgttcccctcacaacttgatttacctcttcccttcttcccagaccctgattcattttaaacacgagagggaaggattaaatatggtgtttgggagtttcataagctaccctgggaaacagaaaatgacaatagccagacttgagcattttaaagtcagacaagcaatgtaacctttatacggaagatgttcccagatggtctttctctgccttcctttctttcccttcctccctccttcactctttccttccttctgagaattgtctcttgctgtatgggcaacttcactggcaaactttaaaacattttggacaagattgtaaagtgaggggtgggctttagggaacttgggcttttggagaaatggaagcatctgaaaatgactggattgaactaaagggcagggtgacccacacaaggacttttccaggttctgtttcccattccctccccaacctaccatcagagccctatgtcgagggctcctctctcttagctgtcacccctcttcttcagtagaccttcctcatctcctgagacttctccaggtgtgatttgcatcctgtccccaccattggctgagctgggagacaacaggagtctgggtcttcatgcctaaattgagagtctggaactttgggtgatttttagcttccggtgtctttccttctactgccttccagttgcacggaagtagaggcaacaatcctgcttatctcaaaatgatgcttgggaagttgcaaggccttcttggagaaggtcgtttcagctgcgtttaagcacctgcaagctgcttaaggggggatgttgttcttgcatctcatgtggaaagttaaggctctagagagtagctgctcccagaggtgttttccaggcatgagatccaagttctctggtttcctcacatccttctaagcacttagctcttccagatctgagcttgatctgcacccagcacatagtagatgctcagtaatgctggtctttgctgtcactgaggttctatctgcaggactttctcccacgaatgaggtgtcccgtcccagaggtctcacatccctagagacatgtgcaggaatgtggatttttccggggctgttgctcataacttccattgtttcctccagaagatctcaggccccaaagagatatgagccaactgcatcccaggcagctgccttcttagacctggggaggcggcggagacggctgcccgcccacgaggcgagggatgttcatggctctccttggccctgttaggaagccactgtgccttcccccacccccagcaaccccaccattgccaatgaaaacaaagccccacctcagaggaaatactcatctcatctcatggtcatggaaaatatgccaagaataagatcataaggaaagaaatagggacaagtaggacaagactgaagcaacttagcagcagcagcagcagcaggccacatacttaaatccctatgcgctcggggctgttccacaagaatacttcaaaaacaggagtgtcttgtgacatggtgaaggattgtctctgttggtgtttccagaaagacggaactaataggatatgtatatacagatctctatgtgtatataaacacactacacacacacacagaggaactgatgttacagtctgcaatctgaggcatcctgaaggctgaattcccttcctactcagggcatctcacttctctctgtcagagccttcacctgattagatgaggcccacccacattataaagggtaatctgctttactcaacatctactgatttaagtgttaattgcatctaaaatataccttcctggcaacatctagactggtttttggtcacagatctgggtactgtggcccagtcaagttgacacacacaattaaccatcacagagttctcagtgctaaccataccctcagcagggcagcccctctgcacctgctaccatccatccacctggccgcagaatgaaaccactagctctgacagccgatgaagctgcagggcccccagcaaggagccccgctcagtctttcccacttcgttcctgagaactgagtggacctgccatctgttaatccctccaaggatgtaatgacagaggcactgtgatgcggtgacagtgacagtgtttccaaacaaaaatctgagccacatggtctgacaagcaggaatgtatttttggaaagagcagtgcaggatgtttggaatcacggctgtggtggaaaatctgggctctgtagactcgtgagaagactgcagccccaggagctctgcccggtgtcctgttttgtgattcgctgcatggcctggggatggtaccaccctctccccgtgcccccaggtaaggtgcaggcatcagtatgactctaggatggtgacctaacaaggtgaccagactggccacactgactcagccagcaggaatgatatttttccccaaagaagaggtgtaaaaataataataattattcaatatattctgccacaaaaaggcaacaattcaacagagtcagctttgcccctcctgttgttcaagagaggtatgccacatgtttctagggaggggacattttaagtttgagaacgtcccagtggaatggatggatctggttctccagcttcccgctgatgtgggactggctgtccacccactgtgtgatcacagggatcccaataacaaccatgtgacccacaagtcaggactgggagtactgttgctggagatacagcttttgaggcagagggatagtcttttgagcatgatcatgatcttgcaggcaacggtccacactgatgttgaccatgactcctgagagtaaagacatgtgaggatgacacgagagagtgtgtggagtgctctcagcacagtatctgagcacagcccactctagtgggctccgtacctcaggaccacaggaccatgtggataagtgtacaaccctgggggctgtataaccttccctgtcgctccacacagtctgtgattggaggagcctgggactaagaagctcaagtcctgctgaagtcggcttccttggacccttaaaccatggtcttacctagcttcctgcagtaacactgaggagcttgcacctgggtaccccagtttttccctacgccatgcctcttggtgggcaatctcttagcatttgttctgcatcgggtttacagaccctgggaaaaggtgtgtctggctgataagcagcttgataagcaacctggtggccaaaggttgttgaggcttgatgaggtttggtcctgcccttttctgcccctcctttgttgtttgcttccctggtgaataattggaatgtttggggaaaggggcatgaaggcattgctctggggctccctgtgctaaataagcaggtgggtacagtgacaatgggggtggggggagggctagggtgatgtggcagcatggtagtgggtctggctgtgctctgcttagttgctcagtcgtgtctgaggttgtagcctttcaggctcctctgccatggggattctacagttcagttcagttcagttcagtcgctcagtcttgagcaactctttgcgaccccatgaactgcagcacgccaggcctctctgtccatcaccaactcccggagtttacccaaactcatgtccattgagtcggtgatgccatccaccatctcatcctctgtcgtccccttctcctcctgcctgcaatctttcccagcatcagggtcttttcaaatgagtcagctctctgcatcagatgaccaaagtattggagtttcagcttcaatatcagaccttccaatgaacacccaggactgatctcctttaagatggactggttggatctctttgcagtctaagggactctcaagagtcttctgcaacaccacagttcaaaagcatcaattcttcggcgctcacctttctttatagtccaactctcacatccatacatgactactggaaaaaccatagccttgactagatggaactttgttgacaaagtaatgtctctgctttttaatatgctgcctaggttggtcataacttttcttccaaggagtaagtgtcttttaatttcatggctgcaatcaccatctgcagtgattttggagccccccaaaataaagtcagccactgtttccactgtttccccatctatttgccatgaagtgatgggactggtccattctgaaggagatcagccctgggatttctttggaaggaatgatgctaaagctgaaactccagtactttggccacctcatgcgaagagttgactcattggaaaagactttgatgctgggagggattgagggcagaaggagaaggggacgacagaggatgagatggctggatggcatcactgactcaatggacgtgaatctgagtgaactctgggagttggtgatggacagggaggcctggcatgctgcgattcatggggtcgcaaagagttgaacatgactgagcgactgaactgaactgaactgatgggaccggatgccatgatcttagttttctgaacgttgagctttaagccaactttttcactctcctctttcactttcatcaagatgctgtttagttcttcactttctgccataagggtggtgtcatctgcatatctgaagttattgatatttctgccggcaatcttgattccagcttgtgcttcatccagcccagcgtttctcatgatgtactctgcatataagttaaataaacagggtgacaatatacagccttgacgtagtctttttccagtttggaactagtctgttgttccatgtccagttctaactgttgcttcctgacctgcatacaggtttctcaagagacaggttaggtggtctggtattcccatcactttcagaattttccacagtttattgtgatccacatagtcaaaggctttggcatagtcaataaagcagacatagatgtttttctggaatgctcttgcttttttggtgatccagcagatgttggcaatttgatcgctggttcctcttccttttctccaggccagaatatttgaataggttgccatgccctccttcaggggatcttcccatcccagggattgaacccaggtctcctgcactgcaggcggattctttaccatctgagccaccgggcaatctgtttggaacccctttgttaaatgatgaaatcttagtaaggctgagtcccaacagagtaaacacaatgccttgcagtcatttctcactgtacacagcacctgggtctcagtacccaagacctgagtgtgggccaccaggaagggatcccaggaaataactacagaatttgtttaccaaaaatggtaaaaaataagaacacataaaaaaagatggttattgggacttccctggtggtccagtggttaagactcccgctttcaattcaggagttgcaggtttgatccctggtcagggaactaagatcctacacatataataaaaataaaaagagaagacagtatcagccagactaaaagtgatcttgaactcaggtttctgactgatcatgtttttactgagtcatttccctcccatgtaaccctctcccgcttagaaatctgtacatgtttacattccagttttgagtttgggtagcagtagctcagaacatttcacggcaagatgcatttttaaagtttgatagccctggggctaaatttcagagtacattggcaaggtcagctcatgcaaggtgacctcctggttgggttcagctggacctgaaatctccttttctaccccagaatgaatgtgaggaggtgagatgtctgggggcaaagatgggtttgttgaaatgcagctgatcccgactggataagaaaaagacttggggctggaaagcaggttgatttgcatcgagaaggtcatgaccctgtgtgccccagaagggagaacttggattttcgctagatgaagaggacgttgcaactaggaaattggccttaaatctgaaggcagatgaaaggctgtgacatctctggtgtggtttgttcctgcaagaatttaaaacaaaggaagctgggaagcaaacagtgctttccttaggggggccccacagccagttggaactcacaggctttgtaacgccagatcataatcctgtcccagatccacagcatctcagcaagtttgatgggggctgcctgtgctccacttcctccctccaggtagtcccctgtaaccattgctcagctttggagtacattagaagtagatttactgtttaacagaaggaaaccctctcagtctaagccgtgtttcggtgaaaacagaattccttaaaatgggacacatgtgcgcgcacaccatttccttctatttgggacaggaaccaattttatttagaaggagaagaaatccaggcaacggccacaatgtagatgagctgctggtctagacaaggttccaggggcttctatagtcctgctggccaagccctcaggaacggagagcagaacagggcatccccaccctttctcatctgccccagtttggagtctcgggagagccaagagcatttggagaacctagcgatgttcagagccctggaggcacaggtcttcccttattttatgacctctcagggccaacttagcaggaggccttaataaacagtaactctagaatgcggcagccagcgagccctgtgcctggcccagtaatttaaaaaacagaaacggattcatgcacctatgagaaaggctcagaggctctcagatgtggccaaggtgtagcggtcctgtgttgcttggtgatgacatgaatggcccacaacttagggagcagtgaacagctttgccaaaagccagaagcaagtccgtgagagagcagaggtgtctgtagcttttccaggtttttctacatctgatttccacagatttcttgtagggtggcaagatagggtgaggctcatgacatactctttcgggtgcaaacttgaaggggatgccataaagttaaataaaagggaatgcgatgttttttaaaaatgaaaatcagtgcagaagtatcataatcaactaaataccaacatttctaataaagacaggatctgactctgcttggttttttggaggggatagagcctgtgtctctagagggacttgagttttcttagttcgaggtaagcaatcaagtgatcagagtgaccacaacaatgcaaaaaattagattaggaaggaaatgggtgtctttatttttgttgccatggcaagtatgtcttcattcagtaaggtttttccatcctaaagatgaaatcttctgaaagttagcgaggatgtcttctcttctttctgagggttgtttaaagggttgtgtgatggcatctggacttttttttttaatccccctacacatacccccatccttaaaaaaatacctggtccttattttactccttctgtttccactgctggtaactattttgagccacatctgtctgcagctttgcataaagttataatgagcctgtgccagacagacgtggattgctcatgcctacatttgacctggaatgtgttagggttactgggggttggggagggaaactgtaacctaactcacatggacgcatttgggttgtagcagacagggcggaaaccagctaacctgtcagattccctaaatggcttcagttgcaaatattgcaggcatttgttgccctaacttcttggttattttttgagctgtcactcttggaaattccaccccacacacaacacacgcagaaggatgtttctgttactctgttgctttgaccacttgtgcttcctctaaatagacttcattcagagcccatgtgcctatgaggggaggaggctactgtgttcagggacctgatggcacgattcaatctttggctttggggttatttctaagctcagttatatggcggtaggatgtggaagagtcctactctttggatgaagctttctgaaaataattggtaagatcctgggactctctccacttaggggtaggtagagaccccacatttcattgtggtttcattgctggagagaagccctactctagcatatgtgctattcggagatgctcaggtgtaacagagagggcatttgggaatctctccatggaatttggagttggacggagtctccagagatccagccctttcatctctcagccctggaaagaaaccactcagccagggcctctctgggagctagtcttcagtttggaccaatatcctaggtctgtcagcctagagaggcccctggttttgtctttgagattcatccttccaggcagcctggttttttcctcatgtgtctgcagaagttactgtcaagatgtggtttttccgttttaaatgatctagagaccatattccctctaggacaatgatagtagaaatccaatacatcagctaagaattctaaacatttgggagattgggtttggatgagaagtaatggccaattaagacctcctaccttagttggtaaagaatccaccagcaatgtaggagaaagtgaaagtgaagtcgctcaatcatgtctgactctgtgaccccatggactgtagcctaccagattcctccatccatgggattttccaggcaagagttttggagtgggttgccgtttccttctccaggggatcttcccaacccagggatcgaacccgggtctcccgcattgcaggcagatgctttaccctctgagctaccagggaagtcctgttcaattcctgggtcaggaagacaccctggagaagggataggctatccactccagtaatcttgggcttcccttgtggctcagctggtaaaaaatctgcctgcaatgtgggagacctgggtccagtccctggtttgggaagatcccttagagaagagaaagtctacccactccagtattctggcctggagaattccatggactgtttagtccgtggagtcgcaaagagtcggacacaactgagcaattttcacttcactttccctccctcctttcttcacatagcagacccttgtttttgagatgctgtagtattattatcggagaaggcaatggcaccccactccagtactcttgcctagaaaatcccatggatggaggagcctggtgcgctgcagtccatggggtcgctaagagttggacacaactgagcgactccactttcactttttactttcatgcattggagaaggaaatggcaacccactccagtgttcttgcctggagaatcccagggatgggggagcctggtgggctgccgtctatggggttgcacagattcggacacgactgaagcgacttagcagcagcagcagcagtattattatgcacctgctctgagccaggcactgcctgggcttccctggatgctgaggtggacaggcagaggtcagctgttacctaccccaggagacaggaaggaagccacacctgcagcccaggtgaggaaacaccccttcttcttgggtccaactgatgggggtcaatgttttctttgaaaatacatgtaattctggtaaaattccccaacaaccaagtcctgggtaaactcataagttgtggtttgctttctttgagcgggggatgggggggatatctttttttaaaaagttaactaccaactcacagcacattgctctctcttttgatattctaaatattctggtcattggctatttctgaggctgcaggaggacttcctcctttggtggttggtggaggaacagtctgccttgggggcctcccacttagagatgcggcaattttctgcagaagcaaagctgcagattgccagttccctttaatgttgtttgtttggggaagttcatggaagttcatgtcatgttctttagaaccagaaagcatgtgtttctgcttgtacaatgaggtcactgaggagatgtatttcctggttattttctttcctagaggttggaagggcacccagtggttgtctggcatgaggcctgtcccaagccaactttcacaggcatttgatgagtggacaaggagtaaattcactggaggataagcctcctgaggtggttagccaagtatctctgagcatcatgaggttgtatgcttgctcccacctgcccaaaggacagtgtgatccaaaccaaacatttcacagtgggcacacctgggaagaaagctagctttgtttgtcctgacttggaacacattcttttgtattttgttgcaatgaagaaaatctctacttgtccttggcagctgcagagactcctggtctttctatgaaacccaagagatcatggttgcatccatcttaagtgagttccagggtcagcttgaggttgcaagcaacagaaacaaatgtagctcacacagcataggagtctattggaaggccatggcgtgatccacaaactggaagggagggagaggcaggaccaggcttagaaagagagagaaaccaggataggactgcgggtcccagggcacaaacagacaaggcaggatgattagtagcagctccagactgttttctttttttaaaaaaattttgttgcactatgtggcatgagggatcttagttccccgaccagggatcaaacctgtgtcccctacaggggaagctcagagtcccaactgctggaccatcagggaattcccatccgaactattttctgacctcgaattggttttctcaggtgtcttgggaaggagagggtgccatgagccagcttgggtcacctgatgagtcttgaggtgtgggaaggtgagatacagtgattgacagtctcatcaagacctcacacagggaaaaagggaccattccccaggggaaagacaagagattggattccaggagatgaaaacagccagcactgaactcaggctctagagaatcctgggcttttaagtttttcaaggcaggtatttctgtgtctgagctattgtttcctccttgtctctatgtctttgtgcaaagtggaagtgggcagggggcagtccactagatgtttcttgaagtgaatggatgcttttacaggcctttgaatattcagtcactttccgtagttacttcattctgtcttattcttctaacagaattcttagttcacacttttctctgattaagttttacaaagacagtcaatgaagttgatccacattttcttccctgcccaagaaggtatttcaaagcttgagagagcaactgagtggtaccttctaaggaagaaatttaataaaatctgaaattgagccttagttacaaagcctgttggagtctagaagttgattctctggggagttgtgaggggcagtatctaatgaccgctggtgcctggcagctgggggggcctctgccgtctgcctgccactggcaaacagttgttcctcttcttttcagctgcaggactggtcagcagcatcgtgcctcctgtatgatagtcctgaccttgctcttccatttcagaaggaaaatgtgaagcggaggagacagcatcatcttgacgtctgagtgtgaagtgaaaatgttctgtttgttggggagacattcaccagaacctgggctttttaaaattgaaaatgacaacagtttgtaaaaatagtagctggtgctacttttgtcaccatgtcacatgatctgtctggctttgctttatggaacaagccactagaacagggattgtaccctgagatacccatgaaggccagacaggtaagaaaagcaagcagagaaggacaggagtagggactgaggccaaacaagagtgtttgagccaggctttgatggtaccactcagcttcagacagctgctgctatgttggagtgtgggactggagtgagtataactgagagaagatggaaattgggatatttgcgtgaaattttcaagttaaaaaaaacaaaaacaccaccctcttgtgattggacaaagcctacagaaatgccaattttctaacctctgtactagattaaactgtgtgtgtacagggccatgggcccgtcatgaatcatcagaagtctagtccaggcccgtacattggaaaccactctgcaaatatttgttgagtgctattcagttcggggtgggtaggtggggttatgaaaactgggctttctaggacaattcgatcatctttgctgagaatttagagtctggctgggtgatgatgcagatggagaatgaatacaggagatttgaaagtttagtatttactaacgtttatatatggcagctgggagaaaatgggaaataaggaacactgtgataagtatgatcttggcatcatcatcactgatcaaataatgaatgttctgagcatatgctgaggacaatttaatatacaaagacacacaacactagacattgccaatgtgattgttttgaggtgttttcttttgtctaagagcatttgtactgatcttacctgcttctcttttgtttggagctctgtgttataactggaacattagcaggttgaaatgctgcctacttttataaagaactttgttctttaagccccactgtagaacaggaggctaaaccacaggtcagacggtgtgctggtcaaagttctcagccaatttaacttcattttcagggttccttcattagttcctcccaattcaccgttcaagagacatttgtttctttatcattcaagaaatgacaaaggtaccaaggcaacaactaaaacatgagtgcttattgggcagacagtgtagagagatggcccagccaaaggaagcctgacaaagaatggcactgctgtgccaggtggcattctggttccttcttacttgtctttcttacttagtcacacatcttaaatgcagggctggtagatagggttttctatgcctggtacaactcacttgaattcccagaccaaaaaagtaacagcagtagccacattcattcactgctaggagctctttgctaagtacttttcatgcagtgcagtgtatccttcagtccagcgacttccgtaaatcaggaaactggaacaggtggtgtgatcatcatgtaagtgctatacagcataataatgggatcaccaggtaacctttctctgtgctctgtgtaccttgtacatacctgtgcatattggcttgtgaggtttctttatcctgtactgttttcacacaccagtagtgtgtgaatgcccgaaggcctttctgcatcctcatcacacttggcataataccagggagatacaggcagaccttggaaatactgcacatgtggttccaggctacctcaacaaagtgaaaaagcaagtcacacgaattttttggtttcttaacacttatgaaacttttgtttatgctatactgccgtctattaggtatgcaatagcatatctaaggagaaggcaatggcaccccactccagtactcttgcctggaaaatctcatggatggaggagcctggtaggctgcagtccatggggtcgctaagagtcaggcacaactgagcgacttcactttcacttttcattttcatgcattggagaaggaaatggcaaccccactccagtattcttgcctggagaatcccacggacagaggagcctagtgggctgctgtctatggggtcgcagagagtcagacacgactgaagcgacttagcagcagcagcagcagcatatctaaaaaatatacatcccttaaaactactttattgctaaaaattccaatcatctaatgtatgtggccacaaaacttcaatttgtaaaattcatattatctgtgaagtgcagtaaaataaggtatttccagatattgtggatgcttggcaaatgttggaattttgtggttgttgaacattgtaggttggagagaatccagtcttactggtctagtttatctcacgctcaacaaccagttacttaattaatagtcttcattttctcagccttgtgctgggtccacagcaggtgcaaaagacggagccctgtcttctactctcttggagctggtgtccactgtaagagctggacaagaaagacccctgccctggttctgtggggtagagggcgtctctgaccctcctctggccctatctcctacccactgcaaggagtctatgggactgaaagccatatgccccttcttctagaccatataccgagtatttatgattctggaatcccccccttctcaggtgtctccgagcccacttaagggtctgacatccatgaacagaacagggcttagggcacatctcccaaggcctacagggcagccaaggcgcagctgcttgcaggatggggggtggggacgggtggagcttggggtgcacttgggatcaagcaggatgggaagctgaagtgccgagtctcccagtgctgccatgttgcaacacagaactccaaggagcctcagaatcctaaaatcaagttctaatttccaaggtattctgaagccaaactcttatttaagtgcttgaagtgaagtgaagtcgctcagtcgtgtccgactctttgcgaccccatggactgtagcctaccaggctcctccatccatgggattttccaggctataatactggagggggttgccatttccttctccaggggatcttcccgacccagggatcgaacccggatctcccgcattgtagacagacgttttaccgtctgagccactgagcgcttatcagattttaaaaacctttaaattttcaacctattggaagtgggccttcgttggagctggaattgttactgtgggaaggaggggagcagagggtgggccttcggtgggcaggactatctcctaagtcctctggttctcagcttgcatcacctgctactggctcccaggtcagccagcagagtgcacacctagaacacccaggcttggagcagggttttctccctccatgaacattcctggaaagtttcaagggccgtttgcatactagctcctcccactaggctgctaggaaagtgcttagcagttctgttaaagaataccaggtctccctgtttcctcacttaaaacactttttgtgaagttgagtggctctgagcacacaaatgcctaatcagctgacagcaacttcaaaattgcaggtcttgctgttgatggaaaaatgggagccgtggttgttaatccttgtgtgtaattttcaccaagaaatgggggcctgggtttaatgtcaacacctagtgacttaatgtggccctattactggaaatctatacctttagtcaaatcctgcctccccacaatgtcggtattgtcttgctaccccacccccaccatttcccattcctgagaaaagatgaggttttagcaaaggttccactcagaacagggccttcccaggcagctcaggggtaaagaacctgcctgccagcgcaggagacacaggagactagggttcaactcctgggtcgggaagatcctctggagaagggaatggcaacccactccagtactcttgcctagagaatcccatggacagaggagcctggtgggctacagtccatggggtcgcagagagtcagacacaactgagtgattgaaaacacatgcacagctcagaatgggaagggccgctgcttgctttctccatcctgtgagcaaagactgctccgtactggggctgcctggatccaggaaccatttcataactaactcgggtaggaccgagtggggagaggggaagagaaagagggtgggggtggttatgttctcagctccagtctctggtccagcagggagcaggtttctcccaagcttcaggtcaggatgaggcaccccccaactttgtcctcaccacccccaaaagacaccatggcatgtgttttaaattaaaggaaattcaatttgatgttattttgaaagcacacagaggatgtcagaaccccctttgaggtggctgattggtgatacttcatggggctcacagaaaccaaggtggttaatcttggggactggaaggaaagccagaatttattggaaaagtaacttttggccacgtgtatttcctctagctattattaatctgcccccaaatcctattcagtagtgctaatgaattaagcagccacttttaactttttcccactgaattgcttggtagtgtcctcccatccctggagagcactggtttggatggacatgagcataagaaacagattaaacatttattgtttcaagtgacaccaccaccctcatgccagctccaaccataaaatgaaatgggtaaatagtttcaggcatttatttcttcataagaagacttttcccaaggccatttctgtcttcggctatatctctcaaggcacagaggcttctgtgtctgtgtctttaaggaagccttgttccaaggccacaatgtgtttcaatggccataactgaatttgtattccaattagcacagactacaaatttgatgtatgcacagaagaaatttggtggctggcggggcaggaacaaaccaggccaaccaggccttgggctgcggggtaggaaggcatcttattggtatggatgaccaggctcaggtgctgctggctgaaggatgaagactgagatcagcattcgggccagcgggaatgtccatgtcaagggtttggatgcagggaggggaaaccagaactgccctgcaaagatccgggacgggaggtgtgcttgctgaggttaggtcttgaaaagactgaaaatgcacacacgcacacacctggcattgctggctcccgcccagacagggctggctgctgggaggatgcagacaggccatcctccatcctccaccgggacttcccatctttccaaccctgaggctccagcgtactgcctggggcttaggggagagcaggggtcagggagtgggcgtaacagggttgaagggttcactccagaacctttccaaggctcaaagcgtggggaggatgtggacaccaggtcctgggacgtggctgcaccgcctgcctcacccaccctgcgtccaccatcttccacccctttgccaactccacacctgccggcgcccaagagcagggaggcccaggcggctcgcccagaagtggccctgacgttgctctttcctttgcagacggactgtgccctatggactgtccagctacagaggcagcggaagcaggggcaggaggtcggctgggcagttcccacagagcccacagccggtgaaggggacgctgcgctgtgcctgcacggagagcgatgatgatgcctgcttgcagttctgcacctggtccctggctgcccgcgggtatgaccccctccctggctttccgcacttccagagatcctcgccctaggcagtgtgggtacaggagggctcggcttatcctggaggataccatctgatgcgtggtgagggtggggactgcgcagaggggatgtggagccccggctcctggagggccgtgggcatggtatcccatcccctcgctgcctttcagagcagagtccattaaatggccacagccttatctggtctccagaggtatttcttctggattgcatagcaatttgccaaaatctgaataagttgctaacttttaaaaattgaagaataccacccccccccccacaaatgcacatttttagcttcttcaaaagtaacaaatgggagcatctggtctcaccagcccacatgccctcgtggccagaaaggctggtaccgagtgaaggccatgagtgagatgtgcaacgtccattcacctgtgttactcatcgtcttactttgtggctccctccccggtccctgagttggagaccctgtagtctcctacaagcatctggagaagcttgtgagtcagtgtggactcagataaatcagcaggccctaggtctgccttgtggtggccatttaaattgggttttacctaatagccattcctattaatacttctcgctcatgtttttcattaatttggaccaagaccctgccaggcagagctaccctgccgagcctcttctgagagccgtcgctggtgggatggcacctccaggtgcttcctgggcaagtaagcgccagcaagggggctgtctatgcagcaggtgccaccccaaccagggacccagggcctgctgtctggaacccccagcacaaccacagttttcttcttggctccttaatgtccagtggataactgaggagtgtgggtggaggctggattttagtgggactccacccctgtgtgctcagccttcggaaactatacccgagaggcagtcctgggggaccatgcttatactggtggaaagacaagccttactggatgctgaaaaaccagccacatggaaatgtaggttgattcatttgaactggctctctccccacaggaattcaaggtcggcacaaacacctgacaaagaagtggaaaagcacactggtggtgccctggggggcgtgcgtccgaggaggtgaagttgttttctgggttgctgccccttgggcggcatgaaggacatgcggggcgcatttggcctgtgcaggcggctagcaggaaccccactgcatgtggggggttgctttgtcccctggggtcagagcagccaaaattgtggacagcctgccctctgtcttaggagctgacccctgcattccctatagcttttgagcagtgatgtccagccctggatttcaccaggtctggataaagctcaccaaccactgcttcttggaagccctgcaggctcatctgctagggcccacgttgtgcttctactcccatagaaaaatatgatctttagaaaaagaatcatttcttcttttcagcagctgattctgaacagagatgaattacagcagctgggcgccaggttctccaagtcctccagttcattttataagtttttttttttaaacccgtttgtggtttttgtatgatcccgagggcttccagcagcccaactgggtttatttgtcattctatcaatcagaaattgttattaatgagttgtctacacatctgcaatgggatggtaatttatgttcgtagcagtggcctggagggggtttgggttcctacctggtctgatcaagggagggttaaacccgtctggatatatacaaggcattccaaattggtggcagatcgcttctagtcatctggagaggactctgtcagcatccacaataatgacgcagaggagcggcagaggcagaccctggagaggatgagttaggcccccaccagtctccactttgcctcttcttccttaccccaaacccaaaccactctcagtgagggagtagtgtgattaaaccatccaccttttatgtcgtttactcaattcagcaaggattcattgagcacctgtgatgtacagggcaccattctaaatgctggggacactaccgagaattcggcaaaagttcagccttcctggcacttaagtagtgggagaagcagatcgcaaaccagtacataaaacaaagagcagggcatgtgaaggagagcaggaagcaggctgggggtagggagttttgggggaggttgcaggttgggtggtctcactggccacgtgacagtggcataaagacctagaggaagtggggcagggtgagccagagtgatgaggaagggaagagggtgtcagacaaggcagggtaagtgcataggccctgcagtaggaacatgctgtgccaggcgcgttctgggaagccaggggaggccagtgctgttgtcattatcctgtgttgatgttcaggaggtgaggacattggcacagatgttccacctgggcctggaaaggatctacttctaggctttacaatgttgcatgtcaagctcctgtaagaagctttacttggaaagaaaaagtctttccttataagcatggtcccgactttcttgcaagactggagttagccatccctagattgacattttcagagtggaacttgctcctgtcctgagcttgtgatcctcaaaggtgggaccaggctgcaagagaagagctcccaaggctctgttgacagcgatgactgtgtgtacacattcaggcaaatgggaggctctgaaattgccaagaagctctgccaaggaggctctgttcaaaacaaggaataggctgaagagggatggggtggctccctttcaggtagtggagagcttggcttttgttataggcttctttcttctcttttgcatatccctcccaccttttctgaggtaggctgaagtcaaggccagacaaagaaagtaggctttagacctccatcagagtggacgtcccctccccgcagtctgcttgcccctccactggccctttggggagctccctggggagaagggcctgcagcaggaaggcctcagttatgcctcctccttggttcacatttccacctctttgaggacgagaaacgagttttgcctgggggagaaaacccactcaaagggtcctcacttaacaatacagccctttcccaagaatgccccatccaaagaccccagcttccctaatgggtaaaacgatcccagctgtgcctcagggcccgcagcccaaggctccggtttcactcaggaaattgtttttggagaggtatggcacttcgcaaagccacttctctctgggagtgagtggaccccaagctaactctttgcaaatgtaaacccatgtccatctggtaacagacgcaggctccgccggagcatgtcgtcgttcgacccatcacagggggcaggcaccaggggtgggccagcagatcacagctctacaggagttgatgagtttgaagcttatgggatttagacagacattttcagctgtgcttggtacccactaaaagaatacatctaaaaaagaaaaggaaaggaagaaagaaaggattcttgatgtttgtgataaggaaatgaacaccctcaggtgttgaaccccaggccctgcggcagagggacttccgtgccctttgccaacaggcacacagatgaaccatagacctggttccctgggagccgctgtgaaggcagccccagcgcaaggctattagggtgatatttgttttcaggaagaaatgtggatctttggggaatggcttcaaaataagccgcagacacaagcgctttgtaaattatgtaaatttctatttatctatataattggcaacaactgggaattgtaacgcctgacagttcgcaatctctttcagctgcgctctagtggctacgctgagattactgagcagctgaagaagacggtgtttttcaacagcagggatggggaggggccgcccatcccttcctccttcccctgccaaggtgctcatgcaataatggtggatgctgaggtgttagccttgaccaaatgctaaattctcaatgagtatgataaggtacgaatgtgaatatccatcataaggaaatggaaaggactgatgtgccagcgagatggtatacagtttagagaagcaattatttattgtgaaactggtctctacatcaactcctttcagtggatgtgttcgcagcagaatctctgtacatagagatgttaaattctgttctgaatcccagctcatgttccttagggcttgaactacattttttaaaacgcctaagcactgtttggctctgtggcaggatggtatctcggaaacgcattcattgtgctaacactcagaaaatactgtcaaatgcaaaataaaaaaatctgaaagtctgctctgatttgtgggtttttctggctggtgtgatatatgttgttacacatctgctttctgtgggccctgggagaggacagaaaacagttccagttccaaaagtaggttcatctaaagtcaattatggagcaagatgagcaagggggctgctggaattgtaaggaaggagcggatctgggggactgtctgaggaaggtaaaacattcaaggtggttgggaagagatatatttgggggagcaatggctccttcccctgggccacccttgtccgcttcgtagcgatgcacacctttgtcttctggccccacaggcacagaggtattgagcaggatcccagggagaggacagtcgtagccaacagccaacagtggaccttcacattttattttgccttgctactcatgattcttgagaattaaaagccagaagtgaccatgtttggttgatcttctctatcaattacaatgttttcaagcctctaagacttacaagacatctg

SEQ ID NO: 106 - DNA, 28247 bp, Hippotragus equinus
  source 1..28247: mol_type = genomic DNA
agggatgcaaccctagtctcttgtctcctgcattggcaggtgggttctttaccactagcaccacctaggaagcaggcattaaacacatttaattcagagccaggttctagtctcgagcctcggaggccaggagttgtgtaaaaacttgcccttggccaagaagcgctttgagccatgatacatccacagcctttcaggacgcatctctggccgaggactgcccagaatggcagggccaggtccgactgatgctgtccaggcgtcgccccaggggaaaggttgctgcgcggtcgctagagacgggaggagtctggtggtgattgatggggaagggacggatgaataaaagtacttgtcttgggacagcaaggatcctgagcaaactgcagaggctacacggtcaggcattccctcggcgtttcgtcagagccagaccctcccgctgctgaagggaggcgcgctctgctcccgggcagccgggaacccagccgcgcgctgagggaaggaggtccctgcctggtgcgtccggaccaagaggtaaccattctgcttggtgtttaaaccaaatctgtgattgaaccttatcctggggcttcagtttggattacttcttagtgtgtgtgtgtgtgtgtgtgtgtgtgtgtgtgtgtgtgtgtgtgtgtgtttaaacctgtagctacaacagattaaaatgggattggagtgaaggagagggcttgagcgtttgaagtcactcggaggggatagaaacttccgagttaatccagatagagactcttccaatcagaccaagtggagatgtcctggagattttccgaatcagccggcgcagtcctggggtgtgtatggggggtgggagcggtgccgaaggagcccgaccacaggcagccgggaaggaaggggtctgggagtccagacacgcggcatccggggttgctgtggagtcaaatgcggagactggcgatgcccttgatctctaggtgccttgatttcccccgtccccgcgcgtccttggccggaacgaatactgctccctctgcgctcaccaggagctcaaagctttgcattggacacccatcctttcctccccgtcacaccccttccaggataccccgccccactgcgagtcatttacccctcaggggacgcaggggaggaaaaaccagcgaaagctggctctggagggaccgtctagggcgcaggcgagtcccatgcgccagagttccccactcccgcgccagctcgacttattaatactttcgcgcactgagagtgcgggcgctgctgcgctccgggatagcggcttgcaggggcgtggctggggacgctgatctgggtgtcctgtcttccttcccttgctggtctctagactcggaaagctgaggagcggccacccgactccctctggagcaggcagcagcatgcagccgctgcccagcttgtgcggacgcgccctggtggcgctgattcttgcctgcggcgtggcagggatccaagcagaagagagggaattcccgccagccggggccactcagccacttctggggaccggagagatgatggagaccccgactgagacctcctggcccgggaggtccaacgccagcgagccgcgatcacccgcaacaccgcagattcctagagggggagggatggcgggaatcccaccgcgcaccccacccccgtgcgatggacccatagagatcaaggagactttcaagtacatcaacacggtggtgtcctgcctagtgttcgtgctgggcatcatcggaaactccacgctgctgagaatcatttacaagaacaagtgcatgcgaaacggtccaaatatcttgatagccagcctggctctcggagacctgctacacatcatcatcgatatccccatcaatacctacaaggtaagggatgcctgctaggatcgcgatgggagggcgcaccctcgggaccgggaagatgggaaagtctttgcagggaggatcctcaagaaaagccatcccccgactcccccacctccaccctccggccctacacccccgcttccccccgccggccccggacttccaataatcattggaaccaaacacccttctggtttcagtagccccctgctaagcctagaaaaagcatagtccccagaccagcagcctaaatataacttgggaacttgttagaaatgtattttaacaacccccaccccccaggtaaagtttgaaaggtactggtcttgaaggaccttgtccctaaattcagctcacaaaggtatattctctctgctcagagattgatggaccatggactggcagattgttatcacctgaaagcttgttagagctccatgtccaccccagatttattaaatcagaacctgcatcttacaatacctatgtgattcatgtgcatactaaccttgggaaacgaataggtttttagaaaatgaatgacctaagagaaaaagtcccagataggtgagtgggaaaacacagttcatctgctgtgaatgactgtatcgtatctggtttttctttactgaatgcctatgatgggccaagcaccgggataaatatgttacttttccttcctccttctaacaacctatgagtagatatgactccattttatcaatgataggatgctcaaggtctcacaaggagtaagtgatggagctgaggaaaatcaggcccaatctgtcaggttccaaagtgcgaactgcaccgcatcaatttctttgcggacaagacaaagaacactcaactgcagtctgtcacagtttcagtagctaacatcattgtgtgtttaccactggcatcagaggaaatgggcataaagagctagggcaggacataaacccccacatgatttgactctcacttgctttgaaactctgaacatatcctaacatctctggacctcagtgtccttaactctacagtaagctgctgagtgagtgaagttgctcagtcgtgtccactctttgcgaccgcatggattgtagcctacaaggctcctctgtccatggaattttccaggcaagagtactggagtgggttgccatttccttctccaggggatcttcccgacccagggatcaaacccaagtctcctgtattgcagacagacgctttaccatctgagccaccagggaacccaccaactggaattttgtggcattgagaaaacagcctaagggaaagagatggaatattttaaaggactatgcaaatatgtaaaactctgcatccccatcataatcagcaatagaaagtcacccataaacacagaaccaaaagtgtgagggactcagaatgtactttggggatttgcctaaagctagctttgggctcagtacaagggttggggcacggagggggaaggcatgtagggtcaggaaaaggttgtggggaattcttggagctttgtgacaggagaagttaccagataggatgcttttaagttgccttttatgaatctctggaaatcctaatccaaaaaatcatacattaaggaatttgagagatttttaagatttagaaataatatttagattaggagccaggtcctacaaagaaacactcccagaaatgagggataaatagatgaaacgctaacttcctgcatgactaccagttctgatgaactctgaggatttcctgggagaagcacgggctgaaatgagtcccttatatgcagtcccagctccattagaacctaactaacccattttaggagtcctacagaccaagtcttacccttctaatgtggcagaggcattcctcaaacctgacttaagaaacttcagagtacagtgtgttgtgaaaaactttaaagtaagtgatttcttgttgttgtttatttgctaaggtgtgtccaactctttgcaacccatggactgcagcacaccaggctcccctgtcctttaccatctcctggagtttgttcaaactcatgtccattgagtcagtgatgctccccaactatctcagcctgtcacccccttctcctcttgccctcaatctttcccagcatcataagatccttctgaaaagggagattacatctagttttgctagttttatgaaagatctgttaaggaaggtgccaggaaacctcatgtggtaagcccacttagatatcctcctaactcctaagtcagcaggcaggtgaaatcctgtagggaagataggtttgagggcatcagatgtaaatcagctcttcaggaccatcttactttctctgcctgaccaaatgattacattcaataagccagagacaagcctgttcccaaaggggcacacaggttttccttccctttcaaattattttatgatttccctaggaagttacattcttttccctgaaaccattaagtctgttcaacctgtgtttccgtttctgaaataaacaaactaatgagtcattacaaatctggccctgtagtcatccttattagctatgaacaaatccatcacctagaattaggtcctgttgctaggtttgccatcactgaatcctacatagtggcctttggtttgtgtttataatatgcataaatgtgtcacttgagacataatataataataatggttaccatttattatgcactgtgtacttggttttgttcattttgatcactacaagaaagcctatggagggagtattgttatcacccctgtttgatggggaaattgcattttcaagagatgaagaagtaacttgcttgatgatgtcataccactagaaagtgatgaaactagggcttgaacccaggccttctggccctagaacccatggtcctcccatcctgcacagattgagctgctcacagcatgacctcttccaacctggaatatggttaggacctcattggagtataatggtgcaattacatcatgatatactaccacacagtagtctacttgggaagcattttcagttttaatttcataatctagagatttctatctgctgaaattcccctcagatgatctataatgtataacattgataatatcactatttgttattttaatgtctttatttataaaaacattgaatccaggactagttaaaagccatttatttctttaaataattgtgtcactatataaggaagttttaaaaaatgcatttagaatttcacaatagtcaagtattatactttacacaaaggaacttaagtgaattatgagtgtcgtttaaatttagcctaaagtgggggtactctagtgatttctaattttgtttttctggggtgttactagtctcttgaaaatccagttttaattatctatgttatatgctatataaattaatatataaatagataatttatgtatgaaagaaaaagtgttagtcactcagtcttgtccaactgtttgtgaccccatgcccaccaggatggaattctccagacaagaatactggagtgggtagccctttccttctccaggggatctttccaacccagggatccaacctgtgtctctctcattgcaggtggattctataccatctgagcgttataattaatacataatataatatacattcacaatttctgagggttcatagaatactgcaactcatctattggtttacccagggtatggaaacttcaacatgaatctgtaactttaacctggagttcagtgcttccctagtagcttggacggtaaagcgtctgcctacaatgcaggagatccgggttcaatccctgggtcgggaagattccctggagaaggaaatggcaacccactccagtgttcatgcctggaaaatcccatgaaccgaggagcctggtgggctacagtccatggggttgcaaagagtcagacatgactgagcgacttctcttcagtaattctagagtccaataaagttgacaaaccacaaaatgtcacagatttggctgaaagccatgctccttgatgcagctgtagaaacgggatgggacttctcagggaggggctgctgtgagcgctgacaaacctcagagcatgtgtctcttctgcctcaactgtttcaaagaaccgttctctggaaacttctagacagagtcagtcctctcaccagggctcctatgtcagggaggaaatcctgattgacagatgttgtgggagactcagcaaattgaagctcgaaaggggcttcagataggcatgtaagcatgctggaaataaaagcttatgtctccttttcagcaacacacactggggctgtcattatattatgtaaaagcatctagatgagaatgaaatgcaggcatccaaagaggtcctttgaaaatatatgtgtatgtgtatatgggcttccccaggggctcagcaataaagaatcctcccgccagtgcaggagacgcgggagacgtgggttcgatccctgagtcagttggaagaaggcatggcaacccactccagtattcttgctgggaaaatcccgtggacagaggagcctgccaggttcccatccctggggtcgcaaagagtaggacagggctgaagcgactgagcacacacatgcacatatgtctttatacacattcatatgtaaatgcattataagtagataggtgaatatcagtggtcccagttcctggtacaaagtcaccaagtaataaatgttactagaatgtgtgagagagtgtgtgtgaataagaatggaaattgttttgtttttcagcttttgccattataaacttgactacaaataacctttttgtatggctttgtatgcatgtgtgactatagttgaaggataaatttctagaattagaatgattgaatcaaaggatatgtgcctttgtaattttgatagacattgctatactgtcccccaaagttattgttgtactcttagtttgaatcacgagtttatgtaagatgttacaaagctatacaaagatgttatttgtagtcatgcttataatggcaaaagctaaaaaaaacacacaaaaaaaacagtttccattcttattcacacatatactcatacacattctaataacatttttacttagttacgttgtaccaggtactgtaaccagtaatattcacctctctacttatctatacatttttataacatttaatatattcacatattaatatatatatacatatatacttacatatttttaaacatcctctctggatgcttgcatttcatttttcatctggatgttcttatgcaatgcagtgacaaccccagtgtgtgttgctgagaaggaaaaataagcttttatttccagcatttcacatgattatctgaaacccttttagagcttcaatttgctgagtctgccaccatatctgtctatcaggatttcctccctgactcaggagcccttgtgaaagccctggtcagaagccctctttatacaggcttccctggtggctcagacattaaaagaatctgcttgcaatgcaggagaccgcggttcaatccctgggttgggaagatcccctggagaagggaaaggctacccactccagtattctggcctggagaactccatggactgtatagtccttggggtcacaaagagtcagatgcgactgagagactttcactttcatatatatatatatatatatgaaaagttaaaagtgaaagtgctagttggttagacaagtacaattctttgcgaccccatggactgcagcccgccagtctcctctgtccatatatattcacacatatacatacatatatacacacatatatatgtatcaatgtctatctctaaaatataacatgaatcactatgccagtatttatatgggctatgtatgtcttaagagtcccttggactgcaaggagatccaaccagtccattctgaaggtgatcagccctgggatttctttggagggaatgacgctgaagctgaaactccagtactttggccacctcatgcgaagagttgactcattggaaaagactttgatgctgggagggattgggggcaggaggagaaggggacgaccaaggatgagatggctggatggcatcactgactcgatagatgtgaatctgagtgaactccgggagttggtgatggacagggaggcctggcgtgcttcgattcatgggtcgcaaagcgtgggacacgactgagcgactgaactgaactgaactgaaccgaactgatgtactgacccacaaactagtgtttaagtatctgatgggagggtgaatctctccttattcacaaactacttattgtgtccttcttgtaagactaaaatgaatgaaataatctagatgtttgttgcctatagaatcctggagtagcaccaatgtcaaagttgcataggaaaagctgagtgtacctatagatcctgtgaagttttatgtgttgctagtgattgattgattagttggtttgctttgtttggattagcagtgatatttttaaaagccttgcattgaaaatttcttcaacttctcttaacatctcaagaagttaaaaatgcttgagcaaatatcgaacttttaaatcataacaaattcactctctttgtgctgtatttacatggataactgagttgatatatatagttagcataaatatagtaaataatagagatatagtttcctctgtgtgtaagcaaattgcatttactattgtcccaggtggccctactggtaaagatcctaaaggtatgagacgcagtttcaatcccaggtcgggaagatccctggagaaaaaaatggcaaactgctccagtattcttacctggaaaattccatggacgttttttttcctagagggctacagtccatggggttgcaaagagtcaggcacaatagagcacacacacacacacaaattgcgtttgaaaacaaatctccttataatctgatgacagatatctacatggacattattttgataaggatccaagtataatctgatgtctaatggctgtggagagctttctaaaaattaagctggtgacctatttggagtgcctctagatggttttattattaagactttggaggctactgttggaggcaaagaagctgccttcataggtctgagaggcaaaaaccactgatctttaacatgtaactacttcaggtggaatacatataacattaaaatgctggtatgtcaaaatgggaattgcttcactgagacctcaaatgagttttgagtgaaatgaccttgtagtgactttgtcagtcaggctttcctgcttgggacacaatcaaagctatatttcaatcaaaagcacctttctcacttttcaatcttagactacttctagcacttaacaagtctgtgcatgattaactagtttcatagttagaagtagaagtgaacagagcaccatcaaatttaactttcgaagttatacttctctgattaataaatggaagtttatgtgtatagcgcaacacaagaagtaaagatatcacggaggtggttgttgtcattgtttagttgctgagtcatgtctgactcttttgcaatccccaggactgtaggccaccaagcttctcattccagaagatttcccaagcaagaatactggagtggggtgccatttccttctccaggggatcttcccaactcagggattgaaccagtgtgtcttgcattggcaggtggattctttattgctgatgcaccggggaagcccctgacattgagtaggcgagtctaattttgcccaagataacaatactgttcatatgtccagttaagtaactatgatattttagtgacattttagtaatatctggagatatgttagggttcaccagtggctcagtggtaaagaatctgcctgctaatgcaggagatacaaatttgatccctggatcaggaagatcttctggaggtagaaatggcaacccatgccagtattcttgcctggaaaattccatgtatagaagaacctggcaggctacagtccatgaggttgcaaagagtcagatacaactgagcacatagagatatgttagtagaagaagcattttgtacctagaacagaacctagatacttctgagattcatttatttaaagcaaaaaaaaaaaaaaatttaaggatcaccaattaatcatattttaaataataacattttaaaagtattaataacaggtaagactattcgttctgaataaccttgagtcaattaataaatacaacactccaacaccctgtaacagttaactgcagacaaatgcttgttgacagatgttctactcatatttttgtaactgtccaaatgaaaaagaagagatttttgttcttttttctatatatatatgaggctattggccattgcagaataagaggccaatgttactgctgctgagtcgcttcagtcgtgtctgactctgtgcaaccccatagatggcagcccatcaggctcccgcttccctgggactctccaggcaagaacactggagcaggttgccatttccttctctaatgcatgaaagtgaaaagtgaatagcagatgtcaaataacccagaaactcaacacttcctagttctgattcattgcttcacattttgcccgtggatgcctgtgatgaaatgattggcaaacccttggccatggacaatggaaggtttcccagggttaactctatgattcttcttgtgtttgcctttgatctgtcactcggtcactccataaatctaaggctcttaaaatgtcaaggcagtgtctttttcaacatggtaaggcttatccatcaaaggctttacatttttttctttgctcattttaaatgaatagttcaagactgaaggtatttccatagttgtacaagaggatggtacagccaagaccatgttgtttcgaagccagggagccagggagccagggtcttcattctctaaaggcaaccaaataaggttttcaccgtgtagctaatatgcaatggttgatgatctttagagaaacatgcctactggtaataaatgattaagttctctcaagggtgttgacagatatagcctgagctgaaatgcaattctagatataatttatgatgtgaagcattttctttgaggactttgcaaagttaagaagaggttggttatgtctgggagacagctgagcatggtatatggatgtaccttagccagcaaattctctaattttagactttttttttctttccaatgcttttattttagagatttactatttgtctttcctaaaagatcctctggtgaaaatggaaaagaaataagaaaatggccaaaatgcagtggtagaaagaagagagaatgaggattgttcttgagtcagaaagtattagcagggacttccctgggggtccagtggttaagactttgtcttctagtgcagagggtatgggttcgatccctggtcagggagctaagatttcacattcctcgcagccagaaaaccaaaacataaaacagaagcaatgctgtaacaaattcaataaagacttttaaaatggtccacatcaaaaaaagaaagaaatatatcagcaaagttgactgaggcattttgtccccaagattcctttccagacatactcgtgccttctcaccttgtgtttctacttctctcctccttagcttcattttactttccagaaaggggtaacccaattctgtgggtgttaggttctatatgtctccttccccctcacacagtgtttttaatttatattaaagagcttttgatttccatagtaatcaaatgttttctaagcacagattattccataaaccattctctggatagaattaggttcaagtaagacatgaaatgacttaataagatttgttgaatttattaagtttgagagtcactttctgagccatgagatcatcaggttataattctttagtttctttaggtgtcacagtgatcttagaagattcagctcagagaagtgaattgaccataaagctagatttgtgaatagcatttcttaatgctcttagttgaatcttttcaacacatgtgacatgtcaatgaaagcttttaagcacaaattgaggataagttttcaggttcagatcatagaagagtagccatccagttatttattggccttttacagatgtggaaataaatttcattgtaacccgagaagggatatatatttaaggtgaagttaatttactcctaagacatatttatatttaaggtgaagttaatttactcctaagacatatttattttttatctttttattctgtctctttgctgctctcagagcttttgtttctagaaacttaactcgttttaatagagtcgttcatctatttcagccagtcctaggaaatcttttcagagcagtggaaagccctttctttgctgaagtgcacacaacagagtcctaggacagggtctctgtcttacacaactcctgggggtgctgttcatactgtagtctatttaaatggctgctgctgctaagtcacttcagtcgtgtccagctctgtgcgactccatagaccgcagcccaccaggctcccccatccctgggattctctaggcaagaatactggagtgggttgccatttccttctccaatgtatgtaaatggcacctctggcctattctttaagtgattaagttcattttaatggatgtaagatggaacttgtaattggtatttgtccccagggcacaagtaccatgtaagtcaagaaaatattttctgtgcacttgaccagcagcttaaactctcactgtactttttaaaattaaatttatttatttttaattgaaggataattgctttacaatattgtgttggtccccaccaaacgccaacatgaatcagccataagtatacctatgtatcctccctcttgaaccttcctcccacctccctccccatcccacccttcaaggttgtcacagagctccagtttaaattaaagaaaaaaaaagaaagagagatcaatgggataagggaaatccttgaatgagggtgtcttatcttattaaaacgcccgttcaaatgcagaaaaactcttatctgccacaggaaacagagataaaagcagaagaatacacccttccccaaacttgtgaaacacagccgctccattatttccttcttttgactctgactgtaaaaatatttctataagatcagtcatttgaaagaaatgttcacagttcatcaccagatggaatgacagcagtctggcaaagtaaccctggttgtcacttgtaatgcgttgctcacccaccttcctgaaagcgtctctgtgctttctgcattcatctccgccacgtttacaaataacacacctcataggatcccatcagatagtgagaaatagtgggttctgttttataccagtcatttccctgacacgtttgaggaggagagagagagggacggggaggaattttgctttccactttttcctgtctgcttggcaagcggaactcccagagaagagccaacgcctcatttccggaggccctggctttatgtgtcaagaagacttgatctatctggtagggaggaggacctggactagacagtacaaaatcaatcaatcagtagtaagcccagtcatctcaattctcagaagaattgtttcaaatatgggaactaaaaagctcatgacaagtcttaatacaagatgtctgtcttatgatcaaattcattcagtcatccatgaactcattcattcatcattaagagccaactcactggaaaggaccctgatgctgggaaagattgaaggcaggaggggaaggggacgacagaggatgagacggttcggtggcatcactgactcagcggatgtcagtttgagcaaactctgggagatggtgaaggacagggaagcctggcatgctgcagtccacgggctcgcaaagagtcagacacgacttagtgactgaaaaacaacatttaatcagcagtcactgtgtgccaggcactatgctagccactaaaaatgttgtagaatattctgaaactaagaaccagttaaagctcagtgcatcctgttaatttttttgaaaaatagaaaggagaatggtggttatggttaatgagacaattgaacatttgttagtgcaagatggttaactttggcatttcctgaccctatgggtctagattccattaggtattaagaatggtatctactaataggattttctccatttaatttgtcaagaatgtaatttttaattaaaaaaggaattggaaaatataaatttccccagttggaaagattttgtaggactcatttagcaatacctttaaagaaaagacattgattttctattcacaatgtttatccttttagaaatttttaaaactatgtaatataaaaatatgtatatactataatagtatatagtacatagtataagctatgtactataaaaataattttacaatatgatacgaaattttgtagtattctgttgccttttttctttctcaaatagctgtttcaacataaagttatgaaatcatgggcatctttgagtagaaaccttatagtcagtattaccatgactgttttcaatctagtgtttatttgtttgttatttgtgtttatttatacaaaagaaatgtgctagcaaagcagtggaagctttaggggaaagaggcaagcttgaggacaggctatcatttgtcaaatggacactacattgctccaaggaacaatactaacaaaagctctttctcaaatgagccatcaccattgcaaaccagtgtcagtaatgggaatattttctgactggctcacatttgataaatggtaagtaatatgtattcaaacttaattttaagcaggccccaaacatttaagttatgtggcagggacctagaaacaatattgatccctgacattttttttgcaatcagagagatttgattacaggcatgatttgtcttcagtactcagattttgcccttaagttatctaactgaatgacgaaaactgcaaataagaaatatgaatgtgttattgctaggtttaaagttagacttgcttcttcttgcaataaaagagaatccgtttcctctaccaaaaggaaaactgaatcgttgaacttcagattataggcattgggtgtcattatttttgtcaagaaatagtgaaataatttccaagaattatgaaaacctgtaagaacattctttcaccagattttaaagtggcgtcttggttgagattgatttttttttttttaagttcacagcttttcctccactcagggcaagagattaatgtctttgcattcttaataagctccaagccctaaattgccaagacattctggatggaggccatttaggcagagatgagcatcaacagtaagcatggtctatgtcacagatcaggcttctcagcgtctccacaaagccttctgatgagagaagcagagattgccaaagtcatcctgactacgaaataatagaaatgtgcactcaatccctcaccttctgtggcctctcaggactggcagcattcatgtctgaactgaaatcatgaagggttttttggcagtctcttttcctttggaagggtagattagaaaattgtaatctgtcggttgtgattaagttgctaactatctctgtgttgaacttgaagagaattgctacaattttcagtttgtgtttccctgtcccctgtgataacttgggtcagaggttggactgcaggcctcccagtggtatgaagagcaatcatccaatgtctagtctgagccaaaagcaataataacctcaaaacagagcctggattcaacacagaactcaatttccattggccagacgtctctcccttcagtgaccagacattcattttgactcatctaatgactgtaccctgtgatactcacatttgcatatttagagattgttcaagacaataaaataattgaaactatctgaatttttggacattagataaaatagctagggagttatctattacttacctaagtgagcatgtgtgtgcgtgctaagtcacttcagtcatgtccaactctttgcgaccctacgtactatagccctccaggctcctctgtccatgggattctccaggcaagaatactggagtgggttgccatgccttcttccaagggatcttcctgacccagggatcgaacccacaatatcatgtctcctgcaatgacaggtgggtccttgaccacaaacgccatgcaggaggcctcacataagtgagtgaccaaggacaaatatattccctggtatctcagttggtaaagaatccacctgaaatgcaggagaccccgggttgactcctcggtcaggaagaaccgctagggaagggataggctacccactccagtattcttgggctaccctggtggctcagctgataaagaatccacctgcaatgtgggagacctgggttctcctgactcagggtctctcacaagggccaagttattggcagggctgcagtcatgagaaggcttgtccaaggctggacacttggcaaatcagtgccagctgttttcaggtggcctcagttccttttcatgttgccttttcacagggacccttgagtttcctccttgacatggtaactccctcaaagcgatgatctaagagcgagcaaggaggaagccagaatgccatctatgaactagtctcagatgtcaggcatcatcagtcccaccacattctattcactaaatgtgaatcattaagtcccccccccccccgccgccaactgccccagcttcaaagggaaggaaatgagcttcaccttttgaagggaggactgtcaaagaatttgtgggcatgtttaatattggagtgggtttccatgcccttctccaggggatcttcctgatccagggattgaacccaagtctcccgcattacaggtggattcttttactgtctgagccatcagggagccctaaaaaaccaacacagcaagttcataaacttctaagtacctctaagtcttttaacctattaaaatgcagatcatagtaatttaccttataggattgctttgggcattcaatgatataccataggtaaatggcttagaatagtgcctaacccattgtaaatgttagttttcctttttcttccgcctctgatataaagacagaatgattagaaagactatcacctagatgcagtagtttataccaaactatgtctggaaggattctttcaactggttggaatctttttattatgtttgcaagggtgattggcaagtcaaccacctcgagcttgtcactggttcacatttgccggatcctgggtcttctacacttctgtcaacgtcttcaccattcatatgatcaacttctttgagtgttctggctcctcgcatcttataaccaacccatcaacaagtcctgctagctctgttatcaaaatatatcctgtctataatctgttctttcagttgcaaggcaccacaagtttcagcccgtgatctctcatcaaatttcttttcttgactattctagtctatcactgtctatctagtctattcatagtctactgttccaccttctagtctatcttgagcatccagagtgatctttttatgttttagaataagaggggttttggtgtttgtttgtttttgttttgtttttttaatatggaccattttgtttcaagactttgttgaatttgttacaatattgcttctgttatttatgttctggttttattagccataagcatgtggaatcttagttccctgaccaggaatcaaacctgcaactcttgcactgaaaggtcaaatcttaaccactggatcaccaggaaagtccctggagtgattttttttaacataaataagataatgccatctccatgttcaaaatattgcaatggatttcctttttaaaaaaaatcacactcctccctctaactacatctagactgatctggaccactccagtcagccttaagaaccttcttttcatctcttcctctcactaggcttattttgacctcagttcagttcagttcagtcgctcagtcatgtccgactctttgcaaccccatgaatcgcagcacgccaggcctccctgtccatcaccaactcccggagttcactcagattcacgtccatcaagtcagtgatgccatccagccatctcatcctctgtcgtccccttctcctcctgcccccaatcccccccagcatcagagtcttttccaatgagtcaactcttcgcatgaggtggccaaagtactggagtttcagcttcagcatcattccctccaaagaaatcccagggctgatcaccttcagaatggacttgttggatctccttgcagtccaagggactctcaagaatcttctccaacaccacagttcaaaagcatcaattcttcggtgctgatccttcacagtccaactctcacatccatacatgacaacaggaaaaaccatagccttgactagacggaccttagtcggcaaagtaatgcctctgcttttgaatatgctatctaggttggtcataactttccttccaaggagtaagcgtcttttaatttcatggctgcagtcaccatctgcagtgattttggagcccccaaaaataaagcctgacactgtttccactgtttccccatctatttcccatgaagtgatgggaccggatgccatgatcttcgttttctgaatgttgagctttaagccaacttttttcactctccactcaggacctttgtacttgctctttcctctgcctaaaatacagtctgcatggcttactcttttattttagtcaaatccctactgaaggttgctacttgtgagagagacctgactggtggtgcaggggttaagactttgcttccaatgcagtgggtacaggttggatccttggttgggaagctaagatcccacatgcctcatggccaaaaaaatcaaagcataaagcagaagcaatattgtaacaaattcaataaaaactttaaaaatggtccacatcaaaactatctttaaaacaagaaagcacccaagatttcattacaatttctcagttcagttcagttgctcagtcttgtccgactctttgtgaccccatgaactgcagcacgccaggcctccctgtccatcaccaactctcagagcctacccaaactcatgtccattgagtcagtgatgccatccaaccatctcatcctctgtcatccccttctcttcctgccctcattctttcccagcatcagggtcttttccaatgagtcagctctcttcacatcagctgccacaaatcctgtgaacaccatattaagtatttaggtattctttctctgcttccctcactagactgtaagctccatgagagcagggagtttgccttgttcactgataggcccccatactccaaatggtgttggcacatggtgggtattgaatacatgtttgttgaatgaataaatgaataagcagagttatgagccagcccattttaatccagaggtcacaagttagaggctggtctgacacataaaattattttgttaacattatgttattatctgttagtgtttttgttttttcaaaaatttgaattagttgacaatttttataaattgtgagatttatatgaacatttggggataaaaatcaagatattttggtattggggatttcttatcagcaatcacatcatgtttaattagcacaggctccttttagacaggatttaccctagacccctctgcccgctattatttcctgacaccagtgactttcttgcacctagctgccttcactcttgtgtgatctgcctggccttgcaggctttccgaccctagaaaaagcatatttgctgtaagtttgccaacatttgtctacatgtcggtgtaatttttcatgtctatcttagaaatgaaattggtctcatgctggagctctgagtcatattcatactgagacacacatttcagctttgggtgccattctagttgccaaacagttacccagcatgacaaactctacaaagaaatgttacaagtagaagaatggaaagacttaattatgtttcaaactagttttcaactttggaaggttattctttaaaacattaaaacacacataggtagatttaaaagtttcttttcaaaccacgtaaacatttgacccaaatgtttaccgaatgtgattcatttacattgtgtgtggggcatacccagttgtcctacaaaagaaaatcatgagtttaacagaagatggctgcatagttagtttgaaatagaaatgtatgtatagtagcaagaactaagtcattttgctcactgaataaccagtgcctatgtattttagggacttgaatacttaagcatctactgtgtgtcaggaactgtgctaggcaattgcagaagttgtattctgtctgataggctaggggttacagacagcaaaaacttaacaaaacaaacaagtatactatactatacacaataggagttaataagtgctgtaggtgtaaaggaaagtggagtagaaagatggagatggggaggtctgaccatttcctatccttagcagtgtggtcatattgaaaagatgagacttgagcaagagctaaaagaagtaaaggttttagccaagtggatttgtggggagaaagccttctgggagaaggaaagacactcaggtgaagtcttaaggaagaagcatgccttgtgttgaacacattctggacagtgtgctgactgacagtgcagttgaccagagtgaagagtaaggacactaacacacattctgttctccataggagtcatctgtgcttagttgcttagttgtgtccaactctttgcgaccccatggactgtagcccaccaggctcctctgtccacggggattctccaggcaagaatactagagtgggttgccactctcttctccaggggatctttccaacccagggatagaacccaggtctcctgcactgcaggcagattctttaccagctgagctaccagagaagcccagggagtcatctagtctaaccaaggaacacttctcacctatttttgactaatctttattttgatttggccataaactgagcattggagacttcataagagaatgagaggcattttcagcactacaggctcaacttaaattttttttaaaactggaatataattgttttacaatgttgtgttagtgtcttctgtgcaatgaagtaaatcagcaatatgtatacatatatcctctctctcttgagcctcccttccactgcccccaccccccatgccacccctctaaatcatcacagaagactagtctgagctcctggtgctatacagcagcttcccatttttgtaaggagaacttaagcaattggccccagttggccctgcagtagaagagaccttgaccctaatctcctgttcatgtgtagctaattctcctgaattggctgccctttcatgattgccagcccactctcttattccaaatatctaacaaatgcaggtggttttcagaggagtgcatgagaaaaagaactggaatttgttattttactccacaagctcattcacctccactaagtaatacatacagttcaagagcactgtgtgaacatctccctaacagagctttgtgtctcctcgatgcagctgctcgccaaggactggccctttggggttgagatgtgtaagctggtgcctttcattcagaaggcctccgtgggcatcactgtgctgagtctatgtgctctaagtattgacaggtaagagcatgtatctaagcaacatatatcctgaccacaatcctagtggttgctacattacttagaaagtaaacgtaattcagtaaaaaccaggctctgccagcttggcaattgattctgttttgttcttcagatatcgagctgttgcttcttggagtcggattaaaggaatcggggttccaaaatggacagcagtagaaattgttttaatttgggtggtctctgtggttctggctgtccctgaggccatgggttttgatataattacgagtgatcacataggaaataatctgagaatctgcttgctccatcccactcagaaaacagcatttatgcaggtaaattttacttttctttcccttttctgctcttgccttataaatgttcagctattttcccccaatctcctcttcttgggaaattattgatttgtgactgtccttggcataaattaaaagtgtaggtcccaggacctcagggttaacagcaggactaatgacccatgctacaagaagctaggtcattacttctccaagaatcccctggttctcaggaatacagataagccacgttgacataagagaatcgattggaatttatagctttcctactcaaattcacataagaactggcagctacaacatattttgcattaagcaacacagcagtcattggaggcagagtgtgcttaaagggatgatcaagtggaagtcaccctggtatggatagactggtagaaatctacgtgactccatgaatcttggtatgaatttcaagcctgtcctctctctaaagggaaaactaccattgcaaagaacttcatcttgtctatttatttaagagtgtttaattaggaaatgggggaaaatagcaatgctggtcatcagaaaatagaccctaagtgaaaaaagctcttcccaacagaaagggtgaggaggaattaatgcaaagggagtgggtccatatgtcacaaataattattttctactttacacataagtttatataagactttatgtatatgtgtatagatcatggtaaacaaaagactaaagagttaatgggaaactaaaaatgaaaatgctgtttccttgtttcttattagttacagtggaaaaagtattgcatgggtatgtgctaagtcgcagtcatgtcccaatctttgcgaccccatggatcttactccaccaagcacctctgtccatgggattatccagacaagaatattggagtgggttgctgtgctctcctccaggggattgttccgacccagggatcaaacccacatcacttatgtctcttgcgttggcagacgggccccttaccataagcactgcctgggaagcccaaagtactgcatagattccataacttctgttccaacagagacatacctggaacaacaatctttaaaaggaaaaggaaaaaagaacaagtaagagaggagcaattttgatttttagttgatagtttagatgtatacatccttgagctaaatgattactatagacctcttcctacctgctttccccagaaacaaacttgttaaaaagtgagaagttccccaaaacactagaatatctttatacatccaaatgtggtaaggaattcctttcacttatgtgaagacaaaaatatttgagtatttaaaatgttgcccaattgcttacatttctatatataattatagcacactgccttagagaattgaaacacctttaggaaaagtttgtttcacttaatttaattttttgttcagcagacaaaaagttctacatagtagaataaagattctactgaaagattctacatagtatttataaaacggatctgctttagaagattattccttgatgagcatttttaaatatttggtatgtaagattttcttacagaggaatattaactataacatcctttcttccccttagttttacaagacagctaaagattggtggctatttagtttctatttctgcctgccattggccatcactgcattgttttataccctgatgacttgtgaaatgttgagaaagaagagtggtatgcaaattgctttaaatgatcacttaaaacaggtaaggaaatagaaatatttgctgactcatgattacaattccaattatgaatatgaaaattattgtagtgataataaactgaaagtatcatctactagagcataattgctttttcttagtctgatatttttaatatgttttatactatctacctggaggtatcctacataatctaaaggaatgtaaaaagagccatcacttttttagagaaaccattttttattggagtataattctttgcagtgctgtgttagtttctgctgtgcagtgaagtgaatcagctctatgcgtacatagatgcccccgctcttggaccttcctctctccaccgcccatcccactcagctaggtcatcacagagcactgagctgagctccctgtgttatactgtaggttcccactatccatttacacatggtagtgtatttatgtcaaatctaatctcccagttcgtcctaccctcctctcgcctgcttggtgtccatacatcctttctctatgtctgtgtctctattcctgccctgcaaacaggttcatctgtaccatttttctagattccgcatataagctgttactttttaaagatgaatctctaggatgagaggaaagcccggctagttagggggtttgaaatggacatgtacgcacggctatatttaaaatgaataaccagcaaggacctactatattagcacataaaattctcctaaatgttgtgtggcagcctggatgggaggcgagtttgagcgaaaagggatatatgtatatgtatggctgagtccctttgctgttcacctgaaactatcacagcattgtttattggctataccccaatgcaaaatgaaaattttaaagaaaaagatgaatctctagtcatttaggttctaattcacagtaactattcagtttaaaactctgtatcctgaatttttacaaatgccactgactttttgtaaacagtattaaacattttgtttggaaagaaagaatgctgtgattataataagccatccattacagagtctgattgtggttttatttcagagacgggaagtggccaaaacagtattttgcctggtccttgtctttgctctgtgttggcttcctcttcatcttagcaggattttgaagctcactctttatgatcagcatgatccccgtagatgtgaatttttgaggtaagtaaggtaaaatagaaatagttgtataaataaatgccattcagaagtttttccattgattcctttcattggcaggaagagagagtactatttttctaatcctaagggagcaatttaagatgctcccccacccctttctttttacttttacttctatttccaacagagaagtaaggggagctttggagaacactgagaatggagagccagggatgtccaagtgagtgagtgacatgattgaaaataccagatctggttctccattgcactttgtaaatcctttcttttttagacaacctgggcacttacaaaatatatttcattttaaggcagaaaattgagcatgggagtgggaatagggattaaggatatgacagggacagagaataagagaaagagagagacagaagcaaagagaaagagagagacagaggcaaagagaaagagagagagacagagagagatcaaaatcagcaaagactagtgataaagtcaaaataattataaatgggtaatttttaatttataaagtaccaaaatctgtaaaggatttgtgctcatagcacataaataaatttttgtattatttctacagctttttgttggtattggactacattggcatcaacatggcctccctgaattcctgtattaacccaatagctctgtatttggtgagcaaaagattcaaaaactgctttaaggtaagagagtatttgaaaatcaaaaacccttttaatctggtatcaaatataacccttacacattattaatatttctaaccagagagatctagtcaattgttttataattttcccttgtattacatgatagatgattctttaaatataaattttgctcataaatcactatgattgatttctccctacaaatcccagtcaaccattcactactgcctcaaccaatcagttttactcatagaattactcagaaaatgaataaaaaattatatgcattgatatctgaatgctatcacatgataaaataagagctacacatgaattaaatgcactgtttccctatttggaagattttggactaggtaacacactgccaattataactaagttagtctccttttcatacacaggtgagaattacaagtcaaacaaagcagcttaattcaagttctaccttcacttttttgccttcattcgatagcagtattccttgatatagaatacatgaaattattcctcatttggctgcttccatttgtgtgtaacatccatccattcattcactccttcagttacctagtatggaataaaatattccttccccttatatccacttgttcctagtgtaaccaaacccaggttggctgcttgctgctcatacaccaataattccagaggcaagtgttaataaaggagaaaaatggagaaaaatgctttcatcagaaaagccagtaatctagggagatggtggacttgggtccagagaccaactccaaagattctgttcagtcacaacaatttttaaagggaaaaatggagggagaagaatctcagtgaatcatctaggcagaaggttgggctctgcctctccatggaagacagactgtctggctctgtcttcagatgttatcttgccaagtgatctgctcccaggattccttgcggggactgctgtgggtgccgacctagtcctgcttctttttatctaggagaagcatcaacaggttagacaaggcatcttgtgcactcagttgagcagtaagtcaggagttagtttcaattgcttagtgatcaaatccctaggggtgtgttagttgctcagttatgtccaactctttgtgaccccatggtctgtagcccaccagcctcctctgcccatggaattctccaagcaagaatactggagtggattgccattcccttctccaggggattttcccagaccagagattgaacctcagtcttctgcattgcagtcagattctttatcctctgagccaccagagaagcctataattaggttattttaaggttagaagtgaacagaaataggcaaacaggaaagggacaaaggagctgttttcagttccccactgtcaaccaccattccatttctatgggattaggggtgaagtcctagggcaccatattctcagaggggaagatgtcaacatgggtttgtagcatctctttgctgacaattctagttgtgtacttaaatatatgggcggaacaagctacaattattttgatgcccacaaagttacagattattatgtatgtgtgggtatggtaatatttccacttgcataggaaaaaaaggtttgagtgatatatttattaaatattaagagtatttctcaagtaatcaagagtaagtatccaagaattgagtgtctttctatttcattttaattaaaagatgaagaagtgttatatatacatttttctttggtgtagcttctagtttaaaaaattatcaaatactacttctgtagttatatgtttttaaggggaaaataagagggcatggcaagaaagtggcccaagaattgctgttcatgcagagaaagccagaattctggtgagcagggagggttgtgatagtgtaacttgatgtaaacttataacaaagttactttgttttgtacagtcgtgtttatgctgctggtgccaatcatttgaagaaaagcagtccatggaggaaaagcagtcatgcttaaagttcaaagctaacgatcacggatatgacaacttccgttccagtaataaatacagctcatcttgaaagaaggaatattcattttctttattttggacagaaatgattcaaacaaagaggtgtctgccaaagtgaaacaaaacaacgtgtgtgtttgcacaaaacaatgtacaaatctaagagtgattattttcttcacactcaagagttccacatgacatttgacgagctgtttccagcatgagaagacaagcagtgagaattaagaaagcctcattgtgaaagcacttaattctttacagttagcacttcactatattatagctcttcagaacttctggtctattcatacaccacttacatttaacttgagttcactcagaattcctgtgaaagatgtttatttttgtaaattaagatgaatctgatgtaaaggaaaaaagtgtcactgctaaacagaatttttagatgaaatttaaattactcaatttaaaaattttaaaatcttttcaagtttcacacctttggtgggactatatttggaaacaacacgtgaaaatagttca

SEQ ID NO: 107 - DNA, 98685 bp, Hippotragus equinus
  source 1..98685: mol_type = genomic DNA
gagggcttggatggtaccattccccattttcggcccccccaaaagagttggagccaagacgcatgcagtgggtctgaatcggcacaggacaaaaagaaggcgggggaagagtgctgttcccaagagtggaccaaagatgttcaacgtcctgtgtcagtatcaggaactttacctagctgaaatcaaatgtttatctgttgagtcattacaatgtttcttcatgtgactcttagtcctcagacacgatcaaaatgtgctatgatgaggcggggacattccacaaaggatgactccatcttcagtaaccgggatgtcagatgacacttccccatattcctatgttagttctcactttattaggaaatctttatctgaaatggtgcagagctagtgagatcagatgaagttgcattccttcctgtgcttgtctctggttggctaatttgtcctcctttcacacatgaaccagacaggaaagaacggagccaaacccacattgttatgaatgaatttctttgcttttaatctcacacagtttaaaatacaatatgaaatcaggctacagtatataaaaaattctccagcaaaatgatgtgccagcatcagctactaaaataaacgaacgaaaaacttcccccataagaaattttttttttgcatttaaaaaaaaacacatagacacttacatcgctacatctctaagctacctcagttctgattttttaaaaagcacctgcttttccttttttttttaatcttgcttttaaattttcagctcttaaaaaatataaattatatgaaaatacaagttggaaaatagtcaaacacaatataacatctttttcacccctatacttctcagcttaaaaaaaaagtattctaaaaaaaaagttcaataactgaggcagtattcctgatagagataaatttcattttaatatatatattttatatatgtatatgtatacatatatttatggttcctcgaaacttctttggaatgtagattaagagttcaacccatttatatagaccccaacagagacagcagcatgcacagcatgactaggatagagaaggtgtcgttttcaccatgaagattaggcaggttaatgctctaaaacccagagtgttcagccccaaagtgaggaaaagcatatctgatctctgaatgttacctctaatctccatagccaaaaaaccagggctctgtgtagggaagtccctcccctgaaagcgaaagggaaccaaagtgactctgaaccctacagcccaaaccaacatgggttaacagatgcatctccaggaaaacagagtttcacccaactcaaccagatttgcccatccttcctctgaagttaacatgtgtttttttgtgtgttttttgtttttttttttaaagcagaaatccaacaattctgctccatttccagtgtataaaccacccaccactcttcctgggatggtctctggacagaaggaggaaaaaaaaaaaagcatctggccagattgacaaagctgtttgaactaacacgctatctacaaatactggaaacagtggactgggagagagagccgggcgggggaggggggtgcatcttagcaaacaagcggctgaagagcatgaggaggcacttgtttacgtgaattatggcaggagtcagacatacacagggagggtgtctcagcatcgattgaaaatgaaagggctgttgagctgagaaagtgatatgcctggtggcaaagaagcaaggaccgaagtctggccttggttctactctcacccatcactgaaatgtggaaagacatcatgagaaagccccagcattctctcagctgcagttctgcacgtctgcaaacacacacagagacacacacgcgcacgcgcatacacatttttgccagtgcccaacaaagatcacataatctaagagaaaacaatgtagtccaaacagttccgcctaacactccctgagcagctcctaaaatatgtcgagagcttcattaaggcacctgcgtccggaagaagatcacaatacacagctgggcaaaatgctgcctctgctttccaagcggatgctccgatttctcggtatgaggaagcgtgtgaatcacagagttaagttcctgataatccggggtctgcaagaagacctgggagaaaacaatccactttcttgaagctatgctagaaggtagttagtagacttccagtttctcagctgaagcccaacaagggccaaccccgagaagcccgtcctgagggtttcttccccttcctcgctgaaagccatccctctgtcaccctccttttcaatccggcacctgttgagctgaggaagagaggattctaattgtattaggcacttttccttagtagtcagatgttggtcccctctccccaaactccattttcagatgacccttgacaatggcctcggttgatcatgtttgtagttcagctccgggagaagtaaaagtagatttgaatctcatggaccaccttattgctacacccaagctcctttccttatagttcctatgccttcaagcttccttcctttgcaattaccaaccttcccttatcctgcgccaggacaacagatccaagcacgggacccttatagcatcttctctgtgcacctttgcctgcccacccagtctcacctgacacccgacacagctgccttaaacccttcaaaggaaagccttgcacttttcccaaagacagccgagccacattttattcctaggctccctcaggttccatggcttctaaaacccaggacatctaaatggctttatcagacactctccaactcatgacatgtctgcggctactctttcactcacccatcagaaagctgtacatttccttctactgaacaacagagtggggaaaagtgataaatgtgggatgctaggaaaataaagacacaaaggacaaagtacagagtgttagttgggaaggacatgcattcaggacttatttcctaagacctgaggggtaatgcccgtgcatacagattttattccaagtcatgtatgttacaagtctaaaaaaccagtagagaaccaggtcaatcttctcccttcactccctctttcataagacttctacagtgctcctacatttactattgtccaaagcagggctgcaaaatacattcagttcaaagacttaatgcttcttagctcaatgttaagtccaaactctgagaatacactcatgacaaataagtagaggggtgtgatcataatttttaaaaattaaaggagaaattcacatgcacagttcccttgtacccaaattaggatcattttttcccttcacacatcagtcacatgaacttgggatccccaaatctcagtgatggcgctttgtctttccagtggggtctatataaacagtttcctttcactgtgtcagaatcctcagttggcaaataaaaacaaaattgcatgataccgcaatactgagaccaccttagagcttaagacgatttttaaggaagaaaaaaaaaatactggcacaaaatttaatagaataaattttaacacaaaaacagtttcagcccctccccactgaagtccatctttgtttcaaaagtagaacaaaaaggtcaatagtccgtgattttttagtgcacccccaaaccaaaggctttatcctacctccctcttttttgccctcccagacctaaagacaaaaggaaattaattgcctttcattagtttcaagactcctggtgcatcaatttcttttgctaataggtccataactcaagacacttttttttgtggatgactttttttttttttcataactggacgtgttagtctcttcctcccttaagccagattcttcaagcttctaagaaggcccttgtctcctgaaaatccactccagaatttcttgtcccacccaccccaccagtcctggctctccttcaacggcgcacaatagattatagctgcagctcacttagctcccacccctgaatgtaaaaaaaaatgagttctggaaaattaaaaatagaataacaattaaaaaattaagagtccgaccgacatggctgttctctgaaatgtctcagcagagtttccccggcccctcagcgtccatcactcgtcggcgtcgggcttgacatccagcatggcatggagctcctcgggcgtgtaccccagcaggctttgcaggtcacacacaaaacggtacacgtagcgtttacccgctgtcttgtggatgatgtttttgtcataatagtagcgaaggccacggctcagtttctcataattcatcttaggcttgtttttcctttttccccatctcctggccacctgaaatttaatttttaaaaaagaagaggggtgaacacttccagaataagcccacgaaacatgttaatatgcctgcactcattggtgatgacccatgatgttcaaaagatggcgagagattcattgacaaagaagttacttttctgaattccaagttttgagggctagaccaggttggcagtgaagttgactctttaagctgatgaaaacgtagtgaccctgaacttctatggaattagagttaaaccatttgatattttaaaaagagtctgttttataggagacactacagagtctcctcttaccctgtattattaatagaacatctttgctttgaaagcatgaaatctgatgtgagggatgaaggactgagttacagtcacacctgtctttcatcaacaggaagcatctttttttttttttcaaggcacagggcttctcacttcagccggaacagagggcctctcgttcattgctctgcatcctctgaatttgggcgtgtcacagagcaaccactcactatttgtttgtttttgttttcttattgatgtataattgatttacaatgttgtgttagtttctggtgtattgcaaagtgattcacttctacatacatatattttcagatcttttccccttatagattatcacagaatattgactagagttccctgtgctagacagtaggtccttgctggttgtcaactctctgcgaccccatggactatatacatccatggaattctccaggccagaatactggagtgggtatcttttcccttctccaggggatctttgcaacccagggatcgaaccaaggtctcctgcattacaggcagattttttaccagctgagccacaagggaaggccaagaatactggagtggatagcctatcccttctccagcggatcttcacaatccagggattgaaccggggtctcctgcattgcaggtggattctttaccgactgagctatcagggaagcccacgggcaatgtgtacatgttcatctcagactcagtgtattcctcctcccctcactgtttgttgatgaaaaaacaaaatgatgagcaaatctcaccaaacgctgaaggcctctcaaattgtcagacgccttccatattcacagagccacaaggccaagaagggaacaaagtcagagaaggcaacttctgcttttgttgtttagttgctaagtcatttccaacactttttgcaaccccatggactgcagcccaccaggttctggtccatagaattttctaggcaagaatataggagtgggttgccctttccttctccaggggatcttcccaaccaagggactaaacctgagtatcctgcactggcaggtgggttctttaacactgagccaccagggaaacccaacttgtgtttacaaaaggcctaatatgtgacaggcactgtaggcacatcctatccgttaagctgaaaaacaaacgggcaacctaggtcttttctgtgttttccaaatgatgcagctcaggctcagaggaggtcccccaagtagcaggtggcagagctgggattcaaaccctagaaaacaccatcaagccccatacagcccatccccagagctctctctcaccgtccctggacacaacactctcaagtcactccctgcttacctcatctgggtcagaaagcttgaattcccagccatctcctgtccagctgatgaaagactgacaggacttatccgtgagtaattccagaagaaactgccacagctggatcggtccgctgcctggagacacaagccatggtgaatctctacaccagatgtgccacacgctcagcagcgaatcccggccccttccctcccagcccacccgccaggggaaaacaaggaatacccagagcacaagagttgcaggagctggtggaacagaccgaaacggtgaagaattcccaccaaaactgcctttaggctggagtatcaattgccttatttagatagatttaaaagtcagtccatcttttatggctaagcaaattctagaaagaaaatcctcgattgctcctttgagatattctaaggcaacatggtcagcttggccttcaaaaacaaagtcattatttctgccttatgaagtactcaaggtatgaaccgaggagtgtctttgtcagctccaagcagaagtcaaaagcccataagcaaagtctacggtaagggccctttggtccctggttttcgagggagaagaatcattaccttagggcgatctaacaagggaagagaagttagatgttctcttggtcataatattcctctctaccacaatccagtcccccaagatgcctacaggcaagcatccaaactaagaaagggaggaaattaacttgccagctatgaaatcctcaaaggtcgggttagcactgtctcagaaattcaccacggtaaagcaaactctaattctcacacacacacacacacacacacacacacacacaattctcgtcttagtcatcaacactgccaacatcttagttctggaaggcctgacatactcttgattgttagtttatcttatactaaaagagtttgtgctacatagatttccttctaggatagttttctattcagaaatgacaatgatgccagagattcctatctgatttatgggtgtagctcgagagacagatatgggctcaatagtccacactgcttgttacacatctacactgtgtagacatgtaggccttgttaacaccatctcagaagcgatctggacacagtgcagctggagacagccagtccgtgcagacaagaaagcctggcatgctctgactcaagtaagaaaacttgagtttgttaggctctaatccttaacctgagttccaaatgtgtctgatcctaagtaaactgagatgcaataggaaacaagcttgtcttgcctctctatctaataaagaaatgcccttcatgatctaggagggcaatctcttgtcatgtcttggacacacctacaagacattttcacgttcaccattttgcttattcctaaaacccactccccaatctccggtatggcagactgggctgactgcctccattctatcattgcagagtaaggtgctcgggaaaaatgacgtcatgtcggtctaggcacagttagaaaacagcgggccaatccccagaccttgattccagggtaaccttgatggacgcctatgagcaaacagcggctggtgctcgtcatcactggtgggacaccccaaggaagccttggctatagtaatagcatcccaatggtccttcctcaggccagcccaagctcagcaaggaaaatgaaatacctctacctcacccttctatgcatgaaccccgagtagtttaaaaccatcttgcaagaaataccttacacatattctagaattaaataattcagctaatgcctgcaaagtatattaacatttgaagaaatagtcccaggaatgacactggtaaagccttatccacttctgtttctaccccaatggaaaaaaaaaaaaacaaaacattttctagacagctcagacacatttgcagtttccttggcagccaagtagtcaccagctaccaccctctgccagaaggaatggcctgtcgtgacttcctatgaggaatccattgagaagccatcaggatgggcaggaggaagaaaacagatttctattaagaaatgctatacaattagttacaatagcccttgtgacataataggtatcctgaagaagtgtagactagatacccactgaaccactgaaatgagacatgaaaggaaaaaccaactatcccaaaattatgaaaataagccagggagttcatggtcctctcttgggtcaagaccacagaccaaagacatggtggagagaggtctgctttcagacacctggtaaaggaaaacaggaacagaagctaggatttattgtgcacctactatgtaccatagtaatatgtcatgttttagagcatcttattgggttccctaaaatgttgatttgggtttttctgtaacatcccagggaaaaatccaaatgatctttttgaccaacccaatatttatccctcacaataactccctgagtagatactattgttatcacatttgtttctcccactgtacagcagagaaaactgacccactgtgtgtcttgtccaaggttgtgcaggtcagaagtggtatggctagaacccaggcagcctgcctgaccccctgaatctccatctcaagccatggagttgctcccaggcaagtccaacccagagctggcatctaacctgcccgctggctgcaatggtccttagggtaaaaggaccttgcatttgaaaaacagctcttcctcatggctcacagcaagcagttccggacaccagatggccagtggttccccaatctgaccactggggaccttggtgtcctcctcacaggtgacactttcagctccatctgcacccctcatggtcaccattaggccatgtgatttcattacttctcacccccactgtgtgtgtgtgtgtgtgtgtgtgtgtgtgtgtgtgtgtgtgtgtgtgtgtgtgtgtgtgtgtgtgtgtgtgtgtgtgtgtgtgtgtgtgtgtgtgtgtgtgtgtgtgtgtggggaagcctgctaggctcccctgtccatgagatttttcaggcaacaacactggagtgggttgccatttccttctccaggagatctttctggcccagggatcgaaccagtattctgcatctcctgcactgccaggcggattttcactgctgagccacggggtatgcccctctttcattccacttgtcttaaaggcccagggatcgaacccgagtattctgcatctcctgcactgccaggcggattttcactgctgagccacggggtatgcccctctttcattccacttgtcttaaagtccctttagggataagggctctaatcataccaggttgaggaaagagcaagaattatggggattcttttccctgggaagttgtggtcaatggcagggagaagcaagcacatccagattcccggggaggggggtccaacagccacctcaggcccccacccttcagatgtgcagccatagagtggggacggggcttggattagcatcacagggaccagctcacgagggagggacgtcaggcagaactattcctgctgcccctgctgccacttcagagccgcaccccactgtctgcgtacatcttatccctggggtctgtggatgtggccggagacagggtgagtccttgcacgtgggtgtttttttcccctccgtgtgagctgtcctttgttcataaggaacacaaaactgaaattcgggaactaggaacccaagtcctaggtgtggcgcctctttttttccctatttactgaagggaagagggagggtaaataggaaaaccagatgccaagagaaaggacagggcgcaggatggggaggcagggaggaatgtgtctgcagggctgcgcaagaacgaagtcatagcagcagtgatgtcagcgtgagtttccttcccttattcttcaggagagatcctgccagcccagccccaccaacggcatgcacggcgctcccacccggggcattctggaagccgctgctagcctttcagaaaacctgcaatgtgaccctgaataaaagggatccatgatgcttcccagaaattcctctcttgtacatttctgctgacaccccaaccctcttttaggttgtgcaggcatcagagataggacagacatgggcttcttttcccagctagacagtccggaatgtgggcgtcagggtggctggtgcccaggctggaccagtggagagtcccacgctggagcctatttccatgacaatgtacccatcctccccttgggtctgggagggaagatcgggacctctcagggtggcccactcccaaaggtggctttggggtcactggcaactctgacctgctggtagcacccaagtccagacccaagggaagttttcaagccccagactcgcccacatgctggctgaggctggcctgctcaatctgagttctcgcaggggctgtttctgcatcgctcggggtcactctgcccaaatctgcagggccagggctccgtccctgcccccctccctccgacgcatctttacgtggaaaagccttctcgccgccattccactcacacctcctctcggccctgggcccagcccctgccacccacccacccaaccggactctggtcccagtgacctttgtcccaggagtggagaatggtactaataatagtgccagtcatgggcaggggagctcacacaccgagtgtgactcacaatgctgtccctgtccaggggcccagggcagtcaacggcggccttcaccaggccgccccggggtgtcacacgtcaggaatccagtggcatcactgggaaactatgcttctcaagtcgaagctctgagctacgacaacagagggtccctgtttgaagggagtctctctcgcaggcggggcggggaggtggggggacgccccccctccgcggctgcagtggggaatttcctctgactgctttgttcttctcggcttctggggaagaggaaaattctcagtacaacactgacagccccaatctgaaaatggtgacaaggcctccggacagataacatcgggtgggtacctggagggaccccaggacagcaaagcaagtcgcaggaggatgcctccctccagggggacccctaaagcatgtcaaatccaaggctataatctctctctttttttttttaaggcaaaacttcaagcgaatttctactcattgagttgattacaccccttctctttgtctagggactagaaggtccccatctatctagatgagggtagttatttaaaagccctgcttttttttccctctgttattctaggctaagatgtgagctacttaggtaaaaggaaaggcacaggctaggacgggaggttagcaaggtgtttccgatgctccggatcataatccctctccatgtggccacgtgtgggtatcttttcttcccattttctagatgtgggggttgccagccatggcaatgatctcactgctcgtaaaccacggtcagagggggacttcagcttttctagttcagctgcacgttcttgctccgtcacctgtgcccagcgcaaggctaacacagaagagtcagaccccgggcagccggcgtctcgtctcgggcagcctcccgtcatactttgctctcagcagggccagccctgacaactggctctccctgcatctctctcatcactagaacacatgctccaggggcagggcccggtgtttctgctgctgtaacccaaagcttgggatggtgcctcaccaacaaacaccagctatcaaaaaacctgcttgctgttgaatgatccagctgtcagctccctgggagcctgggttgcatctgattgacccttacaggcatagtcagtgcctggcctgggacccagtcttggacaggtgagctctgtaaacatttactgaactgtcttactcaaacaatcctcctgtgcggaaaagtatcagggttttgaaaaggtgacccaaactgcttctctctattaaactatatttggggccaaacaatatgggggactcctaggctacatttcatcaacatgcaccccaaaataaaaacgaccacacctcaggtcctttggggattcatctgctactttgagaatctaatctctgtagctcgactctcaaagtcaaatcaaacacctcagtgtgggcaggacaccgcatttattttaacctatgaaactctcatggttggtcacccttgcagcagggtttacttggctccaacagcacacatctgacaggtggtcctaaaacagaggaacgggaccaagcggccccgccctctcacccaggtgtctctacccacagccaaacgatggtggcaaaaacagaacactcgaatccagaaatgacccatctgttcacaagtctatctttcttacaaactactgcaggatggcatcactgactcagtggacatgaggttgagcaaactccgggagatagtgaaggacagggcgcctggcgtgcggtagaccatgaggtcgcagagagctggacaggactgaatgactgaacacagcaactacaggagcggccacctctgggggcaggtgggcgaccccagaatctaaacgtcacccgcttcttatcaaccccattctaaattaccattcataaatgatcccaaagtccctctttctcctttcggttcttgtgacctgacgtttaatgagaaactgaacagaaagcatcctgacagtgtcttgacctctgggccaaactcaacatgaagctgcactgtcctctgcctaaggatgaaggagtcggtaccagggcaccaggaagattttcaaaagacgcaagagcggagactgcatggtactttggcttgtttttatacctgtaagagcctttccccatttcttctgagttatgtccctccgtttctcccaactcaacccaatctcatctcatctccaccacaatccacacacaatccattctgtaactggctgagatgccttggttcaacaaatcactctaaaccattatgttgtatacacttgttctctatcaatggctagtaactcaagggcagcaatctaggatctaagttcctataactcaacacataaccacaaacaacattctaacaggtgcttggaaaacatccctcgtgaatatcgtgaaagacaacaggttcatgcccttacattcacggatgctggaataaccagtatcgagcaatgaaaacaattaagaaaacaaaaccagcctttaatgtcaagtccacgtctctgaaacagtagaccaaaagaaaggaggaagagtttcaaaaaatttaaataaacaaatatgtcggacactgggcacactgactgagatgacagcagacagtatcctataaaatgaaaatatatacatgatggtgggaaatgcccaaaatagggagtcaagtgtccagagccttgaccccacttcttccctgattcattgagtgatctcatacagctcatttaacctctctgggctttagtttatccatctctaaaatgcaagcagttatcacagctccttcctgcttaagagctgaccacagtgtagaacagtttgggaatataaaacataacagtagaattaaacagaagaatttgacaacagaaaaaaatatttttaaaagcagacttttcagaagaaaaacaaggaaaaacaagatggaatagaaaaacaaaatagcaaaagcactaaataaaattcaattattcttccaagaattcaattggccttttatatggcaattttgaaagaggacaaagttagaagcaaaagcaaaatgattaacatatataaacgtaaaatgttttaaacactgtagatgagaagatagttaacgttttttcaagtgaaggataactctgaagttcctgctctaattcaaagtaggcaggcacagaaagagcagatgcaaactgctttgcaagtgaaagtatagccgacatttctggtttggggaaatcttggccacagacagacttagatcctctttcccccaatgtactttttttttttccctaatcatctatactccacagcaagcccactccacctaataaatacatagggctgagctacagttgagtccagcattccccacaaatgtctgtagtttggcccaagagacagatcccatcagtattaatcgaaggaagagcagaaagtcttgtccagagatcaatgtccaagaccgtcctggcagggagcctcgttgtagggccttagctcagccagactcccccatttggggcagacttaactgagactcacttgggtctgcctggggcctgagcacaagacagttacacacttgagtgtctggaggaaaggcccttgtttttgcttgcgctcctcacacctgcaagtgttcaaggacacacgtgtaggagtggctgcagggagaagagacggttcctctcttaaaggggcagcctgtcctcaaagacaggcaccttccctccaaactcaagaactctgtctaatcacgttcaccctgctactcagacacactcctggacagcaagctggcaaagcgcaagccaggaagtggctttcttcagagcttttcctcccaatgtcttctaggtaactgattgttttaagaagtcaccagaaatgagtgaggtctggatttgagggtatagagtgcaaactgatgctgaagctccaatactttggccacctgatgagagaagtagactctctggaaaagaccccaatgctgggaaagactgagggcaggaggagaagggggtgacagaggatgagatggttggatggcatcaccaactcaatgggcatgagcttaagcaaactccaggaaatggtgaaggacagggaaggtggcgtgctgcagtccatggggttgcaaagagtcagacatggctgggcgactgaacagtaacagtgcaaattgtgttcagaaataaaagatgctttagatagctaatacaaatatccaaaggatgtatgtataatcatggctgattcacactgctatatggcagaaatcaacactgtaaaaattagaaaaacaaaacttttttaaaagatgaaaaaaaatatatatatatatatatcctcagttcagttcagtttagtcgctcagttgtatccaaccccacaaattgcagcacgccaggcctccctgtccatcaccaactcccagagttcacccaaactgatgtccatcgagttggtgaagccatccagccatgcctacaggcaattagaaaaaaaaaaagaaaatgccttaagcatctaggtcataagaagaaagatggcttcactgattaggaccagaaaataagacttgagaattctgaagcctggacctttcctagtagattttccatgcaacctctggctttattttatcctaggagtaaagtctcccccttgtaccaaagctgagagaaatgactagttaacgtattcaaattcttggggtggtgaactatatcttaaaccatcattggagcacagaacttttcaagcctttagccaataaataatttctgagcacccctcagatgtaaagcgtggtagccagcctgggtggaataacagaagagagtattaagaactgcaaggaggcagcagaagaaaacatgtctgttccactgtaatgggataagctgaaaagggactacccacgcctttaaagaagaaaggaccgagaacccagcctggaggggccctcacgagaaattgcacccatcttggctctgaaggtcaacaccccctcagagcccagccttgagagcacctctctggcagagcaggtcccagcctctacaccgagtgcaaactttcacattcacccaccttaggacaactttcactctcattatcgctcaaggagaggtgagtcacagagcaaacaatgcagttgggtaagtcaatgtcaacaggaggcactgaaatccagaagccagtcacgggccaccaggagcgtcgggatcgtggtccagcgccctgctgtatgacccgccagacgccacactgatcagtcagggctgatggggccacggccacatgaggctccaccctctggccacagggagcacctgtgactccatccacaggtccctaccaagaacatgcttcctggggctgctgcggccagggacagggcatggaggccacatggggccactcctgccaggcggggagctcccccactgggcaactttgaccgaaattcccaggagcctggacatccccttccttggaactactgttcccttggagtttcttctcacaagtctctttccttcctgtctgccaccgggcctgaaaggtccccgccttcactttgaaagcccgccaccttctctcgctctctgccactctgtacttcagaggtcaccccccagccccgggacatttcttacaagtccaatcatgtcttgacatctgctgctcatcagacccaaaccaacatgctactaatgttggctatttccccccaccagttgtctgacattgtgcaaaactgtgaaagtcctcttctttgttgtctgctgtgtgactccgggctagacctcttccctccctgggaaccttaattccctccttcataaagtgaggataacagatttttctccatgtggttgttggtgacagttttcaaaaatatgagcacatatgaaagaatctaacacacagtgaaagctcagcacacatgtgggttgagctgaaaagctgaagtgacctaggtggtagtggtgtgcgcatgctgggttgcgtctgcctctttgcgaccccatggactgtagcccaccaggttcctctgtccatggaattctccagacaagaatgaataatggagtgggttgccatttcctcctccaggatatcttcccaacccagggatcgaacccgcgcctcctgtattggctggcaggtatttcagaccgctgagctaccagggagactttatgaagtgacctaaactgaaattaagtatcagctgtgctccccaagacactaccaggaatgactggaattctctaagttaaacccatcaccctctgaccagaaggaatgtagaactgtactggaaaaacaaaagatctggagaataatatgaaacagtggtaacagttagcacccaaagagggtttcctatggacctagcactgtgctgagtgccttccataagctattcatgcaattcccaccacaatccgaggagacagaaactgctattgtgaccattttgcagatgagaatattaaggcacagtgaggtcagtttgcccacagccatgcagctctggtcagtggcaaaaccaggacacactttggctgcctggctccagagcccccactctcaaccctgatacagtgaagcctctgccacgtagcccaaggtcaaacagcctctcacctctcatgtgcttaagctgaacctaaacctgaaggcataagagtagcaggcggggtgattatcatctgtaagcatcacaagaaagtcactttagggagaagagcacagggagggatgcacagaggcccttgaacaacacaggtttgagcttcacagatccacttatacatggatttctttttaatataaacatattaaaaaaatcctttttatagatttgcagcaatttgaaaaaagaaaaaaaaatcagacaaactgcgtagcctagaaataggaaaacattaagagaataaaaagggaggtcaggaatgcataaaatacatgtagatgtacataaaacacagaatatgtgtaagtggactgtttatgctagcaggtcaacagtaggctagtagctaagtttggggattatactcagatttctgactgcacaggggttggtgcccttcaccccgtgtgttcaagggtggactgtagcgtctgttgaatggaaggaatctccatgcgtctgctgaatggaatgagtctccatgctgaggacccactcactggtctgacagcacccaagctgggaaggcaaccgggaaaccaggagatgccaaggggcgcaatcaagggaccaactggaagagcccttggcagctgaggccacgggattttccaggccagctgctcacgaccaacaggacctgtgaggttgcctcagcaacacacgggctggattctgctcaggggaaacatcggcttcaaagacacaaaggtggcacttctaagaggagacagagcggcattccagcagggtcaccacccagttccaccacatggagttaagagtttgttaaagaaacagccacccagaaaatggaagaaccagagacgcctcgaaagcaggtagttggcaggggaaggggggtgctgtgtcccctaaaaagatgggtccccttgtgagtttcctgactcccaatccaggcacccacaggcttcaggtggtttaaacaccaggatctgctatctgttttgtacagcataaaggggtctctctgccctaaaggcagcttcctggagctactggagctgcgtccagtccccggggtggctcagccagctgtggtcttcaaaggcgactgacaaaaacagggaacctccctgtccacaccttcaaagccgtttagaaggaaaaagtgaacaacgaggccgagtcctcccactatgtgattttctccacgggtggcagatgtctaagaccaactgtccccatgcaaaccagtcaggaggcagaggcagtggaacctccacgcaggcaacaatactaagggggttctgacccctccagctcggagctgccggggacccccgcaccctgagctccaacatacttccccagcagtctcataactgagcagcagtcaactcactgctccagtgagatcccactcacattccatgcacgccctgaggacccaccgccaagcacagcgcagagaatcagaattccccagcttctgagatgctggctcgtagctaggctccacataggctgagggggtttgtctggcttcctgcaacccgtcactcacaggggcctctgaagaggaaagggcagatgctgtttctgcctctctcattgccaaactcttctcctcccagccatccaggcgctacccacggacgctctaccctgagacagtgacgctccctgtaagcctgaggccaagtccagttttgcctgggctgaaaacctcaggactcttgtaaatggcaggattgcacaaaaagagcactagggttatatgcttatgtcagcaaagactgtagtcaactcacaaccttaaggccacagtattgacatggagagaccgtattccagaacctggcttagggaatattccctccacccccaattataaagctccaagttgttcctaataacatctccatgggcgtgtaggctagaattagaatctcctgcaccaattcacaccacagtcttcttctgctctggggaccccctctcctttcctcatcagtgactgaggctcacatgagaagcttcctctgaggacactgagatgattttgcaaatccagctttccttccgcaaaccgtgatttcaggtgatgccccccaagctcacatttcattctgaactgaagggcttggaagcccttccttttgcaggaacgttgtttatttccaaaacatgtcttagcagtactttcatgtttctgaaccttacaactcaatgaccagtcagaacgcccaggttttgggtgtggcccttggactctgttattgtgtgagggtagacgggctccaatttatctacaaaatgagaagaaagtttatctcaggcaaaaagcaatggatgctaaagcatctatttctgctttattgactgtgccaaagcctttgactgtgtggatcacaatcaactgtggaaaattcttcaagagatgggaatatctgaccacctgacctgcctcttgagaaatctatatgcaggttaggaagcaacagttagaactggacatggaacaacagactggttccaaataggaaaaggagtacatcaaggctgtatattgtcaccctgcttatttaacttctatggagagtacatcacgagaaacacagggctggaggaagcacaagctggaatcaagattgccagaagaaatatcaataacctcagatatgctgatgacaccacccttatggcagaaagtgaagaggaactcaagagcctcttgatgaaagtgaaaaagttggcttaaagctcaacattcagaaaacaaagatcatggcatctggtcccaccactttatgggaaatagatggggaaacagtggaaacagtgtcagactttattttggggggctccaaaatcactgcagatggtgactgcagccatgaaattaaaagatgcttactccttggaaggaaagttatgacaaacctagatagcatattgaaaggcagagacattactttgccaacaaaggtcaatctagtcaaggctgtggtttttccagtggtcatgtacggatgtgagagtttgactgtgaagaaagctgagcgccgaaggattgatgcttttgaactgtggtgttggagaagactcttgagagtcccttggactgcaaggagatccaactagtccattttaaaggagatcagtcctgggtgttcattggaaggactgatgctgaagctgaaactccaatactttggcaacctcatgcgaagagttgactcactggaaaagaccctgatgctgggagggattgggggcaggaggagaaggggacgacagaggatgagatggctggatggcaccaccgactcgatggatatgagtttgggtaaactccaggagttggtgatggacagggaggcctggcgtgctgcgattcatggggtcacaaagagtcggacacgactgagcgactgaactgactgaactgaaaagcaatggggattgtctagggcttccatttctacaaggctggtacccctttgtgcaatgtctcactcaaaaatacttgcaagttgaattcctgatggtctcaagtgtagtctctcagaggctgaaggatcagctattcataagtctacacagcatagtaaatcatagtttcattacaggtatgaatcgcttggagcttagccttttcccaggctccatgataaagaagagaccctgagcacttcatacaacaattgcaacacagagctggggccacacctacacactgacaacacaactattaccagcaggactgctccacaccaactgcaggagtgacaggaaagaattccttatctgtatcaactaaagtctggcaatctggagggaagttctgtgaaggtggtttagagaccatagctccaccccctcctgcataccacgccccctccccctgcatagtgttaatgagtgacaagcaaggcacaaggccctgaatgtactctaatgggagtaactaagataaccaatgagtgttctcattctttaagagagaaagatttcatattcaagtgagacatctggcacttaaggttcagttaagagccaccttcctgcagaaggcttggaataagtcatttttttgtgtctcagttttgtcattgataaaaggagcctgaagggacagagaagggaagggattaatactctttgaaaatccagcatattattctacacctactgaaatggagggaaaaaaaacagggatgcctatgtttgtcaaggatctagagagcattttgtttaggtccatcgaatacacagaaaacactgggccacttctctcgggtggttttgtaatcagatggggttcataacgtatcttcaaacaaaagaaaatggagctttctgattgtatcagtttgataatcataagcagtcccagcaaggtaagaaggtgcattctggcggaagccagtgttgcatttgatgttgtctcaactcagctaacaggcaggctttcaagccatgttatctgcccccacatcttgacctaatttaacaagttgccacgggagcccgatgaaggttgatgcaattttcttatcttgggaggaagaatgcaactgtgcaagagaatgtgaaaattcagtttctaactgatttccacacttacagtgcggtaatcgagacagcatcagaagtcaaatgtattcctttgaggatgtaatggacagattactgggctcccagagacaggaaaatggattcacgtcccagttcagggaatctatacagacatcctttagttcaggtgacataaaaggtatacacgtgctcctactgtgtggccacacacaccctggaggtaagcaaatataaaggaaacagatttttttaaaaaaagagcatataacttgagatggaaaataggtatgatgtttatgagcaatgaagagttttgccaacacttatacaatgatttccactctccaaagtacttttccgaacttcaggtcatcttggcatgtctgcatagactcagagactcatttacaagaactccagtcactgcacacttcccaggtggtggaggggcctaaggaagcatgttccgttccctggccccctccctaggatgtatctgagatgatgaggggtcacaatgaggggcaagatatagttttcactgtggacaagagatatttaccagacagtgaacacggggcgggggtggggggcgcggaggtgggagaggctgggggttggggaagaaagccacccaaatttggaccactccccataccatggggtggcagggagtcggacatgtctgagcgactaacaccacatgccaaataaatcctgactttcatcaaaccacagcaataacaaaatccagttcaagtctaaggacaatgacaatatcttgaattcgtcaagatagtgaaccttccaggcctacgagcacttatctgtactcaacatgtactcagaaacatctgctgaaataattgatttgttacgattgagctttctctcctgcgtctagcaactcgtctggcactcatttgtctcattaactgagttagttcaattacatgctcacagatctcctaccaagagagggagggacacttccacttcgctaaaagtagaagagggtacaaggtaaatttgcctaaaatcacacagtgtgtgagggctggggggagcatggaggacttctgttttctgggctatcgtttgcacctctatctgagagggcttgaaaagtaaaatccccagttacaaagaagaaaaagctgaatggtaagatacttttaaaattgtattttagttcaaatgaccactggagtttttgagatcattaactggtaatcatctcctttgtcccattgaatgaatattctactcccttagagacagagacagagaaagagagaggaaacaagagcgaggaaaaaaaggatggaagggacgacggaggaagaagcaatcattaaaacaatccacccaaagaagtgtatgcatgctcagtcgtgtccaacgcctctgcaaccccgtggactgtagcccgccaggctcctctgtccatgggattctccaggcaagagtactggagtgggttgccatttccttctccaggggatcttcctgacccagggatcgaacccacatctcctcaatggcaggtgaattctttaccactgagccaccactggaaagcccaaataagggatgacatcaaacataactcagacttccaggacgttcctgtatttgtcctgaaaagagctttagatgttctgatctgtttggctttggatgagaaatgcccacctgtgagaaggctcacaggtggcatgttggtgttgcctctcctgatggctgtcttcatgtccaaattcatacccttaggtcttaacattccacttcatccttttccttctctccttgaaactatgacacttggagacatttccaactctcagatgactcttgttaagatcatcttagctgaaactcttcaaatcacttgtagagtatgagctctgcaggcttctcccatcggggactccaataacttatacacgtgcccttttcagaagagtttctatttgaggtagagatcaggctttcaccatttctagaaacttctaaattttttgtagagtagccacaattccttaccagaatcttaccccatgcaggttgacctaaatcataaggctttctctggccataacccaaactttagaacttaaaagtcactatacttaatgtgattatccacaaaaccaccttaactagcaaaattttcagaactgcacaccaaacgaaaagaaaatgatgaaaactgttaaaggagaagaattatgatcatgcctgctgacagtggtcatggtagagactatgtcagagggaattaggcaagacctttaataaggagaagctacattaaggatttggtcctggaagtcagggtggcagggggaaggagaggtggtagcaaacacttgggcaaatgagagcacttgcatcacaagaagagaggcaaacacagccactcagagatgcctgccacctccacagcccaaattcacttcacagctacctctgcctctccccctcctaactacgcaatcttttcctcctcctccatcagtgtacccaactggagtccagttctcaaaatacctaagtgttactataaggggttttccaggtgtcgcaggggtaaagaacccacctgccaatgcaggagatgcgaaagatgcaggttcgatccctgggtcgggaagatcccctggagaaggaaatgatggcccactccagtattcttggctggaaaatcccatgggcagaggcgcttggcaggctacaagtccatggggtcgcaaagagtcggacacaactgagtacacacagcactctcatacatcctgaaatacactttacatactttccgtattccaaatggcattaatagaaaggcacaaactttctactgtctgctgcccagagggaagggactgacccccttgcacaatagccatttcccacctactcgtgatgctcaagcaaggacttggggaatattgtagaaagaaaaaagtaggtgactattaagctcctttctggcccatgactctgtatatagttctggttactacttcaaaatccaaacatgcctgctgagcacctatgcatgcactgaactgcacaaggagctggaggaatgcaacgtaagggacacaaccctgatccatgaaggaggaggaacttttccaagcatgtgagttgttctcaaaggtcagctgagtttccttgagttttccctcacacaaaaacagggatagagctcttaagatcagatagacacctctctagaaatgcagattgaggtgtctgtcttcatccacacaaagggtcttcacatggtgccccgcccagggtggataaattgcaagaggccaagaccaccgctgcgcattcgaagcttaaaacaagctccactcacaacacaatttctgaatttcagaaaacactacgatcttacaggcttccctggtggctctgccgtaaagaatctgcctgtaatgcgggagctgcaggagatgtgggtttgatccctgggtcaggaagagcccctgaaggagggcacagcaacccactcctgtattcttgcctggagaatcccatggacagaggggccaggtgggctacagtccatgggttgcaaagtgctggactgaagagattgagcaggcacaatcttacagaaaagatctgatcattaatatattcccactcctcgcgtagatctcagatacacccttcaaaccttcccaaggttacacagcctctgtgccccacctcacttggacaatgaattcagattcttggaccagattctcaatcaaagcccaagctctcaacatacaccttcctttctcttttgttcaacatgactacaactttcactcctgggggaaaaaaggcaataataaagttcagtgagaagaaaggtgtcctctagaggccaggatctagcctgagtgtagggtgcctgagggcacttttcccatttccactcctgcctgataatgaggattctactgccaatgagtccagggagtagacccattcagtgatggctttcagcaacgctgctgctggttctgtgttcaaagagccctccaagagcaggtaagaagcagccccttgatgctaggctgggaaggcagaatttccagaagtaccggctcgacagaattcccttccccctagttacagattcaaaatatcagttttcctaccactcttggaaagaaacccttgaaacagaatgatacgatttgcttccaaaacccaatggctatctgcagagtggcctgagaggctaacccaacctctcagagtctacttgtcccctagaaagggggtaaccttaggggctggggacagcacagaagtgtccagggagcccaccccagagggtggaaggaggccaggcgtcctacctgtgtagcctgccagggccgcagcaggaatgacgggcttgtctttattgaggtcagcgcggtcacgcacatagtccttgaaggtgcccttgggcttgtggttggacaaggcggctggatagtcctcggagtcgaagctgtcgtaggaggggacgcgctgcaggctgttgaaagacgactggctgctccaggactgggtgaggcggtcacagctgtcgtagctctctatgctctcgaaggagtcctggcccccgagcttacctggaggtggaggaggaggaggaggcgggaggagggcggggaggagggatgggaagagacactgtgaaaccctctctgtgaggatgtgcagaagggatacagagagggagcggccggcggggatggaggtgcgtgcatttgctccggggaagaggggctgcctggacccagcctgagagcccccgcatggtccggtcttgctccagagcccctagggccaggactcagagccgggtgttgctactcatctctgccagggggagacagcagtgtctggaacaacgagaattccacaaccagaaacctacaggctgagaacacgtctgttatgacgagatttctggccgatgagttagacccaatgagtggatgaagaaatctgagctgcatcaggctcaactcaccctctaccctaactcaagccagggagatgatttcaaaaggccccatttggcaaaatattttggtcataagaaaaaaaaattccattacactaggagagaattgaccttccttgaccttggaactaaaacactattttttagccttttttccaaacactctttgaaatgtacatcgtaccgcctctatgccttctcaaatagaaaaagaagtcacgagatgttttttttgccaggaggttaaaaaagaaaacattatcaatcttctaaatagaaatccatattctttaccgagcactatctgtacttgaaatttgtgctttattagggaaacgaaggcacttaaaaagaaaaaaaaaaaaaacaaagaagttgattaaagagttaaggtccgtagcaatggcagaaatcctttactctgtgagttgcttaaggcattcttaactgaccacaagatcatgcaagttcattaattttccaaaccaggttataaacagctgctatgattgcataatagctcctagagaaatttccattggcaaaaaatgccatttaaaaggaggctgaaaacggggggtgggggaggggacaaaaacaaatgcagctaactgctgaaaaggctcacaggaatatttcttatgttttatttccagatactttccaggcaacctcaattaaatcatgggagattaaatggctgattgagtccagcaaagtcaagaggccaaaggatgtgacaaatgtgcatgcagaaatacctgtgagtcaaggctggctggcctactctgacgtttaaaccccagaagaaagttggtatatacaaagtactgctagtaagtttctggtgtatcctcctcttcacaacagagaaaatttgttaagacaatgaaattcaaatatttaattttggtgtccaaaccaaaattaaatatacagtaattaggaaggaagatatatcgcttccaaaaaagatttttaaccccagataaaagaagttaaatatgtaatttttgcattatctactcttgtaaatttcctgagcctcttatcccttccaacactgcttggaacaaaaatacagttagttatctgcttcgtctcattccttcttccaaccactcattcaaagaacggcaatccccagaaagccttggagctgttggccccatctgccaagtccacggtcacatttgcaactttttattattatcattattatcatctagttaatactctgtaacgacctacatgggaaaagaataagagtggatatatgtatatataaactgattctctttgctgtacacctgaaactcacacaacattatgaaacactatactccccaaaaatgttgtaaataaaaaaactttaaaaagaagggactgtcccttccagaaattcacattaaaagtctcaagaaaacagaacgcaaccaagaacgcagcagcctcttttcaacagaacaggaaattttgtggcctcccataaaaaggtgtttgctcattccagctgtccatcttaaacataccaaaagcctaagaaagagtttatattttcatgaggaacaccccaccaagtcccttgcatttacactcagaagtccctgagatgattccgtcagtcatttttatactgggagggcgtggagactagaatttccactcgctggacagctgaggttccaaggaaccccagtaagcagggacactgaacgaggctataaccgccccctggcagcctctcaaacataagccaaatgcaactctgttgagagctgcggtttatagcaggaggctgctttcatttcagctctctttcacaatcctagagctgggaaccttcatttacgggtatttttctcccaaaatgggttggttccaactagatgagtcgctcagttaggctactgtgttcagggacggggaagctcgtgtcctctaagacatccatccatcggctggctttcctgaggaatatcttggcgaggtccttgcaaagctccctgaccccaccacacagacctcggggcacccaaagcaagaggtgggggagccccgtggcagcccactcaacagaccagcacaaagaagacagctctctgagtccaaggaagtggaatagaaacactctgtctaccctaatgcagtctgggaacactgcgattattgttcatcatcttcaactaacagtgatgctttcagtctaccccaaccctgccacggcagagtcaatcaccccgctggaatacgtcctgtttgcagcacttctcactcgtaaaaaagcaaccgtgaacaaaacggtctgcccccaagtttgtgtggtgagatgcttggtgtgagcaaaggagaacgaggccagagagcaagccttcctgtttctctgtgcagttcaccgtctggcccaccatcattcttctggggtcgcaggaaccaagaggagagggaagaggccagttacacagagcaaagccagacgcaagtggaaaacaaacggcaacagtcctgcccaaagtgacagcacactgggccctcctaccacacacgcatgcgcatgcacatggacagcctcactgcacactcacagaaaaccccgtgagaaagacaggcattctgttgctatgacccacctgagaaaaaagctacacatgtaagtatttaaatagacctgtatccaaaaataaagaaggggaaggtaaagctggtcccacccatccccttctgtctgaaacacaaacaccccgtggccctaaggagggcagattacaggctcagattctgctgggactttccctccgcaggcctgctgggaggaagtgggagcctggacactcgaaggagctgacagtgtgagggccatgaggccgtggcctcaggacagggagcggggtcagcactgagcagacatcactgcgaggccggctacttggaaagacttcctcctgctcatttcctgtctgtaactctttccagtttatccatcacaagagtcaagctagttctcctgttgagtgatctctagcatcatttcaagtatttggcagaaaagtagattataggactggcaggaacctgggtaagcttctgtatatttgaattagaaaatctcaggacacttaaacttaataataataataatgtgtcacctaacatttctgggcttctgttcccttttctctgaaacctaatttactctcattttaggaagagttctataatatctgaaatcatgtcttatttctgtttcattttgcataaaaggtaacatccagaatattaaaaaaaaaaaaatcagctagttcttctcccatgagcaagtctgtctttatacaggactgtccttctatcagagcaaacagtctggacaggtcactagatgggttgtgtctctgagtgtttaggtcctgatctttaaagttgagggtatttaaccttttttggctttgtaaggtcagtcagctctgttcagaaccatgcagttcactgtcagtgaatatgttacctttgtcctaagagtcaaggcagtgtgagagagtatctagttttggaagcttctggccacctctttccctggtcctctagctaaatacacacttagaccacactgctgatgactggttccaaataagctgttggttaaccatcttctatcttcccaaaccaaagaagtcacaggagcttgggaagcccaggctgagaagcagaggtcatcagacaccaagccaggaggggcagtccgactcgggaatactcaaacaccaggacgacgtggagatcaattctctccgggagggttctcagaatcatttttatgtgactgtgccctccttaagcaaaatcctctcaaggaaaataaagcacgcatgcacctaaattatctggtgaaatatcgtacctaactaagaaatgcgactggtcttcctgccggatttcaattccaccgtgaattcacagtctcagtcatcatgaaagcctcggctaagacttcatgatacaaagttcttaacagctagacattttaagacggaaaagcaaaaactcaggaatgcccgtggctaagagtgagaaggaaaaaaaaaaaaaaggaacccaggaaacgcaccaagcaaggcaattcttagaaacttctagagcagaaatgtgacctaccacgactggccctccccatgcacatgttatctggggtcaccacttcttgtttgatggcaaagtagtctgtctgcaaggcgtccgtctgcagagggtcccggaggatgaccgaggggtagtcgttctcatatttgagggagaggagctcctccgagctgatgggatggagagtctggtaggactctgtgatgaagctgggctcggagaactccgagggaggaacgcactgggcgtgctcaataccatagcctggaaacagagtgtgtgattggagagaggagaggtgagtaccgaaaacaggctattccctccccatttacaacggccccatgatgttaaccaagctaactacctcagggaataaaagacaaatacttgaagtcaaaagggcctgggttttcaatcttgctccactacttaagggccatggcccttgacaggcacttcccttttctgactgaattctctcatctctaaaatagggatgatggcaatcttccccagggcattgtgacgaagatccaaggacagcacacaaccaacctttctagcacacaataaactcactgttgttgtgagtatacagatcataataaagtaaaacgataaagggaaaacaaacctacttaagataccctttgaaagcaaagccatcagataagcacagccctacactaattctcttcctccggccattcctgcaacctggtgagggatcaggcaccaggaggacaaggctttctgctcagacagaacccgaagctgcagggcatgccctgaaggaaagatttcaaagggaatgctgttgcacgtactagcaaaaaggaaagaacaagatcaaaatccctgacctgaacctctgttggccaccacatggcccagggtcaaacaggaccactggagggaagcaaatagcagtttctctgtgacaatctgtcacgctgaggatatcagcaagaccccagtgtagaagcacgcaggtgaataaaacgtgcaagaggttgaaaccttgtgctttgcaggaataacaaagcaaataagcaagtgtctacatgttttctaaggttttttttttaaaaaaatatgggccatttctcaagactttattgaatttgttacaatatttcttctgctttatgttttggttttctggccacgaggcacatggcatcttagcttcccaaccggggatcaaacctgcaccccctgcattggatggtgatgaagtcttaacctttgggccaccagggaagtccccaagagtctacatgtccgaagctattattttctgtagaactgccaggcaggagcctgagatggcctaggacagggttcctttcctaagttcccatcacagtgagcaggaagagagaagaggagccaaaaggaacttactaatgaagtaatccgaggtatagcgggactctgggtagggagggttgactccattaacttggtatggcttcacatcctctgcaacagaccaggaagggagggaacaaagaggtcagcatgtgagcagtgctcagcagaagaggaccctggaggcgaggaccacagtgatctcagtcccgctgagagaaaatctgcatgttccctaactgagctagtgtctgagcctcccctgactggacccttgtctacggatgagctcaccaaagtatggctaagtttatgatttcagtagctggaaaaggggatttaatatcttggaaagcatgcccatgagtaatctcgaagggctgggaaggcatccaccctctttctgatgcatgcgtgtgccgccagcctccagggcttgaagacatcttgttgttgttgtttagttgctcagtcgtgtcggactctttgcgaccccatggactggagccagtcaagctcttctgtccatgggatttcccaggcaagaataatggagtgggttgccatttctttctccagtggatcttcctgacaccttgggagtttaccaaaatcagtcgccaacattcaaacagatcaggtccagagtttttcagaaacacaggacaatctttttaggcaggaagatttttattattttcttattattcttactgctatttatttctagccatgctgtaccgcacgggggatctcagttccctaaccagggattgaacccctgccccctgcaccagaagtgtggagtcccaactattgaaccaccagggaagtgcaagcaggtagacttcagagcctccacttcttccagcagatatctggtgtttggtgttttttccattgccctcagatttcaagttcaggcccaggtaagacactagtaaggtgattctacttggtgaaatatgacagaagagccacataaccaaagttctgtcctggtgccaagctctataggaatgagagtagaacgcagatgaaggtaaccaagcagagaaacttctcccctgaaccaaagtgaacttgtagatcccctaatgaccttggaatctggtggtagcccctgactactgtatgcaacagtcggattacatttcactgtaagaatcagacatagacagagggggctggtttgggtttttcctcaggtatttgatagcttgttgggagcagagactgctgggaaaacaagttcatgcctgcaaagaaaaacagttcccagctgagataaaatgattaaactctgcttcagcagcttatcagattgaaacatcccctgtacctttggcctgccaccccacccagaacagctatgtttttttcagcactgggttgccttactttaatcacagaacaaaagctgtagcctcaatacaaacatcacactcagctcttggaggatctgaagaagcacagtcctccgtctcccttgaaaatgggtgagatgttctcaagctcactccattactcctcattctcctaaattcattggtatgattcctctgcaggaaggtaaacagccgattcactggaaaagaccctgatgctgggagagattgaaggcagaaggaggagatgacagaggatgagacagttggatggtttcaccgattcaaaatggacatgaacttgggcaagctctgggagatggtgaggggcagggagacctggcatgctgcagtccatggggtcacaaagagtcggacgtgacttggtggctgaataacaacaaagccagaagctccccgccatgagtccatatcactacacaaagaacataggacgggaagtttggctggaaagaccccactgtaaggaaacaagtgatggtgaggaaccacctgacctgtccttgttttacagacaaggactcactctaagaggacatgcccttcctgtgtcccacggttgctttgagaatccaaacagactggttcacagtgcaaacttttctgtctattcatcccattcattaatttttgagagtttgatattgaaactccaactaaaaatcttaacttatctacttaaaaaataattatgtagtggagctatatgtacctttgttctatattttccaaaactcctgtaaatgtgttatcataatttcataacttaaaaaaaggaaaacttatttccaagcccttgggaaacaaggaaatgctatatagatgagttgtaaccgatcagagccgactgacactgtagaccatctggctgcctggggtgctgacgagagggatgcagggctttggcagcatgtatctgggtgacacggtctgatagagtccactgccgtgtttataagccaatgcttgcatcagacctgctctgagcctgccgtatcctttccctctataaacaggcgctcacgtcaacacgttatgagtggtttgtgtgcagttataccgagatcacggcgtggcttcggggaagccggtaccgccacccagcagtcctgggccagattcacctacttctcaattctgcttatttatttatttttcagctatagctgaggagaaagggggagagaaaaaaaaaaagtaacacttctgtgcccagaggagtctaatttgggtctctcctgggcattgcagaatggaaaatatccttaaacaaaggaaggtattatatggaataaaaaagtgctaagcctgagctctgctccctgcctcccgcgtctgcaccaggggttggagctggtgaccacagggaaagggtgggcctgggtcagagagggcaacgggcttctaggcttacagtcagctggagggcactgctgactgctggtaactgcaatttattttaagaagaaattcagaaaaataagcgcaaaaacacccaagtttgccgcctgctgctgtttctatactcagcccggactgtggtgcatgagtcactcgatccaaaaaggttggaagaggctggtaggagaggccatgtcattacaaggttgcaacacgacgtcccgacataaccccagcttctgcttcagatggaaaaggtgtacctcgcgactgcaattccagtcccgttagtgggcagagaagactgcttattaagaagctctgaaacactgagcttggatgtggccatgggtcaagggggtgtgtttcacgattgccaaaaaaaaaagaaagaaagaaaagaaagaaatactcttttgctagttgtgggcactgcttgttcaagcagtatatgagtttaagatagggactgagattagaactttgcaaaccaagaagctttaggaggtaaagatgaaaagtggagctatacatatatacactaacatatgtaaatagatagccaatgggaatttgctataggattctgggaactcaaactgggtttctggaataatctagaggggtgggaatgggcaggaggtgggagggagacacaagagggaggggacatgtgtacacccagggttaattcatgttgatatgtgacaaaaatcaaaccaatattgtaaaccaagaatcaaccaattaaaaataaacaaacattttttaaaaaggtggagtatccagtacatagaagaaaaagaaactaatgcttatggagcacccgctccctaccgggcaccatacggcacgtctctgcagatcgtatgtgctgtggctggacacccagatgacgacctcgatgcggcatcccgctccccagtcgactctggaagctgccccgtgcaggccccacctccctcaccccaccccgtcctcaggcatttacctttctgcaggatctccaggtgttcccacaagatgtccccaacgaagtctggggccagctcgagaaagcagtctttccccagtgcgcagagggctgccccgttcatacagaacttctggaagtccacacccttcaggctgaactcattgacagcccacatcacccagtcccgaacgtgggtctctgtccactgccgggggtctgcagggagagatcagatgatgtcccagcagatcagggtctcaactcttccctgagccttggagactacacaaaagtacctgaccttcgctgacacattctcagattcacggaatgaggaaggcctaatggagtatcttccataaccctcctccctgcatccaggtcagccccatcttctccctcccaccagttagctgatcactgccatcagccaaaaagtaacaaagagtattctccacccatggaaccttccaacaggttccaagagtctcctctctcactgccttaattccatcagactttattaaagcctgggaccagggaacaaatgactcctttaacggcaataatgacaaagtcaagtgagctctggacgttgcactcacctctccctgcacttactcatgtaatttacttgcggccattatgcttaattattcttatcttagtaatgatggttagtatagttgtccttgcatatccaatgtgattggtttcaggactcccccagataccaaaatctggggagatgcatgttcccttatatacacaaaagggtggggcacactcagacctctgtgtatgtgggttctcacatccccagattcagccaacagaatcggatctgtggttgtctgaatctgccaatatggaacccttggatgaggagggccaactatagtaatcacagcaatcaggagcagtacgccattcaagtaatacttagtagtaacattattgtgtgtgtgttagtctgactgctcagtcgtgtccagctgtttgctatcccatggactatagcccaccagggtcctctgcccatgggatttcccaggcaagaatactggagtgggtagccatttccttctccaagggatcttctcaatccagggactgaacccgggtctcttgcattgcaggcagattctttaccactgggccaccagggaagcccaacaatggtattaggtacctgtattataccagacaacctgcaaaataaatacataagacaggccctgcattgaggagccatgcagaacagacgctacataaccttcatgtgcgggcctggtttaacatgactacaccagctcacggcactgaccgagctcaggtgatggcagggtgtggtgcctacagcccacctcctacctcctctcaggtcatccccttcagtctagaagatgactttataagatgatggaaaagtggatggtcagaacccactttattctgctttatgactgggctctgctgtcagcagacgtttgtggaaaagcagagtatatgaaaaggtagccagattcattcatagaatctccctgaggcctgcgtctggcagggtggcagccgctcgctcccgcagcagtagcattggctgggtgcaaaggcagcctctatttttcttactcaatagaaacgtgttccttctgctctcagttgctcgggaaatgccgcttggtcaaggcttaagtcttccccagtcatttttcctttctgaccactcaagtcacttccctttacattcccgaataccctttcagaggagaatgcgtgtgtgctaagtcgcttcagttgtgtctgactctttgcagactgactctgcagaccagagcccgccgggcttctctgtccatgggattctccaagagaagaatactggagtgggttgccatgccctcctccgacccagggatgtctcctgcattggcaagcacgttctctaccactagcagcacctggaatgccctcagaggagaatacccaagtataaacacatttcaccaaaggacgtggaagagtaaatcccagaactgtagctcatggagttcatctaacggcagcccagaatgacttccaaacttgtctgtacaacagagtcacttgagctttacaattactgatgctacaggcaattgtgacttaattggtctgggatctggcctggactgtggaattttctgacgatccactgtttaatgtttgaacaagtttgggcaccactgccctaagaccaagatggcagggacaagcctggaagatgagggagcatcagcatgtgtctacacttgttccaacagacgtctgtcccaatctgtggctgctgattgagggtggtgagtaagtctatctccaccaacaggtgaggaaaccaactatatctcaaagtctggtccatcctctctccttccaactacaaaacctaccttttggaattcccagacgttgctgctctttagagaaaccactgaaagtagctttcaaggcttgagacatcatttctttgctgctaggagttaagagcgggacatctgcacattccatatctgcaaggcaaaaaatatcatatgaatacaaacaaaaatgaaaaaggtgatggatgtcagctagactgatggtggtgatcgttctgcaatatacacaaatatcaaatcattatgctgtgcacctgaaagtaataaatacatgtcagttatacctcaattttaaaaatgaaactaaataggtaattaaccacccataaaatataatagagcatgaatgggctgaaggaggcaagctgagaaataactgtagtagcatcatcaccagggcaggtaaaatttggggggctttccatagtgtggtagggtctgtaaaaaaaaaaaaaattcccgactcttgccttgaatgtctgtatctctgacaaaatatgtcaattctttctgaatagctctaccagttccccatagcctctattcatccttcacattcactgagaatattaatgtttctgcacacttgctgttacctctgaaaaggaaataacagcattcattcaataagtaattatttagcccttgctacatgcaagagattagagaaagaaccatgaacaagacagaaatgattcccaccctgatggagctgggtatcaggttccagcagggaaatcagttagtaaaaatctatttgcacaattaaacttcaaatacaacgtcaacaagggcttcacaggagtaggaaatgaagtgttaacctataatagagggtcctataggtctggagcaatcagcaaaagcctccttcagaagacagatgtttgacctgagatctgaaggatagaggatacaggagtttaaggaaattactccagaccagtggttctcaacgtgtggtccccagaccagccatatcagcatcaccggggaattcagccccacccagacctcctgaattaccacctctgagggggtggagcccagaaatccattttcaacacagaatccaggtaacccttatgagcactgatattagaggactgatatcctaagtgaagggaccagcatagctgaagattctgagacgggcaaagaggagaacctcggttgctttagtatcaaaacggtcggtgcagctgtggcgcagtgactgggggacagcagctcgagaggaggctgaaaaggtaaggaaggagggtgtgcaggaatttataacagtatcctaagtaagacagaaaggtactgagggttgcatgcagaggaatgatgattatattttgtctgaagaagatcaccttgcagtaattgttctttttttttttttttcccctgtctcactatacagcacgtgggatcttagtttcccaaccagggactgaacctgctccccatgcactggaagtacggagtctttatcactggaccaccagggaactccctatggtaattctagttttcatttttcaaggagctggcatcctgttttcctcacagtggctgttatgattttaccccaccacagtgcacatcgggcttcccaggtggtcaggtgggcggtaaagaagccacctaccagtgcaggagacgcaagagttacaggttcaatccctgggtttggaagactccctggaggaggaaatgacaacccattccagtattcttgcctggagaattccatgcacaaaggagcctggcaggctacagtccacggggtcacagagagtcagacacgactgagcgactaagcaacaatccagcgcacaacagttccgcctcctgccagccctcagcagccagtgtacacacctagtggtatcacacagtagctgtgatgtgcgtctccttaatgactagtggtgttgagcatctttccatccgcttactggccatttgtgtatcttctttggagaaatgtctattcaaacattttgatcatttttaatggagttatttgcctttttttgtcgagttttaggcgttctctatatccctcgtaactcagtcagtaaagaatctgcctgcagtgaaggagactcaagttcgattcctgggtgaggaagatcccctggagatggaaatggcaacccactccagtatttttgtctagagaatcccatggacagaggaggttgcaggagtcagacacaactcagcgactaaaccaccatatacctagaaaaggtgacagcagagtcttgaagagatatttgtatacctatgttcatagcagcattattcacaagaactaaaatgtggaggcagtcagctgtccatcaacagatgaaaggataagcaaaatgcaccaatagtgtatacatatgatgcaatatgattccaccttagaaaggaaggaaattctaacacacattgcaacatggatgagacttcccattatggtaaatgaaataagtcagtcatgaaaaagacagattatatgaggtacaaatttatcaagtcagcaagtagactgattgatagctgccagggcctggaaggaggagggaatggggtggagggtggggagagttgtgtcttgggaacagagtttcagttctatggatgaaaacagttctggaggtggatggtggtgatggcaacattaagtcagttagttaagtcgcttggtcagtcgtgtccgactctttgcgaccccatggaatgtagcccaccaggctcctccatccatgggattctccaggcaagaatactagttgccatttccttctccaggggatcctgacccagggatcgaatccaggtctcccgcattgcaggcagacgctttaacctctgagccaccagggatggcaacatggatgtatttaattccacaaaactggaatttgggcttccctgatgacgctagtggtaaagaacccagctgccaatgcaagagacgtaacagacatgggtttgatcccttggtcagaagatcccctggaagagggcctgcaacccactttagccttctcgcctggagaatgccatggtcagaggagcctggcgggctccagtccgtggggtatcaaagaatcagacacaaatgaagtgacttagcatgcacccacaaactgtaacttaaaaatggttgagttggtttaagttttatgttatattcatttttaccacaattttttaaaacgggggaaaaaaactcgtttttagccgccccatatggtttaggaggtatttctgaatgggtgaaggaagacttgttaaaaaaagctcttgcattagttgtggtgagagatgatggtggctttgcctaggaaggtggctctgcagaaaaattcaagtgggcagatgtgaggtgcagagaggagacaatagcgataaacctgatttatgcaggtggtgcagaagagtgagatgccaacatctgtagagtcacaaaggggtcctctgccactgttgcgtgtacctccatctctgccgtatccaatccctcttgtacttgcagaccatgttcaaagccaagacatgtagctatggttcaagttaaaagtcctccaaatccacctcaggcacaatttccaacaaaaagtgaaaaagaaatgacttgagaattcctacgagctgtcctgtgaccttcagacctcaatgcacttcactgcagtcatttccagaagccctcctacttccccaagtttcatgtgaaacagacataaaatggctgagttccaggcagggccactgagaagttcctccaccagccatctctaaaacctgtctggttaaaaagttcccaatgggctaagtcacttcagccgtgtctttgcgaccccatggactgtagcccaccaagctcctctgtccatgggattctccaggcaagaatactggaggggttgccatgccctcctccaggggatcctccccatccagggatcgaacctgtgactcttaggtctcctgcactggcaagcaagttctttgccactagagccacctgggaagtccaaaagttccctgaatatacacaatgtgttattggctggataaatggaaacataaaggaggcacaaaaaaatgacaactgatgacctctgaaaaaagaagcaagtctactgctcctgaatgtcaaaatgaatggaaattgtgaggtgagaaaaaagggcaggcagcactttcccatagtttgctctgagccaggctgtcaggaaaccgcccagcgtcagccctcttgccctggaagaacgggagggttcacagccgtggttctcccaggccctgcaccaagggggatctgaagttccaaggagtagagagtttgggttgctttgggccatgcccaaaaaaacctagtggaaaaatcaacatgcctccaggaagactgacaaaatgatggaaaatcccagattgttacagggggaaaagtggggggaggggataaaatgttgattacataacatccagccctttgaacaatggagtaatcatcaaatgagtcactaagaaagacattagtgcctcccccagtccctactctcctcaccccagaacagctatgggacaggccaggaagtctcccctcaagagtggaagtcagtttgattcagagaaaaggactctttatttaaccaagagtatggcttctgaccaaaacacaggagtcaatcaacaaagactggatgaattcagtgtcttccgaatatgaatcgagtctccttgccttcgcccccatccaacacgaattcatgaacttgaactgtgtgggttctgttgtgtgtgtctgttcatgccactcaatttataactcgatgaaaaggattctacggatggcagaaactggccaggacagcacatgtggaagatgagagccaagccaaatggatgggcagtgatgattctgtgaactgcaactgaaggatgagactggtgagaaggccccaagcaacttctaaacaggaaacctgggcagtcagatgccagtatgatgtgcacgcctctaggctgacaacaccccacacaggtttctgcttcctgtctgggagctggcacttctggattctggcttaattctctccaagggaagcagctggacttacttgtgcctgcccacctcaatgccatcttcaaaagcctgatctacatgccatcagctgcagctgcatggcactcaagggctgcgcccctgggtggggattcaaagtgctagatctcttgaaaaggtgctcacagcccaggtggggaaagtcaaccccacacattcgggacatctgcacttgatgagcttggaggaaggtgcatcactgtccatgggcccaaaggactcaagacaggaatgtcagaacttcttagaagtgtagaatttggggttaagaaaaaaatctaaactcctctgtaagggaatggacaatcaggcaggattgcacttttcagtagcacaggggttccatttaaatgatgatgaataatcacattcaaaagtggatattaatataaaatattaaactcttatcatgtagaatatgaatgcaaaaaagtcctctatgttgctcatttatgtctgtgccagttctgtcaatgataatcatcaacaataaagaaatcattacaggtggagaaggtgacatggtttagcccaagcaggcacctttgttatgcttaccatactttgtctcattacctattacaatacatttgcattaggcaccaaaaatatttctaatgtttgcaatagcacccagaaagtagtcgaggctccacagaagttaactaaatgcattttatggacaagtactaaaattgcctctgtgctgataattgtaattgtggtggttattgtttagtcactcactaagttgtgtttgactgtttgcgacctcatggcctttaggccgccaggctcctctgtccgtgggatttcccaggcaagaatactggaccgggctgacatttccttctccgggggatcttcctaacccaaggatcaaactcctgtcccttgaattggcaggcggactctttaccattaagtcaccagggaagcccaataactgcaatgtgtgttagttgcttagttgtgtccaactctttgcaaccccatgggctacagcctgccaggcttttctgtccatggaattctccaagcaagaatactggagtgggtcgccatctccttctccaatggcaaaatcttaaattgcagtaacacatttgtctcaaaatgttcaatgcttgacctggaaatatatatagtaagatgatatagtggaaactctaaatactcttatgaaacaaccatattacaagtatattagatttctgctgtttttcagtcactaagttgtgtccgactctgcaagtccatgcactgcaggccaggcttccctgtcctacataatctcctggaatttgctcaaattcatgtacattgaggcgatgatgccatccaaccatctgtcatctccttctcctcctgtccttgatctttctcagcatcaaggtcttttccaatgagcccgctcttcacattaggtggccaaaatattggagcttcagcttctgttcttccaatgactattcaggactgatttcctttaggattgactagtttgatctccctgctgtccaagggactttcaagagtcttcttcagcaccacagtttgaaagcatcagttcttcagtgttcagccttctttctgacccagggaatattcactaggaccccaaatctgagttaatgtttataagaatcacccatgtttctgagagtagagttgtacagaagacggagagtaaataactgtcccaaactctgtccaatcaagactgcagagtattggaatagaaatgaacagacagctttcagtgaatcaggagggacacaaggagctgtggcctttttcaacacagagaaacatctgcttgtcgttcactgtgaccttgtcctaaacaaaagcttacacatctcaaggatgttttaagtcaaacaaggatttcatcactcatatggaactcaaagttaaggcctgctcaatgtcaagaactcaactcacttgactcttcatatcattctttaaagttgtttgaaactgaatggctcctatcaacagtggtacccagaatctaagcttgaagtggtgttgattccaaaagttcaagacaaatggccttgctgacctgagagggtcctcctctcccccacctcacataaatggcaagaagatgggaacagctgggacccgagggttaggtgatgattagaaatccaaggtgcatgttccattcgtatgcagccactggactggccagagcaaggtggattaccatgactacaccacccatgggaggtgggtactgtccccatcaatagcggcaggagagaaacactgagaatgaatgatacgccttacatctgaaaattactacagtccaccaagaccttttcctcagactattccccaatatcctcgccacatgaagtggtgtggggtgggggtagggtgggaaggagcagggctagggaagtttattacaggacctccacttcacagatgaggaaaccaggactgcaagagatcaagaacttggcttaaactctcatctttcgactcacatctacagtcttttcattctgttctgctgctgttggaaattggaatgagtgtggggtcagtagttgtggctcatgggctttagttgctccagaaatccaagagaaaattttctgcagctaagacaaagaaaatgggacttttactcctcaatttgaaaatctgatacattgaggcagtggttagaaactgcttttaccaccaaggagccaggttcaatccttgatcagggactaacagcctgcaagctgaggcacaagcaaggaaaaaaaaaaaaaaactctgaggaggggagtaaactaggagactgggattgacatatacatactactatatataaagcagcttactaataaggacctgctatatagcacagggaactctactaccaatactgtgtaatgacctatatggggaaagaatctaaagaagagtggatgtaactatatgtataactgattcattttgctgtatagcagaaatcaacacaacagtgtaagtcaactatacactaataaaagctcaaaaaaattaaataaaaccattcccagatcaaagaaatccaagatttcgtatggctcaccctataaagacataattaaaagctatttacagaactgtctgtaatcctgtcctttcttggaactaagggttgtgaggcttccttcctttcatacaaagtgacacatgatagatgacaacccggcctccttccctgtctgcactcacccctaagtcaccctgatgtgcaactgtgcacgtaatataagattaattcgttacacaaagtctggttgaaagaggtttcttaaagtgaaaggaccaagaagaaacctcattcaaccagagaagaaaaaaggacaattgtcacaaatggaaaaagaagatccttaagatggagaacagacacagtaggacgtgcaccgggcttgcctgggcttgttggtcaaaatctatgggttctcagttttgccactggtataatcaactgggtaaagtcactcaactgatgcactgctcagaagaggtctgtgggtagggagtgtctacccctcatagcgtttaatttttttttttaatttttatttatttttggctgtgctgggtcttcattgctgcacagacttttctctagctgtgacaagcaggggctgcttgccaggcgcggggcacaggcttctcattgcggcggcttctcttgttgtgaagcatgggctctagggcgcgtgggctcagaagtcgtggctcacggctttcgttgctccaaggcatgtgggatcttcccagaccagggatagaacccacgtctcctgccgtcgtggcaggcgaattctttatcaatgagccattagggaagcccctatggtttatttttaaacgtagaccaaggcagagagaacagtgtaataaatccctatttaaagtccatcaacactaccagtttttacttcatctcccctacacacacacacaggagaactgtaaggctaatcctaggcaacatgccatttcacccacaaatattttattgtcacaaggatatttccgagataaaggaggatcatactatgaaagcttacaagaaacagataagctcacggaaaaagaaaaggcggcttcagattacttgccacagtgcttaaatccaggtctacatttgatcattggcccactagaaccacagggcttcttttaaaaagcaacccaaccatgatctggagagtgatgaggctggatcagagagggatggctgcaaagctcagtgggcagccatcaccctttccacccccgtgtcctccaagcagaagactgcagagataatccttcctgactgctaatgtcctcacaaacatactaggagtgactaggagtgggcagaaaaggctgaggattctggccagcacccaaagggcagatgtcagactgcctggaacaacagaggaggcgcctttagtccttcaggtcaacagagacagcaaaataggattgctagtgactatctctggagttacttgtccctggaaaatccttactggcccgtgagaaaacttaccctatcaatatgctaatatctcagaagacttgaacaaggtatcttgctcaaattctctctcattgatggaaggatgggttggagctaggaaggaagggtcccctttgtcctacactcctaattgttacaggcactagaaacttggcaagccaggacttcctgctgagggagtcggtagaatccacaaagctgctggctgaggttaatgcaaaggagggaaccatgtcccgcctctgtccctcggccccattttcacaagcctaatgaagtgacaaagcaatgagagacaggcaggattcctggctccagcaaaaagaagagccccgtgtgtcccggggatgggccgacgatcccaaccaggcagtccatcactgtcccaaacaatgggacaccctgtccccaaaacagtttccttatcagttagaaaaaaaacaactggtcttttactaacgcccttgaagtcaccaactagtttgtggttgtttttttttaaaggaaggaaggagaaagcagctgcacagaaaattcccaattcatcctccaatgacctgactgaacaaaactgtcctgctgcctcggggaatactgacactgctagggtgcagtgcgccaatcccaaaggtcgatgccttttctcggagagatgctatcctaggacaaaagcgctggtcctctgagaggcgaagcagcgtgcagactgcaccggggaagcccagcctgggaaccaaggctgcagagacagccaagcatcagaacatctgtaggaagtgacttcagtccctcccttctcccctcacccaccccaaccctccccatccccaaaaggagttttaacacatgattaccgctgaagtcctgaggatctggtgactcaccagactcacacatggttccaatgagcccttgaccattacatggtaggagagcaggaaagacaaatgaaagcggttgtaattcggcagcgcggagctcagacctgccagacaaaagggactgcgggcgtgttccccaactcgttcaggcacctgacacacacaagctatttttaatcactggatttattccccccaccccacccccactccccttctccgtcctccacctcagcaaatgtttccatgtcgaagcaaaccccaaatcaatcccaggtgttcagggaaacccagagaggcacttccgctccaggagctgggccagaaagctgaaccatcccctgggtcccgcagctacgttttcttgttctttccttacttagcacagttcagatcacccaccccaaacactgggcacggggcctgaaaggagaaatacttgaatgagcgtgccctgctggaaaggctcctgattctgtgctttctcaagcagccctggagagagaaggggcctgggacaggcctccaggatcaatcactaagagctcaagggcatcctttactccttaggattctctacctgcctggcagcaaggagtaaattaaacgtgtgaaaattccaaagcctgttgttgtttagtcgctgagtcctctccagcactctgtgactccatgggctgtagcccaccaggcttttctgtccatggaattctccaagcaaatatatcggagtaggttgccatttccttctccaggggattgtctcaacccaggagtcacctgcgtctcctgcactggcagacggattctttaccactgagccattgggtgtgcaaagcccagtaagtgctcaataaattactggtgacttacactgaactgaaacgtgtcttgtaaaatagaaagacatatatacatatatatacacacatatatatggtaaaatagaaatggtcttgtaaaatagaaaaacacatatgtatatatacacatacagttcagatggtaaagaatctgcctgtagtgcgggagacctgagttcaatcgatgggttggaaagatcccctggagaagggcatggcaacccactccagtattcttgcctgaagaatccccatggacaatggaacctggcagctacagtctatggggttgcaaagagtcagacatgactgagcaactaagtacacacacacacaattttatttcccaaagcttagagagacagccaggagaaggagcatggagatttccccaagtacaaccaagcaactgagaacatgaatgcgaaaatcagattctgagatatacatggaaactgacaacccccgaatctttatctcaaaaaactccttacctattctgcatcctccaatctgctagggggaaatattttttgtagcaatcatcatctatgtattttgccatgacaacacctcacggctccaggagccagaagacctaaggcatcctctggttttaaaaacttcctaagaatgccagtttagagtcagtaaggcacaaaacaaaactaatcttgtgcacaaaacttttttccatgcttgtaatttgccagaacccaaactgcattttacgcgagtcatgcatgcgcccttaaatgaatagcatgctcacaatttaaaagaatgttttcattattgagattaagattcctgcatagaaggaaggctgcctaacccaggcctcctgcattgcagccagattctttaccatctgagccaccagggaaccctactttaaagaatacatttcctaaacaatcattcaaagccatttacagagcagatcgcaggtttcaaatcatttcctatatagacagttacacttgactccacaccaggcattttataagtcctaaacgtctcagaatagagtcactccttttgtcatggaaaacacaagaggcgaggtctccatattactcaggagggaagccctcattgggccctttgagctccaaagtttgcagacagtcaaactggtgcaacacagggttttcctggtggttcagaggataaagaatctgcccgcaaagcaggagacctgggtttcatccctgggtcaaaaagatgccttggagaagggaaccataacaacaagtattcttgcctgaagaattccacggacagaggaggctggcaggctacagtccatggggtcacagtcagacatgaccgagtgactaacactttcgctgcactttcacacagtgcgtgcaccccactagttcttacctatcttagacttttgggccagtgtaaactcctgccctgccttcaactaaataaaatactcatgacaaggtcagaaggctttggcaacaatgtggcaaaggttaaccccactcaagaagactatggaaaatatttgagatcctacatctcgctattgtcccagcttccgctctttcagtttacgcacgactctttgatgctccactctgtgaggcccttgagatgctggctcatcaggctgcccaatttgtttccacatcacctgattcccacctatcattttcggtgctgctatctgagaagaggtttacattttggaaaatgtattcttccctatgctactatgagcctgaaaacaatcaagtgtccagtattctctgcactacataggtcagggggtggaggctcacaaagggtccttaagtgactgaaccagggtgaccaggccagttgagtgacttcaccagcactcagactccatgttcagacacaaaagctgggtactttccacctattaataaaagttaagagcagaggaggcagacatgatggacacaagaacatctcctttcattttctccatcattctcattacagaggaagttctttctggaagtgtctcaattcctgggccactcggccgacagcagctgcaacagagcttgagtctccaagacccatcccacccagaaccccaagtcagaggctcaagacttgcctatacatggtctgggggaaagatgggcacggaggggctgtctgagcatcatcggaagactgggctggtcaaggtggaagacgggcagttttctccgtgggcaaaggaaaaatctggacaaacaatggagtggggcccttttatttaggctggaagaggtagagtttttctgcacttttgaactgttttctcaaggccggcctctccctcccacgcaggaaacaaacacagagacaggcttattccagtgagggctccagtcactgagagctaccggggcaaagcagaaggaagaggggctggggagcaaggcaggaggagtcgggggcagggggcagacagtgaggagctgggagaggagaggagagacagagggggccatgaagacggggaaggatggatggcggagaagggagcagagggcaacaaagggaaaagcaggaaaagccaatactgaaacattttaaaccagaataaagggacagatggctgagtggaactgggctgggaagagtccgagacttactcccaattaatgatgttcaaaaagcagcatttttccataaatttcgaaaggaaattctctcttgtcttttttatttatttatacattatataaatacattttcaaaccaaaaaaaaagggggggctgtttttttccaatgggaaaaaaaaaaaccttgttggagatgaaagccagtcttcaaaaacccctcggaggaagctaaaaccccacatgtctcggtgctgcagaaagaaaaacaaagtggacattcttcctgtgttctaaggcttttttatgcagatgtgtttttcttttaataaataaatctggacagagaagggaaaagcatactcctagacattcacacagtgcaactgtctgttttcaacccagcgaaaccacaatgaaaaaataagaatatttaagcccattttcccagtgcagagacaaatggtctcaaaatgccaaccattctcaaaatgccaaccacaggcactgaggcaataagctctgtgtgcacccccaagcttcccaaccagaaaggcttatctgcaatgagtaatgacaagcagagaaaggcaggacctggggcagggtggccatactccctagaaaggcccagagcggttctcacttacaacattcagccactccacactttttgagccattgcatttcactttaagactgcaataattattttaaaacacatgtacacactgagtttaaaatctgccttatgtccacccattggcctgagcactgttggttgaaatgacacagtagaattttcatcttttttcatttatcagcttttcagtacttttactcacccctgtgtcatcagttccacccaggtattaaaattccttggctccttcatccactggtgatgtcctggtctggccatgcccccaccggaagccttcctgtatgcccaaatccctttagagcattgcaaacattctcggggggaaccagacttctcaggagacaaatgagaacgtggagaggaccagcctactcctgcaattctgttggtgcagaccaacctcaatcattctaaaggccattctgcaaaaaccgctcaaagtaccctgcgagacttcctccacaggttccgaggttgagcccgttctgcacctgttgcatgggtgtatgttaagtcgcttcagctgtgtccgactctttgtgaccccatttccttctccaggggaatcttcccgacccatgggtcgaacccacatctctaacccacatatctttagtctcctgcactagcaggtagattctttatcactagcatcgcctgagaagcccctgcatctgttgactaaattttattaacctcaggcaaagattacgtttatccgtactaaacttcaccttgttcaaatccacatttccatacatagagctgttttttagaccatgaatctgtcctcatcctattcgagttggcccatttgaagtttattaagtagactttctgcatctttctctcatctgagcccccaatataaatgttgaaaagtcaacaaccaagttctgtgacccatggcataacaccagagataacgccagtttgatactgacgcactgatcaaacaccctttgggtctagctgctcaaccaattatacatcctcttgcctgtactgtcattggatccacaggtactcaatctggccacaaatatataacagaaagagctggacaaaatcttcagtggactctgtttatccacccattggggagctccagacaagttcaaaggcagctgaggaaatgcagaagctgggactcaagacacctgcacaatgaaagaaagatggaaaatgggaggaagggggtgcggggggagacaggagggggagggaaaggaggagagagagagagtagagcctaagactccagtgctccagccactctgcttccagaaacaatgggcacttagagaacaatggctgcagacaaagtcttggtctatttttatctgccactgtgagtcccagacaggaggaactggatttctgccctgtgcgcgcagctccaactggatctgggctgggaggaagatgaggtcactgagaacactgcctgcttagaaataggctccgttgttttggttttttttttttcctgctcgcagagtagttccttcttagcctaaaggctctctttagccaagtgaagaagtgtgcgtgcccactgctaaaaacacagccatgtggagaaggggtgggtccagactgcaactgccgctcagtccagcccagagcaaggaagggaagtggggaggatgccctgggaagcctgaccactggacagtcagctctatcgttcctaagatgacagccccgacaggcctgctcaccacacctagctggagtcctcctaagagagactctccagagcaaagctccctcctcgattctctggagcataaagaagttgagggctgatcttcatggatatgtgtacctcatgtctcaacaaaggcctcagactgccctttgcttcatcctctttgaacagtttctctcttttctggaaatgccatcttcagctctgacagagctttggagtgacaattttaatccttcccatctgtgttacttatagtcttaatccttcaagagggtttctaacaaggaccagcaatggtggtataagcctgtgacagacaccagactgaagaaaaccagccgagtctgggccagggagacccaggagtgagtcccaggagtgagtctggtcggcagccctcctgtaacccacagaattggtaactgctcccttggatccagtccagccctacagccttctgaatcctatatgcaaagatggaacatcccaaaggcaagaattcatcttgccacggattcatctagatgcgcgcccccgcaaccagggaaaaacctcccctactcatgcctccaagttcttgccaccaaccttcttgctcctgaaaaaccaccaggtagaaaggaagctgaagatcgttttcctttcatttaaatagctcagggtgtttttcattgagaatatcccaagtaatgtcaccgcggggcttccttggtggctcagaggtaaagaacccacctcccaatgaaggagacacaggttcattccctgggtcaagaagatcccctggagaagcgagtggcaacccactccagtattcttgcctgggaaaccccggggacagagcaccctagctccatgggctacagtccatggggtcgcaatagagttgaatatgacttagtgactaaacgacaacaaggtcaccgtagggagagggagctggaggtaggcacttaaatgtcttatcatttaaaagcttaagcacagagcaggcaagtagtgcccagggctagggccagtgagctcagggctggggctactataaccacagaatggttagaagtcatgtactgggttccttccctggcccacactctctctgttgacttcagaagtaccaggcacattattgcattcagcatagtaaacatctgtgataaactgagtattagttctaatcttccttttgactttgggagcccaaaataaaggaagtgatactttttttttttttaagtccaggggtccagacgttcatgtcagaccatctgtagagtggtctcatgaacttgaaataccagcaccacctataaggccatgacatgcaaacatttctgtcctaagcagatggtggagactgaaaccgaggtgaaacatctgaacccctaatgctggggtcactgaacctggttcagaactcattcaaacagtgtttccttgactcctccccgactccagctcccaacaggccaagttatcatccccttctccaaagtgtgaaagtcgctcaattgtgtctgactctttgtgaccccacggactatccagtccatggaattcttcaggccagaatactggagtaggtagcctttcccttctccagagatcgtcccaacactgggatcaaaccccaggtctcctgaactgcaggcggattctttaccagctgaaccacaagggaaactccttctcctccaagggccctgctgaatcatcccagtgtcattcaagagaaccacgtgggagccacgtggcaggaacaggaagaaagcagaggaccgcctgttcccaccccgaagagactgatatcagagaagaggcagaacttcccacccatagtgtatctggcaagcgtgtgagacagcccttctctggatctatcacagtcttccaagacgcctgctaaagccaccaaaacgcacaccagctaaatgcaccccaaacccatgtgaaagcccagcgtggagcatctggaattcacagcatcaggctttatgatgttcagccactcatgaaataatggccccggtcagctcaggaaatccaaatgtctgtccctaatgaggaatcagaaatcgtgttgctttaaggggtttagggactaatctcagcgtcccggctcaggtttcctgagctgctaagaagctacttaggaccctgagagagagctttaaggaatctgggtcctctccctaaaccactaggttccctgttaaacccagcatctcaggctgctcccaggtctgtttattcctgatctagaatttcggccctgagatctattctgctttggccttctccacagccctgggcaggaacgggcaccccgtgcaccctactggcggcttcacacttttcctcacctctgtttcctctctgttgccctccctgtggttatctgatgctcacagctcatccaggaacaaaaagggacaagaggaattcacagaattcgctataaagctttaacaagcccttggagggatgttcccccttccagggaactgaacgtaattataagatgaatgaaaggaagctgttggagacatcaggggcgggtgagcacaggcccacaagacccagttcccagaacacactgggttagagggggcttcagacatcacccggggaaaacaaagctcaggaaggtgacatggtcacgtggttactaactctagacctcctggcttcctggccagcattttccatcctctgctctgttccctttgcacagtggattgggagggagacagcctctctcctctttgctgctaacaagccctggtcatcattctcaacaaactctcctcctccccaggtttacactgaccacagaggaacaagccacccaaaggtctaacagatctgacttgggatataaccggcccctgatgggatcagcgcctcctccgtgttatgttttcagccacaatggtcagactcccctggaaaagatctcccttccagcagggatctcagctgaatgcccgggatcacaaagcaggaatctccaacacccaacttcagctacaccaaacctccacgcacaacggttctaaaatctgcagtcctattcctatcgatccagaaagagtgaaggtggcagttaacttcagtgatccagcgacctccttctaaaaagcactgaataaagagatcaccactgggtccattccagtcccgatggtacaggaaggaaggcatggtgacagcgttgagacgctacaaccaatccccactgaaaaggcaaagcataaaatcagggacattaagcctgaacgttgaacctgatgcatttaattaatgaggccataggtctaactcaaaaaggccaggacccggagcgatacaagcaggtctctttctaacggaaaatgcactcagtgcggagagctaagggttgtgctgtggtctcttgtaacctctacatttttttttttttctctcctttgagaatgaggccccaaacacccagccctgggcgttctgacagcccctcagtggccctggaggtccatgtcggcccggagcagaaaacctctgaggcctctcgcaggggcaaacccaagaggttgaaaagtcgccaggcggacctccatctccagatcgatgggcccaataggccaatgggtggagagcagaggagccgggatcaatgcgaaggggagggagcagaagctgctctccatccgaggcctcaggtgggacagagagagatggaagtgggacgaaggatgcccagccttcatccgctcctggtaagtggctcggccgcatcaggaagccattaggaaactgcagccaccacagccccaagtcggacaacggaagcagccctgctgctagtgaaagggctcactatctgcccagacaccagctccctgcctggcagagccacagccggcaagcccctagctctcctgagcgtgtggctgtgtgctcgctcgcaggatcagggaaaaacagcaggggctctcaacaggagacacggggccacatccccacgggccctgctggccagcatggccagcacacctttattccaagagtcactgacagctgatgggcatggggcttccatcagggtgatggaaacgtcccagagtgatcagcgatggctgcacaactctgtgaatggaataaaaccccctgaactgtacacttgcacatggggaatttcatattatgcgaattattaaaaaacagtatgtctcaatttaaaaaacagtatattttttttcaaagagctaacaatccgcctgccatgagccaagcggtggggatacctcgataatggggagacggggaccctcccccaggagcttccctgcagtgggaatacctcgaaaatggggagacaggcaccctgccccgggagcttccctctagtgggataaacaaccccacagaaggacacagacagcagctccacatttactgctcaggacgaactgtggggatggcagagggagagtagggggcgacgaaggagagggggccaacgtgtcaagggcaactccaaagccgggtgggtggcattcatgagagggatgagacatggatgtgacctcaggcccaggaaagcctcaggagacggcagatgggcccactcacggaagacaggggagacactcaggaggcggacacctggggtctacaactcctgggagcatttacatgaggaccaagagagaggccacagcctccaggagacaagcagagatatccccaagttctcctcaccccaagctatctccagaggaggctgcctgagtgctcactgaaggtgacaggagcatttgtacatttaaggctttcaggagaagtcgtctccatcagactggctctttctggaggtttctctcccaatcccaagaaggtaggggggtgagaaaaggaaggacagatagaaaaggcttcaggcaaacaaacacgggaccaggctcccaaaccaagagagatgcagtcacagcacttgtgaccaaaagggaccttttggaaaattcttttccaggagggatcttgagtttgggcccctggaatgccccagagcaattctgattggttccctggaccctgactcagactgcgcacgggctccgctccaccctcggctccaccctcggatgagtaaataaactgacccagggactgactggagggagggggccaggaggggagggagggggcagaagcagcatgggaaccaggagaacgcaagagccgactctggtgcaggggacagacagatgagaagtccagtctgctccagagactggtggggtggcggaattcaagaaataatgctctgagccttacacaccactccagttggatccagccctgccctggcagcctgctctttgctgctttataatatactgaattagtcactggcttagcaagcacatttaaacacactgcagcccagctgtttaaagacacaggatccctcttccagctgccagattctgcctgtaaatcaaccatgacaattggcaatgggcagactccagaggtgcagggtactgaaggcatcttcaggggcaaagcgctttagtggaaaagactgctagtgctggcggaggggtgaggtctgctgggcatttgctgggggacagtggggacatgggtatggagaagaaagcacagccagtgggctttttctgatctgatgtttattagctttaggaggctgccaagtggattcactgacctggcccttcccagcagcaggctcacccctggagggcagcctggaggaggcagttctactctgggccgcctacactgacaggtttgtagaggtttcctcctaaacctcacatacttactcactcccaggaaagaggaggatatcctgataacgacaattaaaataattcaatatcctgataacaacaattccaagaaccagccctgcggacctggccagggcctgaacatgctgctttagagctggacccgtgggacctgaggcctggctcgagtttggttaagtgtgcgtgagagaaagaaaacactaccagcagccacagggactgctctggcccccctcggttatgggggtgtcgagtggaaaattttctgtaaccaggttcacagtaaccacagtcctaacaaccaccaaagcagcaacagcactgtcagcaaagaacatctgaacggacagggcagcctgagagacagaggataacaacaccattcacgagaccctctgtcagcggacaggtgtcctacaggaattctctcaaacccttacaagagccctgaaagctccttaggatgacctcctttgtaaggtttataaaaggaaggctccaggaagttaaatactttccctaagggcacaatagccagcagaaaattcaagcacagggctgtctcacctccaaactctgctctttccagggcagggcagtggctgcagggagaaaccacatcacaaccaacgtcatgtgtgagaggccgtgcgattcacggatgaagaagactctctgtggagccacccaacaataggtccctcctctgcaacgatcaggtctcctctaccaaatgggaacagaatgcatctgtatcttaagatgatgctaagaaaccttcggcctaaacagaccatctggtgaatataagaaccgaacacatgactaaaagggtggactacctgtagactccgttacaacaggaatttgaagaagattctcaaatagagtcgtggggttgtttgtgtgggaggggtctcctgtgtatcgtgcactatcttttggaaattcaaacactaattccttgaaactggtttgcccataaaaacactgatagtcttttcttacaaagcaggtggctggggacccgggacactggactcacccgtggtctccccttgctgtctacagtcaatgcctatgagcaatgcaggcttgacccaaccctgtgaagccagaaacaagttgccaggaccccatctcatctaaaacatgaaactgctgttttgttcatccagcgctgcaaaccctttagagacactgcagccagcccggacgtttcacatttctcctatcagtccatccatcacaagtgagggcatggaaaagccacaaggcttccctaagagaggccttcagaaatccagaaataaagagatactttattttaaaaaaaatctccaactgaatcagaggtgaacgctaggtccatcatgtagacactgattcattccgtgcatgtgtttatttttctacaaacattcctgttgcatcaagtgcactcaagatttagacgtgtgcctctgaatatccgctgccttgaggattctcaagcacagggtgggggcgaggggggggctatctttattccttggtttcccaatctggaaaatggaggccgatgccccatctctccttatacaggttcagtaaatttaggtacccacgtttcatttgtccacttttgaaaatgcacgtggaagtgatgggcatatgtctttggcttcctctctatttcacagcccagtggtctatatttatagatagattggatgttttcttccttagcctgagcttaatgaggagcccaaaagagcacacggctgagaaggatgcgtcaagaatcaaagcctctgatgagaatgttaggaatttttctctccaaacagattctaagttggcagaactttgtaattaggaagatctaagtttaaatgtatgacttgaaagttctatgggcttggggaaattatgacagcctttatggagctccatttcttaccttcataaaggaggttaaaccaccaatcttggtacaaactcttatgtataaaacaagggacgaggagatactgtacacagagcatatagcccaccttttataattatcaatgacttttgaccttgaaaaattacgaatcactatgctgtgcacccataacttatataatattgtacatcaaccatacttcaataaaaacaattttaaagaaaaaaaacttttaaataaaaataagatactaacttcctagggttatttaaagaatgtagctatttgcgcaaacattttgcaagtgcctgacacatagtaggtactgcaaaacttttagtttcacttctctcatgtccccaaactgaggcgcagatacatacagagaccaaaaacaagcatctggcagcacgtttggttcccattaagaggccaaggcaggcgtaagactgacctcgtgatctaatgtgaaatcaaggatgcacttcctgtacacacacacgattcaccctcagagagttcctaggtattcagcatggccacgctgtatcaactcttctagtgatttaataatgttccttgcatcacccatgcctccagagtctgtaaatgtgagctcattaatgctcccagtctctccaagcaaaggcagctcgctccccaggaatgccctgcttccagggaatgcggagctgatagctaacacagacaggaggctcaacccggcagctcagtgtcctgactctcatgccaggcagtaaaaggtaaaaggggatgagccactatctgggtacacctgtcaggttgtcagcacagaaaatgctcaaccagggaaagggatgactgaggattccgtaggtctaaccaaaatgactcagaagtggaggcctgcaccccatttggaagaggtgacacccttggcagtcacacgaacatttgctttgcaagactaaatcttcctgacaagactgaagttagcacccaagttcaaaaatgccaaataaccctattgtttcctacaatcaggtataccaggctctacacccattgcccgctcctcttccctgagaatccaaaccctgcctcaaaccctggccaggacactgctggccatttaggattaaactcactcccaaggaaacagcaacatgccaaggggctattttccccgtgaagtatctggtcttggaatgctctggtttccagaatgaccaaaacagggagggggagatcacttatttttcttgctaaggaacaacactttgttttaaggtgacaatctaatataacttcagtcaactccaagtgtatatatacctagtgccagagcaaatgaccctgtcccaagtggaaactaacggggaagaaaatcgaaaatgtaaatcttgtacgtctctttggcacagttctttgcctctcctactgtgtgttgtgggaaagtgttattttttattttttatcttgaagtgttcctctggctacctgaaattcatgctcgtcattaaaatggacctcatttgctaaaaagggtaaactgaggctcagaagaccaaagcaattgtgcatatatttcaacctagcgaaacagaagttggacaagaattctttcccaaactccttagactaaaaaaaaataaagtgtatttctcaaagtccaaggttcagcctacccctagaggagaattgcatatttgtctagaagtctgtgaggtaactcatctttttttttttttaacttcttgagaaagaactaactaacctaccatcctacttagtttgtccagtgtttgcatcatggaaagctgagcaaattttccagatcccatgacagtaacctgtgccacctgctcagagctcagtaattagccgactatggacaggcgatccactaagcatatagaaaatacacagtgaaatttctctagcaaaagagcagagaatgttctcttaacgtctctacctccagctaatctttagcagccgtagcagtaatgtgaatgttattatatcatgttctcatcaattcaagaaaagatttaaaatgcgtgtggccaaatggaaatgtcaaggggtttggagaaccccagcttctggttctgtgtcccttactcaccaagtcaccttgggaaagaaacttgccatcacaaatgggcatcagtttccccacttgcaacacaatggtaactccagggatgacctgaacctcaaagaggcggaagtcatgtgtcaaactgcaaaatgctatgggatcaggaccaaggaagaagtgaaatagtaaacgatatgcacaaacagaccttagtatctccccaaagtaaacaaacacccaaatatttttgagaagggtgacctctggcatgaactccagctgggcttaaatctaaactccacgcacccactgtgtggctgtgggcacattgtttagcctcacagatgcttcatctaggagacaggaataatactcagctattagagatgccataaaagaatgagattcttggcacattagtaagctggcctccaacaactaacagaaaagaaaaaaagaaatagataaaaacgagatacgagatgcgagatgcctacacaagtacacatggatcaactctgccctcttatcagtttttcccccaaacttgcacgctgatctaaggtccctgctcctgcaagaaaagggcacctggatcaggcccaaaatgcagcaatcacatcaagaacttgattttcagataacagctatacacaggcgccgttcctccactgccattgaaaggccagcagcctacgctcaccacaccccagcacatactcgcagcttcctggacctggggaaaccagagcagctgggatccccaggcagccagccctgtaggaaggccagaccccgatccctgagcgcccagcagccagggaccgggcccctccctgggtacaaacaggagactggggcctcaccagagtggctttgaacagaacgcgttcctgctgcaggaggcgactgtttacgcccagagcagtgctctgagaagggcagctgagataaagcagctctggctcagttcacagtctcagttagccctggggatgcagctgggaccatggacctgctgaggacccaccttcctccagagcagaccccacccccaccccacacccgccagactggagctgcttcccgctgcagtggtagcaaaggttgatggaaataggaagctgtttcatgaatggggaccaagagggaggcgtcatgcctggtccagcatcaccccagacgtgcgtttctccaactgtaagcaaggcctgggacaacccccaatgcctctctcggtgaacggtaatctttgcagatgtactcaaactcatctcaaggatggaactgtgattaacagaatctggggatccagagaaaaatatccctgtttttgctcacctcttgactgacatttcatgctctctcacagcctgagttatttcaaatactatttagagtcataaactatctgggttaagagaaaccttacaggtcgtcttctccattgagttttatttcaccaatgaagagtctgaggtccagagaaaggaaattacttgctcaaggccatatagataaatggttgcaaaaccatggctagaatccaggcttcctggctctccaggcagtgatgggtcccccagagtggacatgtgacttagttagaacacaaaatgtaatcctaggaggctgagaggtctccctttatcattcataaatcctcattgcattccaggcatttaattagcattgtaatgaaataatataaccaatgcataatgtatatatatataataaaaaaaaccctaggcagggaacctcaaatagatagcaaaaagaaaaattaatactaaaagtatagaagtcaacacatggaaactttcccacagaaaattccctgtagtggattttctgaaaggtacttgaacatcagactcaatcatacactctcatggataatcatagtgattatccgagtacaaaactgtaattgcacaaaaatatctttaactgagtgcatgtataataccagcacacagtaggagtttctaaatacacacttcaaaaaccatgtatctacaaacactcaccagggttaggaacccttggcctgacctagattcttattttccatttgaaccttgaaaatatgtacctgattgattctgtcatcttcgctgaggtttaacgcttattctgataaactgatatagaggttttaacaactaacagtatgagtgggaagtaatgcgaccaaataaaaaaaaaagacaacagctctctcataagcctttttaataacactgctcttttcttacaatctccctattttcaaaggcaaaactcattctgagatgcaaaaggttctggtgcgggtcctgacgtgacacttctgtctctcttctctttctacaatcaaggtattcttcatatttatgtaagcctttcttttactccaaactttcagcattctccccacgctactctatttaaaataatcctctccatgtttttagcacctctttcaaatgcttttgaaatacccatgttctccctgaagctgacccaggaaattactctagcctagaagtgttgcccaacagacagaaaatataaacaatcactgacccccacgtacttctacaagttcaagtaatggtcctcttgcactattggccatgaaagcacctggagcacagggtctattccatctgggttgccctgacttgtgcaggatataaagtattcagaaaagacgacacagacagagtggaaacagcagatccaagactacccacccagccacttggactggaattcctacccaagcgccatatttggtccatatgggagttttcccaaaaagtctataaaatttcacttaaattctttaatttttttatgttatttcctttcattctttcattactcctttcataatttcttactcttttctccctcacctctcttctcttctttttttagagaaaagagatactatggttaaatgcaccaattcctttcctcccatcctaaaaaatgaagggcttacatttttaccctttgtttttacccctgttaatggcacaaaaaacacacttttttttttttttgccccttttgatcccaatgtaaaacttctcatctcggataaacattacacaaaaaaatgtcatcgtcttcacatgtgtaaatgaaataaatagggggaaatattggcatttccccctactcagaagttcattttcacacacacacaccctacatgcttaaagcttacagttcctctgcagaaccttgcaaagcagaaatcaacagctcagcagagctccccaaagctaccaagaggtttcaaatgcttagatcgaacgcgtttgaggttgatttttagttgtttcccagcctctgagaaatattctgtgtcaaaaacacatttaaaaatataactcacagttgggggaaaccacacagaacttaatttcttcaaactctgactcttgtccttttaacttactctggatggcctaaaaccctaaaattagcaactcagagcagatatcataaaaatactattgtccaaaatcagtgtctatgtggtgtgcacctggtttccggggagagtcctacactacgtttacctctcattctggtataatccctgaacaacccttatactctgaaaagtgtcccagtttggatggtaaattttaagcacacaccgtcaagatctgaagtccaacagcctacaactttccgatgctgcactgggtcttaaagcaccattcgggccagtgtcttacagttctcagagccagaatgaatcgctacagaaaaaggacaatggggaccagctgatgggcagtaagaagccacctttccagtgcccagtgacaagcctggtcccaagcagcagaaactggaaagaacatgggcaatataaagaacctggccaaataatcaataaacacttatggctcaaacagcaatattttgagtatttctgtaagcatggctccctgccaatgaaattggatctgctgtaacctaccctacaggccaatttctttctgtatctgcatggagactataaactacacaattaaaaagaaaacagtaacacagataggcatagggcttcagagaagtggccaagtagaaataagctgtttctgcaacttgaaaaacgtatactaatgttctggaaaaagatctcttcaacccaactccagcaaaatggagttgtagatacatgacaaagaagcatgacagactgcgggactgtcttgacattccgaaccctgagttaagaacaacttaatagctgtaagtaaaaaaaaacgaagaatgctgagagttgttttaatcgctaagtcatgtccaactcttggcaaccccatggactgagaagagctccccaggctcttctgtccacgggattctccaggcaagaatactagaggggtttgccatttccttctctagggcatcttcccagatcagggattgaacctgcttctcccgcactgacagacggattctttaccgctgagccaccagggatgcccagaacgctgtgaatagcgtggtaaatcccatcagagatgccgtctgagcaaggggatcaatttttcattctagagcagccagataaacacatgaggacaaactgctctctgtggtaattgtgggagcccaggggtactgtatggagaaaatgctccccataaggcagtgactgaggaaccaagacctcacccatggacaagctgccagggcgtctgttggtttccctctgagctgtgggccgtgcagggtgagcaggtctcacatagcatcctgtggctcaactttcctccttgtaccagaatacacccaagattaaaggtaagaggggaagcgggggcagagaatgagatggttacatagcatcatcccctcgatggacatgggtttgagcaaactctgggagacagtggaggacagggaagcctggtgtgctgcaatccgtggggttgcaaagagtcagacacaacttagcaactgaacaacaaaaacagcatgccctgacccatgacatgggcttgaaaactctacactttaggcagaaaaaaaaagtaaaatgtatttgctgcacagacaacaaacgcaggtacctctggcctccttacaagaagaaaatttaaattatctctggaactaagaaaacaagctagttactgatctatgtctcttgtccctctgtttgtgagtgagatccacgcagagctgcgtccatgatgaaagaggtaaaacaggccgaatggggaagctctgggaaggatgcaaccttggaagtaaacacaatcccgtccctcacctgtgagaaaaagaactccgtctggaaagctctggaaaaaaaagaagcctggttctctgcttggtgatctcaggcaagcgttactggaatcttaacgcatcttcttaaagcaactcacctggactgctggccctggagggagttcacaggacagacaggcccttgccccctaactcagaggagccatgcagggtgaccgggaacccttgccccctgaactcccaaagcaccgaccccgccccccgcaagtgcggcctcttttaattccctggctttctgtgaataacatggtgttttacctaacatataaaatgttccgcaaggctcatcaatttgtaaatttctaaccttgagccttgaggaaattatgcatatcttggaatatcctcctccacatctaaacaagggatataataatacgtcccctaccccggagtcgggctgtcacatgggaaagaccctggttcaaaacgcagattcaatacatgtttcagaaataccccctacaacttggcagtggcaggaatctaccttcattgcaaactcagggaatgccaccacagccctgggtgattcattctgcaaaccagcaacgactgtaattactctgtcgctgtcgcagagttatctgtgctctttgcaatagggagcctggctttcctgaaatatcctgacctacgctaaccagctcttggttctgcacagaatttgatggagcccagagcaagctgagctctggtagggtagatctcaggctggtctgtctcctaggaagtgatccccctacagggtggtctggtctctttaagaaagaaaaaaagttacagagacaaaaaaaaaaacagcaacacaaaccaaccaaaaatgccaggaatgcaagctctgccaaccaaataaataaataagatgtgagatactttataataactggacatgatactcttctcaaccctgcataactgaaaatctctgcatttccatcagctctacaaatgtgccctgcctctgctcccaggcagcactgacaacctccatcacccacagtaactgagtctctgagcctgtaactgacaatcaagctccagagatgccctgagcctctgagcgtcccctggttcactgagtttgatgtcggggacacagaatagagtgtgagatctcagtgaggcaggtgaaaaggtcctctctaacttcactcttctttccctctcaagtaataggggaggtacgtaagacggctgtagcccctataaaacacttcattctaacccctccacccacccaattctacagtcaccaaggtcattttgtgctgttattacagattagcactgttttaagatatgcatacagtaacagatttatttccatcaaccctatgaggtagaacggtgatcatactcatctgacagctgcaggacctggaacacagagagatttgttcaaagtcacaaaactagtaagtggcacaactgagatacaaaactagccaggctggctccagagaccctgctcggaaaggagaagggtccggggggggggtctggaaacacggtgaaagagtgatcctaagagcacggcagctctgcgttttttgtctgcatagttgaagttacaaagactgaccgaaggtgctgggaaaagacgaagcttcttcctgtctcctaaggcaatacaggtcagagggatggacagccttttctaggattggaagggggctgatactttcaatcttgtaaaagaccaaacattcagaatcagaattcctgctcttctctgagcattactgctcacctcaccaagaaggtgaagtggggaaggagagaaaaaattaagcggctgggatgtatttgctttggcacccagcctccaccccttctcagcaaactccacaccaggtgggaacgccacagactctctgtggtcgtgtttgttttaactcatttaagctccgagaacccggcaatcatgtattacaatcaaagtgatatatgcaactttacacttacaagggaagttcaacggcaatgttatttccaagtatatgttcatttggccctaaaagctgtcacaactccaatgaggcctcaatccagaataaaagtgaataaaagttcttgatcagaccctagccactgagattggcaaataaccctgggctcctgctgggacacccacctccctcctgcctctctctccagctctcatacatttgggggggggggcgcgggggacgttgcagaggtgatagctggtctaattaatgaaaccagttcagttccccccaatagttgtctccacacgtaagaatctaaacaagccaaagaatcattctggcaaacatttaagtcacagctgtagacatgctatgagacattaaacttttaaaatgtcctgtatggtcttacaggcaaagcaaatctccactttgccagtgagtgtcttttcccaccaacaaaagccagcagccctggctagtgcttcctgcacccctgcacctgcaagttcaagtctcaactgaagtttctctgccaagctttacagaagcaacttgcagtattactcaaggcaactgtacactgagaaggcagaaacggagatatattgcacttgagctgctggctcaccagacattcttaggtaagtaacctaccttctctgtgcctctatttccctttctgagctatgcgtataacagtcacatatatgctactaaccctccagaaaagaaaacgaactcaaatttagatattatatttgctctgtactttcaagattctctatttagttttcccaagatagcaccagaaatcaaatctcattacaatgaatggctgaagacgtcccaatttctttgatcagctgaaattttgttgtactgaaggctgttgacaaaatcagatcagaggcatgtaaaccattttgcaaaggaaggacactgtaaattcggttattataatggtgatgactgcagcattaggcctcactgtccccatcttacagatgggaaagctaagaatagttacttgctcaggatttatttttatcaataaccaacagaacagcatcatctacttaaaacctctaatatttactaaaacactcccccaaaatgcttccgctgtttactgtgatctaaaacatgtgttgctagggggccctttttccttcccagcacaccaaatccactgtaggtttctgaactgacagatccacacgctatttcccagacaaccaaatctgtctcttccccataaacacacatataaacaagccatacttaagaaaaggaggcattagttgagatctgtctttgctgggaattctcctttcacttcctctataaatggttagcatcaattgggactaagagaatttattctggcttctttaacaacacccaccctccagcccccaaggccaccatcacaccagcatcatttctaaactgtagctctctgtgcctgaaatgtctccgaggttctagttcatctcagcatctctgtgacaacagtcttagtctttctctacctcccagggagcaacccagaaaccctgggcttgagtgttagggggtctaagagaagtcaccacccactgctgtgtcttcattaaggtctctgaaagatcttcaaataaaattcagcctggcttgtgttgaaagtttaagcagattaagaaagggttaaaataagcaactgattacggtggagacaaaagaactgttaaccaccgcaccggctgaacttattgatcatcagatacaacagagctgcctgttactgcgattaattattttccaaaagcatcagctcgtccctctacatctttctatatacttttacctccaaaatcatgaagctcttaaggacagctggcagttcctatcctgaaagaaagcatcttttcttctcaaactgcatttattccagaaattctagagtgccagagtccattaaactgctcagcatcaaaaactgtgtctaagacaaactaaaatttctttcctatccctttcttctgcaaatccaagagctggacaacacaccaaccaaagacccaaaatcacatttggtgttgggaggttttccctcttttcatagatcttaggtagcaagggacaaattaatggcagattagaaagatggataaagtaacctgcataaacagaatggggatgtttcccctagtcaagatgatcatttcagctctgcgtccatctccataccctcaagcccgaaaagagacactagacagcaaaggaacatgtgacaggagagctcaggaaggtaggacatttgaaaatgtgcttgaaggccagccagttagacaccctttgggctcttactccccagggctctccatctagctccaacgctgggcgatgcggcagggtcagggaatgatgtcctaggcggcagtgtccaccctcactaacgttaaggaataaggccagagggttcccgctcatttggaaaaataagaaaacaggaatgggggtgctggacattctaaaagctttttcccactactcacaaaaacacagctgtgaaaataaataccaccccccacccccaacaagggtatcgggccaccaacagtccagctcttcctcatgtctacatctttccagctgccaccagcatcgcctgcttaacagctggggcagaaacgcaccacttgcctggaagggaagatcaccgggggagaagtggaggggacccaggccagaggccgagggctggggttggggggcctcggcagtcaccactcacccggggaggggaaaagctccatatccactttttccgtcttgatgatggtgagagtcggtttgagatcgacggccgccttcatggtgccaggagtggggagggggaacagacggggctagagcgagtttgctgttattcttgtttttctttttaatgggaatgagtaacaagggaaaggggacgggggaatcggaccttcttctttaaaatctcaaatttccgctgactttgtcccgcgcccagaaggtgagcgcccggaactctctcctgggtagttggcactttgcgggaaagtgcgcgcgcgccgggtccccgcctcgcctgcgccccgccggctccctcctcgtccgcgcccggctccctcctctccgcgggcagccgcctgcgctcgccctcgccctcgctctccagagccgactccctccctcgcccgcgcgctctcccctcctctttggggcgtagctcgcggcgccgggcccgggcagtgggtctgcgcgcccggcccccacccccaggatctctgcggggcgggaggggggggtgtcgaggggactcaggggcggggcgacgagaggcgggcgaggccgggaggcggggccctgggccctcggccaatcgccggccacggcccaaaccgaaaggaagcggggcggagctcggggcccaccgcgcccgccgcgccctcggctcctcgcgccctgcagccgggtcgcctgggagccgcgcgcagagccggcgggccgcgaagccccctacctgggggagaagagcccggagcgagcgggctggctagtgcccgggccaccccggcagtttgggaaagtccatctgattctccacgcattcttgaggacttggtcacccgctcccgccccctcccgggagcggcatagttttccaagtgcgtgtccatcattcattcataaagactgacacacaggacgtgaggcagcggctggaggggcgtgcgtgcgtgcgaacaaggggctccgagccagtgtcctcaaagggctctgggaatgctggactccggccgcttagtgactcagggatcggggctgtattgctggaggagccttcgattttcccagagcccacccgcgtcatcgttaagaaatcaattaagaagtgagctgcccttgataagaatctagctgccactggtacggatggagcccaaggctgcctcctggagaccccaaaacaaaggcccaacgacttctacagtatagtattagtaaagtcaagaaccagggccccaaactggaatccagtcctgggcttccttgaacttatagtttccctacagcagtggttctcttcctctaattatatcaccattggccaaagttttgtcttttctttcacaaattctcccctactagataaaactgacaaccctcctattgccactgtctaaaacatgatgcacagctctgtggtttgaaatttctggagtatatcattcacagccatgacagaatcacagtttcagcccccttttccatttgggaagcccagacacttaggatacgctaacatgacccctgcgtaattaatagtttgccagtggcgcattggttataaacggagagagttggtcctaattaacaaatcaagcagtagacccagaggtgcacacctagacacacgtacagatatcgggagccaggcattgatacctatctttgatgaactaaaagagtaaacataaatctctctgaacaacctcagaggaagctatttttaatcctgtttcctgatttctaagcatatgttgaactcccaccacatggttataactgtaacctcagcctctgataagtcttaacacacctgcttacctcatctaactccagttttgtcctcttgaagtatagtaatttacaggtttcccacagccagggagggaaagagccaggaagagaagataaatcttaaatctggggctcctggttcaaacttcaggttatgctcgtcttccagtgactctgtaaagtatttgtacgggggtaagcctgatagacgaaggattgttgtcatccagctgtttccaaaaggtatgagaacacagcgctggcccccagatgacaagaacagacccatcagatcctgggaaaagctgggggaaacagcgcatgaatgaattgtgcatttgcacattcaaatgagcagccaagaaaaagatcttgaaccaatcctgccttacccactgtgaatacatcagcaaaaagaactgtgcaaatcaggagttgctttggggaattttgttttatcaatgttatgttaaggaaatgctggcattttttttaaatccaggtgtgagtattctatttcaaatgcagctttctcagagcaagtcctgtctctctccctcagttctttcctcagctttctttccaggctaacctaaacactgctaaccacccccatccctgcaaattagacactcaaagagcctgctatgatagatccaaaaacactgtccactccagcagtgggggaagtttattccttcagttcctcaatgatgacagctcaacttgtcagtcatcctttataacccagtcctgaagcacagaagcttgaaaggtttgactgtgcaaatcagggaatggggtttgggagatagccaggggccaccaccgacttctaggaaagttaccctgcaggaggccatttgtgaatattgatgttagcagaagttatacatccaacctcccatctggatgaaacttccctaaagacaaggagcacttaatatggacagagttatagtattttttacatatttgtgatttgagtaacccaatcaggcctgcaatgatcccacatggttaatctgataatttcgataaatgaaatccttattctctgtaggacacaagcagatttttttctaaatattcctatggacttgagatgatatttgtatcatatgtgctgtgcttagtcactcagttgtgtctgactcttttcgacctcatggactgtagcctgcctggctcctctgtccatggggattctccaggcaggaaaactggagtgggttgccatgccctccactttgtatcttactatatcctaaaaaacagtgccttgcatggtgcctgacacattgtaggcactcaataaatattcactgaattgtgagctatcaggctgcccaggtggctcaggtggtaaagaattcgcctgtcgatgcaggagccgcaggaaacatgggttcaatccctgggtagggacgatctccttggggaggaaatggcaacccactccagtattcttgccaggataatccaatggacagaggaggaacatggagggttacattccacggggatgcaaagagttaaacacacacacacacaaaagcctgagcacacacataagtaagtagtgaactatcacctccctagtcactagggacttttaccttgccaccaaagcttctcaatacaaaggttgagtgagtttgatactgagggcttgtgaaaatgagctaaacaaatgcagacctgcctctaggtctgacctttggcttggctgatcataagctctactccccagcactcctgtccactctggttcattagtgcctcagttttcccattaataaaacaaggtcagctgagctttgccttccagccccttgggcaggttgtttcaagaccctatctgctttttaaggcactcaagagaaatcaaccaggaatgactttggttttgcttgtaatgcagcagtctgttcttcctacacctgagagaaaacagagttgtatcttcaaacattcccaagacttagggaattacactgagcaagcgctgaaattcctcaaactagagacatcatgtcagaagggttcaggacagacatcaggcgttgaggggcaggggtatggagtcagacattaatgataccaagaacacagtcactttttataagaactccctcaaaaacatgaagtatgtaaaacatataaagtctcttttatcctcctccctccactgtactgcagtatcaataaaaaagaaatataaaaatacacctaattttagacaatcctacaagatcctgaagactgtccctctccagaagtgtagtggaataaattgtctctttctcgcatcttgaccaaaaactgaagaatctcagggttgtaagctaaaatacactttattaaaggtaggtgcaaaaacatccagaccgctaacggctaatccagagcaagtttatgactcacagacgatttactggtttaaatgtaagaaaaaaaaaaaaaagttttcaattaacaaccttcccgctttgcgtttgtggttgtttttctctgagaataaaaggcaacagtcaccctgtcacacacagaaacaggcttctaaagcttaactctaaagcaagtagtttctctgtgataagttgagtcactgaaaagcaccctgcagggagaaagatgcctggggcttccatatctaccgttatcaagctgccataaaatggaaaactggagaaaatgaaaagaactctcttaattaaactcggatgcccaaaggccttagggtcagttcaggaacccaagcgggggactcaagctgggctgtcgctgactgcaggctggctctgtgacctcaccgaagccacttaacctttttgtgtcacaacctcatccctgtttcagggaataaaaatcaaccctggctctcccctgaccgtgtaatacagactcattaactattgtttagaaggtacaataaacaatgagcgataagtaaggggggaagccgggaggagagggcgggctgcggagatgggaggacttggggcctgtttgccctgggaaagttctccaggataaaaccaagaggagcctgagtagtgcaaactctggaataagactcagattgaaattccagcttgagccactcaccagctgaattattccacagaagtcctttaaacaatcccaaacctagtccctccctgttgaaagtgaggttgcttggaggattacgtgagataatgcaagaaagaattagcacagtgtccaggtcaggaaaaagagctcaaataaagtttaatcactgttactgcttttaagagccagtagacagtgggatgggcttcccagatcaggcagtggtaaggaacctgcctgctaatgtaggagatgtgtgttcaattcctgggtagggaagatccccctggagcaggaaatggcaaccaactccaatattcttgcctgcaacagcccagaggagcctggtgggctacagtccacggggtctcaaagagtcagacataactgagttactgagcatacacgcacgtagatggtaggacgtaggagaaatcacaaaaaaatatcttctccatggccaccccctttgcagagtaaggtggaccctctatttacctgaactgtcttatggacagattaggagaacgatcatatctaatttttaaaaatctctccaacccactccttcagaacctgcccagcttggaccttgctttagatattccggtacggcctgggttgggagaggaaactgcagacttgtatttagaagtcacggcaaagctgtacatcaggttcagaaagaatatcatgtttgtggtgcctctttggagacaaaaccttaggtcttggcttcgtcacatgttatagttagacggactctcttagagataaagttcagccctgctatctccagaggaaaaaatgactctgagcgaataagtcattctgccaaaggccaaacagttgagaaaagactgtcatttcacagcttgggcgtctccttgggtttatagataccacactgcagggcaagtcactcaccgtcattcggtttggtctgttcccagacacccttgagaaacgaagcaggatacagcatacacaggaacagagagatgctcagactcgatttctggaaatctaacagtctcctctgccctggatgtgttgacttcgggcacgcacgctgcagggtaaccacactagcattccctgcgggagacagcttggcatgggcttaaggagagaaagggtctgggctggctcatcgctggctcatcgctgtctgccgtttctttaggctgtaattacgacccattcagctgcatctgcagccccaacaatgtgggatggatgggcctcatccacagaccaggcgacatttgaaaatccaccagttcagacagcacgtacttctttcgcagcagctcagacttctgctcacacagaaggtggtgaggagctgccaatcaaggctacaggatctgaggttccctccacaccacatttcctttccttgaggtgaactgagcacctgtctaggaattttggccccgtctgggcctgggtcatgcggaatgcaggctaccctggagccgctgggttcatgtagtgtaagtgtgaattctaatgtaaactgtcctaaattggtccctggagaatggagagggacaatggcgtgtgcaaaaatggtggaagaatcagtgttctttgatatcatggctggagcagagaaccaggctcctggtggggagctcagaaccccaggagaacaagatcctgagccccaccaaccagactgcaggtagtttcatctggtggaaggctaagggcccccaatctgatctcatcctgcttttctcttggcttacaaagacaacaccaggcttcagaacagatgttctctgcagttgtagtctgaaccttaaattaagataattttattgtgacatctttccttttctttcccccctttcattgggaaatgccaagtcagttgccccaaaggactaacctttaccaccctagagatgaaggagaggaggtagggtggagaatttcttcattctgttctcgatgctgcaagttaggcagaggaagcaggtggcagtggaacaagactagctctaagaggaaaaggggagatgccaccagaggaagcaggggagggcacctttctgacaacagtgggaggatgggtgagggggaacacagaaaggcaccatcacagcatttctatgtccttgtcattctgggacttaaatctccaagtttccaaaatgaaactgaggcctggtcttgtatctggtaccttgcctgcgttgatttcattgacctgcgtggccaacagtcaaggaataacaatcaaagaaatcaatggtggtccaagctggaaaaggattcagagcagaaagtcggaagctgcacagaagatgaagatacaatggatggtcaagaggaaaaccaaacacagagggcatttctcagtctttctgagacatgggcactttctttatacaaagaattttccaccccacccccacgaggtgccctctggtgcccagaacaccccaagggaatatttcaatatgtacatctgcctcctacactccctaaagacagcgattagttggtcatcaccgccagtgctcagctcaagacagtaggagctcaataaatgtcaccaattatttaattaacgaacaacttcctaaaatttcaaataccgatctctgaactcaaatatcagtcttcttttttcagtctaaagtgagactcaaagttacccaatgattaagacaaagaggtaaaaaggtgactctttttaactgaaaaggtctttatcaagtttaactcttctgttctcatcgtctgcctctgatgcccttaaaggaaaatattgctaaggtcaccatattcattttatttttcatatgagtattcatggatatagttgtttgtgaaaaaataaatggtgtttggcttaaccacaaaaacaaaccagtcattttgtcattggtctgaacttatacacagcatactgttcatattatcagaaacagaaattcctgaacttaatttgcatcttttatttcactgattatcttgaaggtaaggttcagagtccctggatccattactcagataagagaatatgtgagatgaacccaattttgtccatctttgtgaggaagaagagctagacacttcatagggagtccagtgtcatccccttcaccttctcaaatttactataatttgtcaggtccccagaaacaatgcattttttaaaaattgtttgaccatactataggcacccccttccagtgagatagggggtgtgttgggaggagatgaggaaggacaagatagggaaagtcaactgagctgttaccacctagcaggtggcataaagacacagagagaacgcctgacctctctggctggctggaccatggcagaggatacctccttgcactaaattagttatgtctcctgatgggtcatgactatgctgtcaaggaaaagcaggctgattttcaaccatagaaatcaaggaaaaaatgggttcggtagggatccaccattgccttttagctaccatgagaattaggaacacacatcattttatatcactttctccaagctaattacacagaattggccccagaaaaaaatgaagtgtgttacatggagaacatcttactagtcaggaaatacaacgttctttgaagctgtcacctataaatatctcactcaggtatctactcctctctttacttcagcaacctccacttcaccacatcactgggttatatataatgaatttataccagtgctcccttagctgatggacttccctggtggctgtctacaatgcgggagacctgcattcgatccctgggttgggaagattccctggagaaggaaatggcaacccactccagtactcttgcctcgacaatcccatggacggaggagcctggtgcaggatactggccacggggtcgcaaagagccagacaaaactgagcgacttcactttcccttagctgatgctgaacctagtagcagagaaagtggaacgcagagcactaattcaagtcccttgttgtttagtctctttttgcatgtgtactgttccccagaacacgtgcacagaatctgagtttcatgaatacacaggaccatatatccataaaaacaaatctagggtatccagtgtcattattcacatttacaatgtaccgagcaccaaatatgccactgatagagctgacagttgaaaaaccacctcaagaagggatatgtcaactcttctctgggatgacagctcccatttaattctctgctcttcagggccaaagagatgacgcctatttaacttacaaagagccagctgggctcactcggcacattgcgtcacccagagtgaaggagtcggaagggagcggatggtcctagtgatgacgcatgaggtggaagagacccggctcacatctctggattggctcctgtacaatgaaagcccttctccctttgccttgatgaagaggggagaggctaagccggtgtgtgtgatgtgcaagaaggcgccatttaatcagtcaggtccgagaagtactttcaagtgttgggggctctgagatgatagggaaggtggagaaggaagaaaagtagaaaccagagaagttattccttaatggaagtgtatttcatcagactgatcagaaacacgtgttttccccagacagggaaaccatcttgaaagacttcatcacacaaaggctttgggtggaagcaagcgccaccagggacccgctggggagggggagggagtagggaggagggagggagcagggaggagggcgtgcagctggttggggagctggcaggggacgtgggaggaaatcgcaaccggcggcgggccggttctcttgtggcaggttcccaggagaggtccctttccaggaattaaaaattctaaataatgttcagaattttgaaaaatcaaaaagattatggactattctttcagggaattccacagccttgaaagagaccagatggctggcaaccaccaacccagacccaggaaagacctagcatccacatacactcccgtttcagtgagcaaacgttttctctccaggagagtatttttttttaattgaatgtgatggagctgaggtgtggaggtaagggacaattccaaacaacccacatggccttgtgcccaaaaaaccaaagcataaaacataaaccagaagcaatgctataacaaattcaataaagacttaagaaaaaaacgtggtcttcattaaaaaaaaaaaaaaaatatatatatatatatatatcccatacaaagacctgtagtttttttgccaaattagctatcaggctttggttttctaactataaggaatgcatttaatctctaaaagaactgaagaggcatggggtagagtggttaagggcacaagcttggcttcagatggacaagagtttgtgtcagcttggcttttctacagctctcaggcccttggccttagcctcagtctcttcacctgtaaaacaggtgatcacagtacccattgacagagttaatctgaggatggaatgaatttgtgccaagtcatttgcactgtatctaccacagaataagcacccaatgacattttgctgctattattcattaaaaaaaaatcatgatgttgactttggatttggtgaccataaaattttcatggaagttaatccaagagatggggacatggtggtcccatcaaagtcatgaaaagtgaaagtgaagtcgctcagttgcatctgactctttgagaccccatggactgtagcctaccaggctcctccatccataggattttccaggcaagagtactggagtgggttgccatttccttctccaggaattaaagtcatgatatagtattaaaataaatataattttaagtctgagtatgtaaatcacacagatccagacaccaacccctttggatgaaagggggttgatttccattacatagatgtgaaatatgatgctgggagttctaaatgtatggtcacagctatgttacatcctagccatgcagagaggagtaaacaccctctaaagtaatctccttggaatcctgggttctccctgctccaggttgtatgtttgatacccattcagtgatttcatacaaactgagcaaaataagatcccaagcaaatggcctcactatttggcttttgggctggtcaccaagttagcagaatcttacacacacgcttcaagtcatgccctgtgtcttgctgcttgagctctccccaaactagtgcccagtataccactgcattcacttctcagaagtcttttcttgtgttatcccatcttctttctgacagccagaagtttcctaacaacttgtactgtaaacctggacgtctaactatctctgactacgcgtgtttgcgtgctcagttgcgcagtcatgcctaactctttgcaactgcatggactgtaacccgccaggctcctctgtccatgggatttcccatggacaatgggatttcccaatggagtgggttgcaatttcctactccaggggatcttcctaactcaggaatcaaccttcatagcctgccttggcaggcaaattctttaccactgagccatcagggaaggaagcccgactgggctgtactcatgcagatttagttacataattctggacccgtgaagcagcccaccccccacccccacccgagctccgacttgcctcctggaattcagatgaagtgttctatgtgctgtgtcaccacttgtgctgaccagctgaacctaaggaaagacattccaccttgcccctcatgccaccagtcagcagcagcacagattctgctatttaggggcatccgctacataatttgtattctcgcaccgcccgtgcctggcatctggccggcaaaggctggcagcacggaacacacagagtctccttgcgagttgcctgctccatttggcaagatgaacaccgtatcattgggaaagtggacttaattggatttccgagagtgttaagtcatcccacctcagctccaagttgattcaagtgtagccctgccctttccaacaaccagagcaaacaaatgatgaagaaatactttaaaatgcacaaggctgggtcctctcatttactctctctttttttttcttggtgaatttggggaggtttgggcatggatcctgcacacacaatactgttcttgttcttcttttctctacagggcagccctgaatggctctgtctaaaattataagcagggcagccctgggctccaagagatcagagccctcatgctgtgtctgaacaaagaccctgcttttccccaacaattaggcctgcagaaaaggacatctatctgcctctattaaaaccaccacgtgccttcaagtcagcccattgtaaagctaattaaataacacgcctctctccccatgcaggtctcctgattagctttcctctgcccggaacgtctgcaaagtgcctagagatagacagctaatgttccacttctctgactttcccccaacaccgatagctggccttcgaaaaagccacttcgtcactattgtcgggtttgttcaggcgacatgctcatccagagctcacatgtgagttctccagcttaaaggaagagacaaattttatattgctttaaaaataagggacttccccggtgatccagtagttaagactccacacttccacttcacttcagggagcataggttcaaatccttggttggggaactaagatctcctgtgccatgcagccaaaaaaaaaaaaaaaaaaagtaatttgggaaaacaacatttctgtcacaatgcagactctttggtggaaatccaccattatcacattctgcaactgctaccccagcagggtaatgttcctgaaggacttttcatagaacttgaggagactggataagacgcagccaggactgtacaagcggccctccagctcagacctgcatgaaacagaagcacagacttcttggaaagacactgtagaggaatgttgatgtatggcagaggccaacacaatactgtaaagcaattatccttcaattaaaaaaaaaaatgttaaaggacactgactgtagagtaaaacagagatataagaaaacatttcaacccattttttaaaaacatgctgtagaaataacaaattccttccaagactctttagtgctaagcagataaaatcaaagcattgcctaaatggctcacattagcgcctgcccatttttcagtcctgcttctctttctttccctgctctctgacagccctggacttgctggtatcccttgaacgtgtcccagtgcttcaccgttttacgtgcttttcagacgtttctggaaagccctgctccacccttcccactcacccacctggaaacagcagcaaacatcaccaacaccccacccctaccccctgaagctttcctgggcctctgggataaaaccaggcacttcctcctttgcacctcctaacaaactgccttcaagtcagtgttacaggcttctgattgagtgcttgctacctggcttaaaataacctcagcccaaggacttttctggtggtccagtggttaaaaaccttcctgatagtgtgggggacaagggttccagcctgagttggggaactaggatcccacatactaggcagcaaccaggcctgcgtgtatgccgcaactagaaagcccatgtattgcaacgaaagatgacgcagctaagaccagattcagccgagtaaacaaaacaaataaataaatataatctccacccttctagggcatgagtcatattctattcaaattttaaattccacaaagcttaaaacacagtgacttggacctcttgatatagtaaatgctgcttaataaatgttgaaagaattaaataaatggaggaatggataaaacagccatttggtattaaaagtgatctgagacggtaatggtaaaatcaggcccatttccagcttcaccatagacagccctgcatgcttggaaaagggcattattatcttatgacatggttctctccgtatgaaactgtctagtctaatatgcacacatacacatttttcagacacaaaaatgtttaataataaaatgaaaggagaccagctcttttctaagtctgtttaatagttctagagattaacttttgaaatcagctccagtctttgaggactgtagctcatttaatcatcagaccataccaacctttcattctaagtatttttaagaagactcaccaatcttctcgaatgtcctatacagatgaatggataactaaattataaagcaatcccatatgcaatttaagtttcccatgaaatactcatggacctcaaaattagcaggaaaaaagaaaaaaagcacttggtgaaacagattttgaactctgccaaatccacaaacatttaaaaacagccagtcactgaatgattcccatccttaaaacataaagccttatagcaaaagtcactccctgacggttctcttatgaattcacttccatgcacaatgccatctgcggtcagttcttcccttgtcattttaccatcacgatctcaacttctagaaagttgtgcttttctaatatttgagggtgccttctatatatagagagaaagcaagggataaagacacagagaaagagtccacaatcttataacagtaagtaatcgtatcaacaaaggagtatagaacctccaacctgagacccacggagaaaacactgccattcctttgatagtcactttgttctggcaagcctcctacttgctaaatagaatgcccactttataatgatcataatggattgaaagccataaaattagattctggctagcaatagctctttattactctgctttaccacagtgtgacttccttctcagatcttgccttaaggaagactcatccacaacctctaagacatggataaagtagggtaagaaacaaagacaaatcaacctgcattttcattgtgatctttttcctcaaagtatcattcggtaggactacaaagcagccagttagcgttgagctcactgttattttatcaaggacagattatataaactacatggcaggaataaacggttaaccacaaaaataaatttaaaacatggtagaaagagaagaaatgaaggtagaagagacgaaatgaatgccacatgtatgtacgtgtatgtgctcaggagctctgctgctgctgctgctaagtcgcttcagttgtgtccgactctgtgcgaccccatagacggcagcccaccaggctcccccgtccctgggattctccaggcaagaacactggagtgggttgccatttccttctccaatgcatgaaagtgaaaagtcaaagtgaagtagctcagtcgtgtccaactcttcatgaccccatggactgcagcccaccaggctcctccgtccatgggattgtccaggcaagagtactggagtcgggtgccattgccttctccgctcagcagctcagttgtgtccgactctttctgatcccatggactatagccgacgaagctctgctgtccatggtattttccaggcaagaagactggaattgggttgccatttcctcttccaggggatattcccaacccagggatggaacccatgtctcttgcactggctgacagattctttaccaccagtgtgaatgccatagcattcatcaagtagaactatcagaggaatataatcaatacacttgaatcaaagaataggaacataaaggtaagaaatatgtattgtgaatgaatactctcatgaagacattgggtacaaaaattaagtacagtggagtaaacactgtatgattaaagtcttagcaaatagcatacattatgtgtgacaccaatagcccttttctaaatccaattatggtttggagcaatattagaaagcataatatagacaaagcaagacacacaagaaacctcttattaggagcaggaagagcttggaatggactgtaggagctgttgtgttgatagttcatgtcagtatatttcagttagcaggttatttaagcaatgacttcagggtaagctgccatatgattctgagcaattaggagacacccctttcacactattcacagagtttgggtcattttaaggcctttatgtgccagatctcagaaccaaaattgagttggcatggcttctctcctctgacagaaataacagcaaagtattaccttctgtcagacacaactaagtgactaactttcactttctttcattaccttctgtagcctggaaggtcacttccatcagcacttcccagcacctgtgagaggtgtccaggaggagggaggcatttaggctctcagcacagagcatctgtccagagtatagagactttccaagtttgcatgactctgacccaagtcagcatgcaaaatactgaaggcgcagttgcacattcatgcaactctttttagatgattcctgggtcccaggttactctcctctatcacccggagactcaaatgtggttttctcctgccaggtcttgggttatcatttctcaaatttcttgttcgaccttttatcacttacacatcacaaagcgagtcatcattttcccaccaagaagtatggggtgaaggagggaaggcatagggcagcaaagagaagatgattcaggcattaattcctaccggtgaaagtgaaagtgatagtctctcagtcgtgtccaactctttgtgacccatggtcctacctatccctactcgaaagagaaccaatccaagccgccttgggaggaggacgcagtagggccccaagtgatgtgtctgccggagctcaaggataaaccagagaagtcaggtctggattaaggatgaaggggaaggagaggaaggcatcagttcccttcccatggggacgcaagggtgagggagactgagatgaggaagaggacttctgcttggacgtctcgcatctcctcgcagctgccgcaggaaaacgtgcgaacggagcagcaataagagcagctagtcacaaaactcatctttctgatacttctccccccagttatatatgttcattgagattttataataacatgttccagtagagacttcatgacaagtagaacatggcattacaaacatacaaagaatacattctgggaaatgttccatcattgtaaagtcacagaccccaaattcttcaccccagacaagtgagcactggaaagaaggatgaaagagaagagggatagggaagaggacatggcaggtgatttcagggcttttgtgtgttgacaccttcaatattacaggcatttttacttcccttggattcacaatggttattccttcaagacacccaaactgaacatatgaattttattaaaagtctttcgtgtggtcaactctgtatgcttgaggtgttttccagacaactgttagtgacttttttttgaaacttatcaaatataaaataccaaaaggatgaaaaaagaaatatggatttcttggcaaacacacttgcattaagttgagatttatacaagtagtacataaaatcatgatgactttttccttaaagagtctgctgaattttttttttcttcttggagttaaaatacactgaagtagcttcaaaattaaatattcggtttgtcttggtttgtttgtaatagagaaggtcaagggaaggtattatattcttagagatgtgaagattgatcatcatttaacataattagactttcagattttgcattcttcacaaattgcacacatagtggttgctttctttttttattcctggttattattatttcacatagcttgcccaagtcccagcacagtgtttaatactaagctacagaatcaggctgacctgagctgaagtctgtaacttagtaatggtgtaactcttggcaagctacttcaactatataaagctcagctttctcgactatgaaatggagctaataataactcagaatattctggtcagatttaaataagataatatatgtaaaatattcaacagtatctggctcaaaataaataataaatggcaatttggggatatttttcaggttaaaaaaatcactttccaaaccagacttagaactcagatatctgcaacccactaagttcactagaaatcaaaaaatactcatttattgcagtgaacaatgttgaatgaccacttaatacaagttattatttatgccatagattaagaagacagttcataaacataagtggcctatgtattttaaaatatctatttataaaagggccaagacaaggaaagaaaagtctttttaacaaataagtgttgggacaataagatatacatatgcaaaagaaaaaattttgatcccttattcacactacatgcaaaaattaactcaaaatgatcctcaatctgaacctaaagagctaaagctacaagattcttacaagaaagcataaatctccacaacattgctttaggcaatgatttcttacatatgacaccaaaagcacaaacaacagtgtaaaaccaaaggaacaaacaaaagagatacattgggctaatcataactaaaaacttttacgctgcataatataacatcaagaacctaaaacagcaactcgtaatagcagagaaaatatttagttccaaatctcacacacacacatacacatggtacagtggtaaagaatctgcctgccaatgcaggagacgcaagagatggtgggttccatccctggatctggaagatccctggagaaggaaatggcaacccattccagtattcttgcctggagaattccatggacagaggagcctgctgggctgcagtccacggggttgcaaagagtcagacatgactgagggactgaacacacacacatgtatggaactaaaatgggcgaaagaactaaacgggtaaatattcaaatagatatttctacaaagaagatatacaaatggttaataagaatatgaacaaatgttcctaatcattaatcattaaggaagcacaaattaaaaccacaatgagatactacttcataacctctgtgagatctatcaaaaagaaagacactaacaaatctaggtgaggatatgtagtgattggaacacgtgctggcagaaatgtcaaatggtgcagccagtttggaaatcggtctgtcagttccacaactagttaaacatcaagttaccatatgaccagcaattccacttctaggcataaacccaagaaaaatgaaaacatgttagcacaaaaacgtacacatgaatgctcatagcaggattatttctaacagatactaagtgcaaacaaatgtccatcaaatgatggacacagaagttgggacatatccatataacagaacggtattcagcgatttaaaaaggatgagttaccgatacatgctacaacatgaatgaaccttgaaaacagtgaaagaatcagtcacaaaagcccccatattgtatgactccgtttataagagaagtccagaaagggcaaacgtataaatacaaaatcaggctagtggctcctagggcatggggctgggtgtgggggagcggggagaagactaggtttgactgttaatgaggacgacattccctttaggaaggacaaaaatgttctagaattaaatcatgacgatggttgcacgacactgtgaatatttttaaaactcttcaactcgtacactctaaatgggtgaattataccatatatgaattatatctcaataaagcttatttcaaaaacaaacaaacaaacaaacaaaacaaaacactgcttttccagaggtgaaacaagacaaacaaaagaaaaaaagaattttcagtcttcacggttgcccagaagagtctgtaaaaatcatcccaagaccgtttgcttaaccaaagttcagtggaaaaacatctaacatttctgtgaccttcttttctaaactttctaagtggcttaaagagaggctgcccgggaaactccgaatggaacctaaaaatattatctcctggttttataaacactggcaacgctaatgaagtgaggagccgcagaccccagggatgggacgtctcactcaggttggaagcccgggtggtgtgtaaactcaccctaagacaggcggatttgggccagggaggtgaacatcaacacggccgaatggaggaaagacgaacaaggaatcaggatacataaagcagagcaggagtggccactgttctaaacatcagtaaaacaacctcttttcaaatcaagctccctgtcccgttctgctgaccaagtttggacaaatgaatgaaactcaagaccagctccccctacccaccttcctttccacacagttttgaaagaggacttggggagccctgctgtgtttatcactccttaccgggtccaaagcagaaatattgtctttatcatccctactctccagggctcacccaactgtgcaggcgtagtcatgtcctccttagctccccaccaaggttctatggatgcttcctgagaaaaaggatgtcactctactttgtggccccaataccctgtgcagaataagaactcactatgtacatgctgacagatgaaggacaggtcaaaagagctctaaccaaggtacagcttcccaggtggcgcagtggtaaagaacctacctgccaatgcaaaagacgcaggagacacaggttcgatccctgggtcgggaagatcccccggaggaagaaatggcaacctactccagcattcttgcctggggaatcccatggacagaggagcatggtgggctacagtccaggtggttacaacaagtaggacatggttgagcatgcacaaccaaggtaaactgagaccctaaaccagcacaatttttaaagagatgggaatagcagaccaccttgccagcctcctgagaagcctgtatgcaggttaagaagcaacagttagaagcagacatggaacaacagaccggttccaaattaggaaaggagtatgtaaaggctatatattgtcaccctgcttatttaacttatatgcagagtacatcatgccaaacgccaggctggatgaagcacaagctggaatcaagattgccagaagaaatatcagcaacctcagataggcagatgataccactctaatggtagaaagtgaagaactaaagaacctcttgatgaaggtaaaagaggagagtgaaaaagctggcttaaaaatcgacattcaaaaaaatgaagatcatagcatccagtcccatcatggaaagggaagacaagttagggactgcaatgtacttatgatggtctctataataccgggactcaactctggggcctgaaggcattgacagtaatcgtaagagaagatgggatagatacaggagctgtttagaaaataaagtggacagacctgtgactaacctaaatctgagggaataaacggtcatctcttgagaggttcctcctcttctgccagtacaggatcccttgggagggagagggggaggagagagaggaagaagggagtcagggagaggagagagaggaggagaaaggggatgaattgacaaggtgacttgatttcttagagttccacaggctgactctactaccggacttctcagttctataactcaatgaatcacctactaaaattaagccagttgagccaggtttctgctacttgcaaacaaaaagagccttgaaagcaactaaaacagcacagattctctcttgcctttccagcaggtctttcaatctgttacagcgaggaaagaatgcttaacgttcatctgcccattctgtccagtatccttgcctggagaatcccagggacagaggagcctggtgggctgccatctatgggatcgcacagagtcagacatgacttgaagcgacttagcggcggcagcagcagcccattctgtcacagacactgggaaacttgagaaaggaagagagctaactgatcgaaatgggagaacttcagaatcacatttcaaactttgtatcctttgcccccaaatcttgggggttctcacgccagcacgcctaatagttgcagttagtcactcagttgtatccgactctttgcaacccctggactgtagcccaccaggctcctgagtccatgaaattctccaggcaaaagcactggagtgggttgccatgctagcacgtctacccttagtccaatgtttgcttcaccagctgaagcagaagcaaaagattagtctcgaagtcaatagatttattttcctatccaacctgctctttccctttggacagtgtccttaaacattcccttgaaattctcttaaaaggcttaaaatttttgtcttctgtgatagaagcagaagtataataaaaaacaaaaattacgtagactacttctgaaatatcttgaaaggtatttgaagggagaagcaattcgcaaagtcctttaataatggatttcagagttaaatttcaccatggctaatctaaatccctccttttcccatttttgttcttttttttcttgatcttcagtggatctaaagaacagctggtaactcctcagtgatactttaagaagagttaaggctacactagtatttaatcttagttgcttttatacttagttgcaactcattgcttacctgaagcctgatgtctatggaaggcaatgaagaggccatttggcaggaaatgttattcaagcaaggggagatgagtagataccccatggagcactttatgttctagcaacagtaaggtcaaatatgtcctaaatgtggaacttgccttcagtgttacaagaaagctgctttctttgtgtcttttacaacttaaagtttctaaatcctccttgatacaaaaataggtagagggcaaaacaaggttccttccatgccattaaaaacttgtgagatcaggaaggaattttgaaagggcagatggaaaagtgattaattgttactaaaaaaactagacggaatttccctcctccagagcccagcaagtagggctgggagatgaggtggccctggggaaatgtggatggatgtagggaggctggaggcctggtcccagggcccctcacccctgcctttcccagtcctgcttggagacatttcaatcccattcttctcccaggctctccctctcagctcctcagcagcagtcccacatcacattgagtttaaaataaagaaatgcttttcctaaagaatccgcacacaaataatctcattaccccagtgctgaggtttatacagcagacgtcttctgccgggggcggggggggggggggggggggggggatgcactctccgctcactcacatggaacagctgtgaggagagaaatggtatttaattcattgtgaaatattcaacaatggcttcactgcacttttaaaagccttttgatagtaaaatcccacagagaacagcccatcctgtgtgctgaaaagcagcctccccacaattagtccctctattcagcggtcggagagtctgtgtaaacttcagcacgtgctacccacaccgtggagagcttcaaggggataaacctttcaggaacttctcagggtagagtcaggttcagtgactcgggttggtggagaagcgggaaggggcacaaggatggccaaactttggtgacagaccctaagcgaatgccagagaaagacaccgtcctccacggcagctttacgaatggccttgcccttccgtgcccttgaggaaccagtgctggaccaaaagaaaccagacagaagggt

SEQ ID NO: 108 - DNA, 30483 bp, Hippotragus equinus
  source 1..30483: mol_type = genomic DNA
aaagtttctaaatcctccttgatacaaaaataggtagagggcaaaacaaggttccttccatgccattaaaaacttgtgagatcaggaaggaattttgaaagggcagatggaaaagtgattaattgttactaaaaaaactagacggaatttccctcctccagagcccagcaagtagggctgggagatgaggtggccctggggaaatgtggatggatgtagggaggctggaggcctggtcccagggcccctcacccctgcctttcccagtcctgcttggagacatttcaatcccattcttctcccaggctctccctctcagctcctcagcagcagtcccacatcacattgagtttaaaataaagaaatgcttttcctaaagaatccgcacacaaataatctcattaccccagtgctgaggtttatacagcagacgtcttctgccgggggcggggggggggggggggggggggggatgcactctccgctcactcacatggaacagctgtgaggagagaaatggtatttaattcattgtgaaatattcaacaatggcttcactgcacttttaaaagccttttgatagtaaaatcccacagagaacagcccatcctgtgtgctgaaaagcagcctccccacaattagtccctctattcagcggtcggagagtctgtgtaaacttcagcacgtgctacccacaccgtggagagcttcaaggggataaacctttcaggaacttctcagggtagagtcaggttcagtgactcgggttggtggagaagcgggaaggggcacaaggatggccaaactttggtgacagaccctaagcgaatgccagagaaagacaccgtcctccacggcagctttacgaatggccttgcccttccgtgcccttgaggaaccagtgctggaccaaaagaaaccagacagaagggtccaaaaggtagactgcagacgtacatttcctccggcaaggtttttaggagtttccagtttgcggggaagctaggaaagcgtatattatctcacagggtggacatcagccaccaggactgaggtgacaatgaagaaatgtttggggacttgcctggtggtctagtggttaagaatccaccttccataatccacctgccaatccaggagtgagtgttcgctcagtcgtgtccgacccttttcggaccccatggactgtatcccgccaggctcctctgtccatgggattctccaggcaagaacactgtgagtgggttgccatttccttctccaggggatcttcccaacccagggaccaaacctgggtctcccatattgcagggagattcttcaccacgggagccaccagggaagccagtccaggagactcgggttggatccctggtctgggaagatcccacaggctatggagcaactttgcccatgtgccacgactactgaagcctgagcacctagaagctgtgctccacaacaagagaagccaccgcaatgagacgcctgcccatcagtactagagagcagccttcactcgctgccactagagaaagcccacacagcaacgaaaacccggcacagacatagatagataaatatccgtaattgaaaaaaatattaggcaacaaagtttgtatcatggttaaaagcatgggctttggaggaagatctcagtttaactgaccctcttcccacctcccagaagcacagttagacttattgagggaagtgacttgacctctctgagcctcattcatctgcaaaatgggaataatattgccagaaatattgtaagagtcaaaaagaccacacatgtgtgatcctaagcagacagaaagtacttaatgaatggcaattattctacctctcaaattggtctagaaagaaggcaggtcttttcctggatgtcctgttgttgttcaggccctcagttgtgtccgactctttgagagcccatgggctgcagcacaccaggcttccctgtccttcaccatctcctggagcctacccaaactcatgcccatcaagttggggatgccatccaaccatctcatcctctgttgtccccttctcctcctgccttcaatctttcccagcatcagggtcttttcaaatgagtgggctcttcacaacaggtggccaaagcataggagcttgggcttcagcatcagtcccttcaaagaatactcaggattgattttctttaggatggactggttggatctccttgcagtctaagggactctcaagagtcttctccaacaccacagttcaaaagcatcaattcttcggtgctcagccttctttatggcccaattttcacatggaccttacatgactactggaaaaactatagctttgactatacggacctttgtaggcaaagtaatgtctctgctttttaatatactgtctaggtttgtcattgttggacttcctccaataagattatttgaaattgaagcagaatgagacaggaactatttttactcttcattctaaattttttaattgatcagcagaaaagcaacaaggaagagagataagcatagatatctcattgaaaaatctgagggatctggaccatgttgaaaacaaaacaatacaaaaatatcactaaatgtcaaccaaactttgcatcatggtaggttgattttgctgttcaggtattttaattgttcaaagcacataatactgatgaaatgtctatttcacaacaacttttctattatttccagccttgtctcaacagaccaggaacaggatacaggcagttcagcccctttcattataaaacccaatgttcagtctatcagcgggatgcagactgtctgtcagtcctgcttggtgaaaaatgtccatctgggctgaccagcaaggaaaccccgagctgtctcagctgctccaagttggtgaccagggtggggcaatcggagaccctgaaagtggtctccacttgtctaagttagtttgtggcagcagatgtaatagccaatggttccaccagaaggcaaagaacaaattagggtgaagatgccaaagggcaggcaggatcggaggcagtgactgaggagtgaaggacctctatgtgccatcctagtttctgtatctgttgtgggataaggtgttggctcaggatttccaccccctttcagaggccccgttcctccagctcatttttacccactgcatgagacagcgatgccgagaaaatctcccacgcactggctagtccttgagaaacagatcagagtgtgacgcccctacggagtcatcctaagggctctgacctatcccatctgcagctcccaggagagaccacaggtcctacttcatgggtacttagaaagatcactctaaggagcatgtagtaaaaggggaatgtttaaaaggaaacaggagagaagtggctggaattcaggcatagcatccatgcccagtgttttcaagaccacaggatagaaaccatttccagatttaaagacagtctcttgggactgaccagagtggtgagaaggggttgataggaaggaagctttagcagggaattcaagtgagttcaacaaagtgtgcttggcacacttgccaagtacaacaaggtaagtgctgctggggctacaaaggtaccttttcccttggcaattcttaacctccccagggaggtcagatcacttttgagaatccaagaaaagctacagacccttagaaacacccttgcatgcaacttcagagggacctcatgtttctgagtcatcggcagcaagcacccttgctctatgagactctgcaggcttaagactcagtgtaagttgttaggactgattttttttaaaaagcatgtatgaagcgggtaagaaatcacacaacagctgcaaaggcaactagaatcctggttctgtagatattgaaaatcactgcctctgtctctcaaggtttagtttagcaactctgaggaggtacaggaaagacccgtaggacaatctcaggcactgggagttttgaattttgtttttttaatgtcaccttcaaggatgaacacaaattctaaaaatctgcaaggaagtccaaaagagtcaaacaggtggtgaatgactctaactggagctgttggggaacccagtggggaaggcactggccactcctcattctcacagtgatggggtggagggatcggtcagctcactgggccactgtaggcgggcagagaccgaaccagagcggatgggcctgttccacgggcagcctgagagagagccaaaggttgccctctacatcagtgggaaggtaatttctctcagagtgcaattaggtctcatgtttgacctatgacctctggcccatgagatatttacgatctccagacagccagcctagggggcaagtgagtgaagatggaagctgaaggcatttaataggaggagggagggggcaagtgagtgaagatggaagctgaaggcatttaataggaggagagggagagagaaaggaaagaaagcgggagggaggaaggccttggtcagtctgaagtcatctatgaaatcatgaattgacagccttgcttcggtgcgcatcatgtctgccttcaatacggttttctgttccccaccattattctatcacatatgaggacactgaggctcagaaggggtcagtggcccgggtcgcacagctggtaggtggccaggctagaacctgggcccaggccagtctcaactcccttgttcatttcccaaccgaatcagtgcgcacgtgcactccacagatggttcgcccccttacccatcccgccatctagaactccctccagcctcttgcaaaactgaatctacgcccacaatctcttctgttccaacggtctctcagggcagtcgtgcttcccccgatcaaacgcagtggccgaggccgcgcgctcttctcctctccgttcccggagccgtcttgcagcatgtcccgacgccctgcctccctccgggcggattctgcgtgcgcccgccttgctggcagcgccggggttaacccaccggcctgcggagcaatgatttctgttttatttcagcaggggaagtgtgtgccggcctgattagcctgatggtttcctcttttcccataacctccagacccccacggcccaagtgtttactctctgaaataaaaaatctgctggtgtttttctttttgtgtgctcgtgtattttgggaggattgcacaggaggaaggcggggtggggggttgagggacgcggaggcgggggcggtggggaggggcgcctcccctcgtccctgccccccagcgtgcctctcccagctgcagccttaagctgagacccctggccacagcgcaggaaagaaacttattaatgaaggagctgggtctcttgcttcagcagctataaacacagcgaacatctggagagtaagtctccaggcggccagacgctgagaacaacaggctgcctccgcgcatccctcccccgcccggtcccctccccccgccggcctgcagcccccgcacattcacccaccagcacttcattcaccgagggcggcggggtggggagaggagggctgacgccaggcggcctccaccggggtccccagcccccgctccccccaccgagttcccgaagaggggtcagacagcttgaatccaataagaactccgtgccccagggaccttttcccaactcggaccaaatatttgtggtttgaaaaagttaagagaacttttttctccccagccccctgggactcccagtgaaatgctgttacttcctaggatttttgagaagaggccttggaggactgccaaagagcgcacgcatccccgttgtaattcactaaccccggcccaggtttctcccactcggttcccttcccttcagaggaactgcaggggtgttttacatttcggaaggtctttacagtccttcctgccatgggctgctggactctctggcacgtagcttctctttctggtcctcaccaggctgccttctcatttctctgtaaactgggacacaagggaaggaaaaattggcaggtgtcagaaaaccagtctggggctggatgaatgtgggcaagactcaggacttaagggtcgggcaccaggtcacttaaattcacattgagattgtggtgtaaggaaaaggtagcgtctgttgatcacatactatgacacttcttgaagtagaaatatagcactctacataatagcacaagactgttctaaatgagtgtaatgatcggacctgttaaaggttagagaacaagatcccaggtgtattcttgctcttgccaccaagccccctaacccaggggtcccaaactctgggatctaatgcttgaagatctgaggtggagctgatgtagtattaatagaaataaagtgcacacaaaaaagtgtaatgcgtttcaatcatcctgaaaccatcccccaacccccagtagaaggaaaaattgtctttcaagaaactggtccctagtgccagaaggttggggacagctgccctaaccctttgttaggactcaatacctttccgcttatactcaaaaccttaaactgaaagtgatggtactctgaatatgatacagcacaagctggaagagctaccaaggtgatgaggttgggggtgaataagatggatgggacaatgtaacactggcaaataggagcaaattcaatccatagccagataaatacctttcacttatggagaagaggttcaggcatgggtaaaaaactcatgatcagaagagcaaagtgatagagccagagtgcaggctagtttttgcatatggatgctcttcctaattcactcctagctggaggcagtcctgctgctctttccccaagcctctcctagccatttttggtcctctcagagatgggatgcaggtggggaggtttcctgcatcaagcttctggcagtgctattccctggaagcagtttgtccggcagcttggccccaactgtagccccttccgtgaaaggctaaaacctgagtcaggcttacagcttccctcttccagacacaactaccaagtaggattctgaggtcaaaattttccctgagaggaatggtccatattactacatcccagacaaatgtacgcatgcacacccacacacacaggatcagaactgttttgaagaacaaagaacctagaacagctcctttcaaaaaaaacataccctgaatgaggaaagaacagatatgtgcagcagatagagtttaaaatatcatttttttaaaccacagggccatctgagatgatcagctgaaagaacaagactgctaggagaagaaacatttcagagcaaggtgaatctccatttaacaagtctctctggcattccctcgatattctcaacacttaaaagccaagtcagaggcatctgtttttcctgctgaaacttcccacctggttgtcgatagccctttccaaacactggtccaggtttgatctttcccagccgcctggccgtctggctcgggagggactgtgaactcagactttcagtacagtctcccacttgaacttccaaagtttatttgggaaagacactcttttattcaacccttttgctagtaaatgtattttagaaattttaaatactgtggcaagattcaaagtcacacacttaatggttaacctttatctcataaatgtgatatttcatctaggggtcatttcttcacatcacataaatgtagtctcatatacaaatttggataaaagttgctaagagacaaggcatgagtcttcccctctctctcttctcagtttccagggcatggcactggctaccaaaaatgtgcatcccatcactgggtcactttctgactcaacaatacccacacttttctggatgcttgggcacttcaggacaaagagttacagtggcaaacattcatatcgtgcttgcttagtgacggcactgctttactcttgtcatatattaacttggtggttctcaaagtgtagtcttcagaccggtaacagccgtagcaccacctgagactttgagagaaatgcaaattttgagccctaccctagactcactgaatcagaaaccctagggatagaacccccacaacctgcattttaacaagccctccggtgactctgaaacactttgaaaacactggtttagatgagaaagtggaaatataaaataagctgtctgaggcaacacatttaggaagggctgatgggcagatccaagcaatccggttctagaggttggagtcttcacctctctcctcaagaatgagaaataagactgggtagatgaggtttttactatgatccaggaccaaaaacattgcaaattgcatgatccaaaaagaaaaacaaaagcattgtctcttatcaaatcaaagaccacggtaatgaggccataggtccattcccatgagggtaagttaggtttactgtgttctgaacctgcagatgctttccaactcaaaacaactattttgcaaaagtgaactttggtcaaagaacacctgtgtaagtttagctgattcaagacagacccatccctgaaatgaaaaatgctttgataatatgtcactctgaaagtgtgtcacagtttctgatacacattattatcattcacggtcatcagagctatgaggttcaagtcaaacatggacagctatcagcggatgggagggaccgcggtcgtgtggcctgggtgctcagttgggtctctgatgtcactattctggttcccagtggaaaacaggcattgcatgactccagctgggtctgggcaccactctgagctcactgtctgtgtctaaaaatagtttgccatttctactccatcccttccatggggccatggatgggagctggtcatgacagtaagaggcagtgaagtgttagtgagttctcagcgacggggaacaagagactgacatttacaaaaatgcttcttgctacgatgattgagagaaagggctgagctggggggacaacatagaagaagggaacagagggaaggcagagccagtgggctccactccagtcagactataaacagcaacagacatttcagccgtgtctcgtgtaaggggctccattgattcaccaggctccccaacagagggatgaagagaggctaagatagaaagagcccattcattcatgcagaaccccactctctgtccccattggctgtcgctaatggcttcaggctgatgggaaggagggggggaagaggcgagcgggaggaggaggtagaaatgaaagaaaatgatgactacaagattgtcatgaagagatgtacagctgcacaggcaattgcatgcaaatgtggcttccctttttagctgtagagttaatgtcctcagattcatctctttttctctttcatgccatctgcccctccccttcttttcccttcccattcatctttcagtctcctgtcctagagttcctctgtctctctactaacacccacttttctatttccacacacctcttctttcttcccctttcaccagctcttctgtccaactaatttgtgactagtctggattgctgagcattctgttcccatcacctgataacctctcccctgctcacattttctctcagctttattctctccccctcctccctccctccactcttctcctccctctgggcctcagtcccttcggggaataggaacaacattcagaggaaggaccctcatgggtcctcgatggcccctcctgccgggcagcccaggcactgacagatgcgtagtcctggcagaagaagagcctacatcccttctcagagcacgaatgtgaaatggaagcagggttggggagtggctaggaggacgggaaggaaactgaagttataaataggataaaagaagatgaaaaaaaatggagagtatttttctctctctttttttcttagtcaacacatctccaaggaaatgtgctgcagctggagaaatcgactgctccatgtcttcatctcccttccctgtaaccccaagatctccttccaaaggacacctatcactgaggagggctggaccactgcccagaaataatcactgcaaccccttcctttatctggacagctcagaaggcaaaggaggggctgggaaggctcaggggttctgccagatatttccatcggaagaagcctaggatacagggaactacagatatcatgttcgccaccaaagcaccactgcctcatagaagcgggctagagtttccaagctgcagttggagacaatccaggtcattttaggattggttatcatatgcccttatcttcccatcctacccaagagtcaccagtctaggtgactccagcttccttcttaaaaaggtagactgtggaaagtagcttctacacgactgtcagtcctagcatttttaaaacaacttccccctaagcaacctaaatgtccatcaacagggaatggattaagaagatgtggcacagatatacaacggagtattactccgccatttgttgtccagtttctcagtcatgtccgagacccctggtctgcagcaggccaggcttccctgtccttcactatctcctagagtttgttccaactcatgtccattgagtcgatgatgccattcaaccgtttcatcctctgtcactctcttctcctccagtcttcaatccttcttagcatcagggtcttttgcaatgactcttagccattaaaaagaacccttatggcagaaagtgaagagctaaaaagcctcttgatgaaagtgaaagaggagagcgaaaaagttggcttaaagctcaacattcagaaaacgaagatcatggcatctggtcccatcacttcatgggaaatagatggggaaacagtggaaacagtgtcagactttattttggggggctccaaaatcactgcagatggtgactgcagccatgaaattaaaagatgcttactccttggaagaaaagttatgaccaacctagatagcatattcaaaagcagagacattactttgccaactaaggtccatctagtcaaggctatggtttttcctgtggtcatgtatggatgtgaaagttggactgtgaagaaggctgagcgctgaagaattgatgcatttgaactgtggtgttggagaagacttttgcgagtcccttggactgcaaggagatccaaccagtccattctgaaggagatcagccctgggatttctttggaaggaatgatgctgaagctgaagctccagtactttggatacctcatgcgaagagttgactcattggaaaagactctgatgctgggagggattgggggcaggaagagaaggagacgaccgaggatgagatggctggatggcatcacggactcaacggacatgagtctgagtgaactccgggagctggtgatggacagggaggcctggagtgctgcgattcatggggtcgcaaagagttggacacgactgagcgactgaaatgaactgaactgaactgaatgtcatttgaacaacatgggtggacctagagattgtcatactgagtgaagtcagacagagaaagagaagtatcatatggcatcccttatatgtgggatttaaaaagaaatgagataaatgaacttacaaaagaggctcacacacttagagaaggaatttacagttgtcagggggaagaatgggggtaagggataagttaggggtttaggatggacatgtacacactgttgtatttaaaatggatagccaacaaagacctacagtatagcacagataagtctgctcaataatatatggcagcctgaataggagggaagtttgggggagaatggatacatgtgtatgcatggctgagtcccttcactgttcaactgaaatagcaaagcattgttgaattggctaaaccccaatacaaaataaaaagttaaaaaaaataaaataaagaagcttcctcctgagattcttaaaaatcttcacagacattatctcattggccctgaagtaaaaactcttacctttgagaaacttgacaaggaggagattgaaaaatcatcttcacttatttatgtacttcttagctaagaaaaagatgggctgtgtatttttttgatgaaaatgaggtattctgattttaagctacaagtgagtgtggagatgacctcagctactaagaagatgtattaagtaaatgtaataaactgtaaattggtagcacgtagaagcaccatccaaagctgaaagcattaaagcaaggcagctttaatctctgttgcatagggagatataagacttcaaagcctagtggtgtgaataggattgaagaattatacaaatatagacaaaaccatttcgatcttttgcttacacaaacaaaatctttttctttttttttttttggtttagatgtttaaaggatcactttttctcatctcttaaaacgttaagtccttaagtctaacctgtgaacaactatagaatcctctgtgccgcctcatgaaatgggtgaatagccaagacctgtgtttatccttggggggaactgagatgccaagcagaaagtgatgacacaaatgctatcctgtctgagatccgaggtagtgccaaagaacacctccaagatcaagggttgctgagtcaagacagggaacacaggggcaacttcatcccacccaggagaggaacctggcaactgcagaccagctcccatccttctcagcccccatcaagggttcccacctctcactctgtgtctgtcggtgtatttcaggtgaaagatacaatgtaggcaacaaaacaaacatttcctttatttctccacttttataaaaataacttgccatacaacagtaaagagatatggaacaaaaaaagttgcatttaagttagtttccagtggcttttcacctatgcacttcatcagaacagaggatgaaaaatctgtctgcaataccgaagacacaggagacataggttctatccctgggttaggaagatcccctggaggaggaagtcacaaaacctactccagtattcttgcccgaaaaatcccatggacagaggtacctggcgggctacagtccaaaggatcgcgaggagtcggacacgactgaagcgacttagcagagcactaaatacatacacacaacatgtaagcatcatgaaatttcttatgctaagaattcgtcctgggagaaaacaaatgcagctttttggtatctggatatattaccataacctgatctcctgaaaaattgaacttactgtcaggaccaatcatttcaggatccctaaattaaggttttacattttgtatcaaaaataaacaaaaaagttagcaggttagcaaggaccaatggaatttgggagaaacacaatgattccggcacaatagaactggggtatggactttgaacttgtctgctccttgggagagtggatcctgttcaccagagggcagcagtgtgagcagcaagtcaggactgaaaggaattctgaggagaggagctcctatgaggaagagttgaggagagaggcagcagatgaggagaaagaagccaaatgcagagcagggcagaacggaagaggatgatggaaagagaagacaaatgaaagaaattacatcgtgtaagaagaagattgactacagagaacaaacatatggacaccaaggagggaaaggagggcgggataaatttggtgactgggaccgatatatatatacacactgttgatactatgcatgaaatagatagctcaggtggtgaagaatgcctgcgatgcaggagatcctggttccattcctgggttgggaagatctgctggagaagggaacccacgccagtattctggctggcagaattccatggactgtatagaattccatggagacataaagagtcggagacgactgagcaacttccactttcacttcacttcatgaaataagtaactaacaagaacctgctctataacttaggggattctacacagtgctctgtggtaacctaaatgggaaggaaattcaaaaaggaggggatatgcgtatatatatggctgattgacgttgccatatgatcgggcttcccacgtggcactggtggtaaagaatccacctgccaatgtagctggattcctgggttgggaatatcccctggaggagggcatagtcaccactcgagtattcttgcctgaagaatcccagggacagaggagcctggtgggctacagtccataggtcacaaagagttggacacaacttagcacgtgcacacacacacacacacaccacacacacacagaaactaacacaatactgaaataaccatgctccaataaaaattaaaacaacaacaaaggctgactagtccacacaccctctgtccatccggttcacacttcataattaaaaaccttctaggtcctttgttaacagccaggttttaggggttaaaactccagacaggcaaagtggagagaactatatacaaaatgaagatgtaagtgaagaaacctcacgtgggccctttcctagagtttagtctttctgtcactggagaataaagtcactcaaaatgactgaaaagttctgggacttcccatagaacaagaacatccagcacccacataagccagggccaccgtgatgacaactgatgcaggatgcagcccgcatccagttgccttgggccctcaactccatcctcagtctcagcctccacgtatgttcctacctgagccatagtgttcaaggccggtgggcacttcctgagtagctgtctcttcccagaacgggcagcaagctctcggtggatgatagaccgactggaaaccacaggccatgcgggggtcttcgtaagagttgagaggtccctgcctctgtggccaggaaacaaaaggaaatatattaagattccctaatggaacagtaactatcatccataaggaagaattattcatagataacaaaagactattttttaaactaacttttattggagtatagttgctttacaatgttgcattagcttctattgtacaccaaaatgaatccggcctatgtatacatatattcccttcccttttgtatttccttttcattcaggtcaccacagagcactgagtagagttccctgtgcaatacactatgtagaaccaaatattgatcactatccttccccatctgaaaaaaaaaaaaaaagacaggaatgggaaaggtttctgacttggactgctgctgctgctgctaagtcacgtcagtcgtgtccgactctgtgtgaccccatagacggcagcccaccaggctcccccgtccctgggattctccaggcaagaacactggagtgggttgccatttccttctccagtgcaagaaagtgaaaagtgaaagtgaagtcactcagtcgtgtccgactcttcctcaccccatggactgcacccttccaggcttctccacccatgggattttccaggcaagagtactggagtggggtgccattgccttctccatgacttggactatgtatacattattttcatgcatttcctcaaccatttgaagaatttttaaaattttcaaataaagatccatggtaattgcaaggcagaaccttggtcatctttatataatcctggcttttgtcttttattttttttaatgttaccttagtctataaaaacaccatgaaagatattcttataagacattgcagtatcccagaaccaataggtgacaaacaccaaagaaagacacaaaaaatgtatttacctaataaaattgctcttttttagttaatcaatgtgcacaagttttctttctttgtaaaatatttgtttatttggctgtgtcaggtcttagttgaggcacatgggattttccattgctgtgcacaggcttctctggctgcagcacatggacccatgtgggatcttgtttccccgaccagggacttgaacctgcatcccccgcattggaaggcagatccttaaccactaggaagttccgtgcctaagttttaatgatattgatagctagattagaattttcatttttcccatttgggcacttgttcagttctcttattagtttttgtaaaatccataaaatatactctctacccagtactctctaagaaggactaatacagtatgtaggagaccatggtttgcagtgcttacggccccattctttgaagccagggatacatggattcaaatcctggctccatcacttactaacagggacctaggcctgttcttttatctaaacctcagtttactcaactaaaagatgggaaaaataataccttcctcataagataggaagagtgaatgaaataatacgtgtaagaaaacaatactggataaagtttactccagggctgttcttcttccaagtgggttaaaggtgctgagaatggagtaagaccctgggactgaatgggttcacaccgacttgctatatgtgtgggtgctaagtcgcttcagtcgtgttcgactctttgtgaccctgtggactgtagcccaccaggctcctctgtccatggggattctccaggctagaatactggatttgtaggcaggttctttaccactaacaccacctgagaagctccaagttactgtatatcaaaggctcatgtccttggcttctgttaccaggcagctcttgtgagagccacgtgaatataaacagagaaatggagtttgggaccaagattgaggaaaatcatcagcaagaacactcaactgagcttccagtcagcaaaaaccattttgctgacatcgtattttaacactgcaagctcttgcagcaactacagtaaggttttcttttgaaccccaaggataagcaggtcttcaacaattctttacaagagaatcaacttgaagtacattttctaaatgagctgtgtgttctcgaaatccatccccattttttcatatttctctagagtccttctcaaaattcagtttcaagtatcagagttttggaaacagggtctgggtggggaaatcgtgtcactaagtggtataagggaggactctaagtgacctggccctgtcctctttaggggcagcatgtgcatggtttgcctaaccagaaagtccttgtaagaaggcagtgggtggttccagtaggatctttgtagagaggctctgggtggtttggtccaggccctgctaaagtggtgggaacaagaagagaacttggactcaagggtcaaagttaaggttttctctgctaaggaaagaccccagaaggtgaggcatggtttgcaaagaggcattgaaggaaaacgatgagtgccctatagagggaagatggagggcaggggtaggtggcgagttatgggtaagcaagacgatattgggttctagacctgggccatcaccacgtggctgtatggtgagtcagcctgcagccttgacaaacaacgacgtacagcagctccttgagttttgtgattggctttatttttagtggagtgcctcctgcccccacaccaggttccttgttgtcagggagggttcatttattatttgatacaggaaagtctatttttaagatatatttcctccttaactgtcctcagcggtgccaggggaccctatttttaagaacgagaaggaggtaatgcatcaaacctaccatgaaccacaaacatctttgctcacagagactcctgggagcatcatgacacttgttacctagacacctgcctttttgtttgatatttcacaaactgacttaatacctatttcatagagtatgagaatgacatttttactcaagagaaccacagacccagttccaattcattgtgaaaccttctcagttgaggagaaataagcaggttatcaacaggtcagaaatctgggcagcaaagcctcacttccatgcttgaaaaagggcatcacctgaaacaagttcaagtacacaccttcctcctggctcctggtgaatggaggtgagttcaggagatgccagccaccctcccaaccctgtcatagtttagagaacccatgtgatgggtcctcagtcattcatcccacaagtgattactgaaaggaactaatgtaggtcccacactgctccatgctgatcagtgagctaaacacggtgaagagaacagtcacaattaaccctcatagctgtgcaagattcacgtttttgtctccatttcacggaaggaaaaaactgaggttcttcagagagcaagtaaacattcaaaggccacacagctagtaaaataatggagatagaattccctggtggtccagtgctaagactctgtgccccctctgcctggggtccggattcgatgctacgacaaaaatcgaaaatccaatgtgtcggaactaagacccggcacacccaaataaataaataaacagactttttttttttaagagagagttctagctgagacctacttgatttcaggctgtgcgccgtgaatcttctgtggcctgggtggctcgggaagggaggccgctgtcccatgacaaagtactaaatggattatgacaatggatggtcatgaaacaaatctgtatcacacaaccagtctatgccaagtattatgttagatgctaagaatgaagtatgagcaagacatgaactttaccctctgaagtgcacaaaccagtaaacaggaaattacagtgaggggatgtaacagagtgaagcaccgatgtgtacgggcgaggagagtggcagcaggtaagacttcctggaggaagcagactaaggtaataactgaaaagtcaagtaagacttagcctagactatttggtgaagggtctagagaacaaaagataacattcctaaaagtggcaaggaacacctacacctatgtaaggaagagtaagaaagactcagaatggtgacagagagaaagacgtggtagtgagaagtaagaggggaaagcatgctcttggcaatgaggatcctgcaatggagggcagttagtaacaatgaaagctggagggacagagttgagggtcatgaaaaccagaccagaatctggctgcaggaggtgttaaaggtagtggcatgctgagtcaagatgttctagaaggacacatttgatagggctaagtaggacggagtgagcaggagcaggcgaggaggctgacaaggcagcagctgtgccctgcagagccatactggggcctcggtacaaaggaagaaatcagtattactgatcctaactgtatttaaattttttatttcttataataatttttgcattcattttgatggtcagaaatattatattcagggaatattaatcagagagagagctatctcagaggtccacagctcagcaccaaacctggctctacccaactgcctgctgattccacggctgaaaacctcaggccaaacaaatagtgagacaagaacacagtcccacccagaaaaaaaaaaaaaagaaatattacagtcagatttgtttagcttgagtaccgagtccgggggcagcccttaggctttggccccatgtgaactgagtggtaagccagttatacagtcaaatgctctatcactgatctccacccccaacagtacagttatgaagagttgaactagggtcatgagtgtagaggtgaagaggaaacaagaaatagaagatacgttttgaagaaagagtcaacatgattttatgactcagaggaggtaaagaaaagcggtgaggggcaacgatccaaaaaaatgcttaaattgcttgcttctataatagggaaaatggtgaataggttagaggttggaagaaaatttcactcttggttgtgctcagatggagagacggcagagcgactagggggaggttcccttggtggctgcatgacggaacacaggaaaggacagaggtgtatctataatcatcaaggatctagttaaagtttagagtcagggaaaatggaaggtaaaataaaaaagagaaagggtcagaattggctctgccacaccagccagcagtactatttctgtgtacctatccaaagaaaacaaaaacactcatctgaaaagatatgtacatcccaatgtttactaccacagtatttacaataaccaagatatgaaagcaacttaactgcacactgatggatgaatggctaagaattatacacacacacacacatatacatacactggagtattattcagtcatagaaaaagaatggaatcttgccatttgcaacaacaggaatggacccaaaggatatttgctgactgcaacaaatcagacagagaaatataaatactgtgtgattctacttatatgtgggatctggaaaaagaaatgatacacaacaaataagcagtaacagaacagagactcacagatgcagaaaacaaactggtggtcaccagaggggcgcgagagatgggtgagataagtgaaggggactcagagcaattatcagataacaagtcaggagaatgtaaagtgcagccaagggaatacagtccacaacattataatatctttatatgggaatggttattagacttaccgtggtgaccttttcatgtgtaatgtataaaaatatcaaatcactatgtttacttgaaattagcatcatattgtaattaaattatacttcaattttgaaaaaaaatgggtctatagagttgccggccattgggaggagaaatgaacgggaaataacaaagaagggtcagttgaagacacaggaggaaaaacaccaaagtgttcagtgaaaaagggcagagcttcagaaagcggacactaagaagagggtggtatccaggcagtcttaaatggccatgtgctcctgccccgctctgtagcaatctatgatgagcaccctcccccaaccccagtaatccttgtggaggcttcagaggatatgagcctgcaacctaagtgcttcacttttctgatcctggaaagaaacagcatgaagttctgaagtctggaatctactaggatgatggacacacacttgttcctgctcaaagataaaccacccctgacaccaccaccatagtgaccactgcccccttctgaagtcagggcttcatctactgtattccatcactctcactccctacgcttctatcagggacctgtctctcctccccgctcacccagttccctcgctgtggctgctctccacccaccttccagccctgccaaacctcacagcattgcttctgctcagagtcttcctccccttggcccccaaagatccctacaattaggaaagagggaaaagggaagtagattttcaacactaaatcaaaaacagatggaggctgcgtgtctataggagttcgttaattgtccaagtgtttgctcctcagacccttcctgatctttcttgtgtgtgtgtgtgtgttacaaaaaattctgtcagagtagatctgtcttttctttaccaaactacacaatcctggggtttagccttagtaccataccataagcatacaagacacataaatacttctagatgctgcaacttaaaataaaatgtgtattcccagaggcaaagctgacttaactctgaatggatgggtaagggagtctacaatccacaggagtaaatctgtatcattctaggcctggcattgatgttcatacgctccagaaagaagatgagagactggaaatcaggaagcctgggtttgagtcctgctctgggcttccctggtggctcaactggtaaagaatctgcctgcaatgcaggagacctgggttcaattcctgagttgggaagatcccctggagaagggaacagctatccactccagtattctggcctggagaagtccatggactgtatagtccatggggttgtaaagagttggacactactgagtgactttcattttcactttctggtcgatataatcaaagctatggtttttccaggaattatgtatggatatgagagttggaccataaagaaggctcagcactgaagaactgatgctttcaaactgtgatgctggagaagactcttgagagtcccttggactgcaaggagatcaaaccagtcaatcctaaagggaatcaatcctgaatattcattggaaggacagaagccaaagctgaagcttcagtaccttggccacctgatgtgaagagttgactcagtggaaaagacactgatgctgggaaagactgaaggcaggaggagaagcggacaacagaggatgagatggttggatggcatcaccatgagtttgagcaaactctgggagatggtgaaggacaggaagcctggagtgctgcgcccatggggttgcaaagagttggacacggcttagtgactgaaaaatgactgcccctaaggagctggttagtctccagcctgtttcttaaccttcttaatcctctgtttcctgaggacactggccccaatgatcgccaagttcctttgcaaatacaagtctcatttttgctgatccgtccacattctttctcctgaccttgtgacggacaaccttcatttgataaataacgacgccagggtgggaaaacctagagcaccagaattcgtcatcatttagatgcatgccaggctacatccccttcaaatgcatgaacatcttcaagtcgttcatcttcattcttccctggaatatgctcacacaccattttgcccccacatcccctggtttttcagtagagaaaaacgaggttaggaagtacctagctgctgagctgtccaggggctctcacatactaggtgcaaatttgtgcagtaagtggggaatttctcatcctaaaccctttcactttgttgcaggcagatgccccctgaagccagcctgaccaactccacagacatctcattgcgtctgagactcctcatcttcagaggatgtcagaccagccaacacctctttttactcacagagaagtgctttcagccgccctggggaggggtttggcaaactgtatctggccctcagaagaacactgggcctcctctgtttcagggggacacgtgggacctgctcactggagaagggaaggaggcaacacggaaacgccccccaccttcggctctcccaccggaggggagggggccagggtggtgtagccacaggagaggcaggaacagacaaaataggaaactctcaaagggcaatttaattttagattcaaggccaggaaattgttttgaaaacaataagagcgatgggcttgggtcttggcaaaagggcaggtcggactactgcagattcctgagagagaaatgaatctgaagcacagaaagagcagagatgggactgtcaggttccaatctccatgagaagctgtgctcagcctccaaacgggccacctggaccacatgaagccatcttgagatgccccccgccctggggctgcagatcaagtcaggggagggagacagtgaccaagggtgaagctcctcacaccagtctgagaccacagtcccctccactcaaaagacattctcttgctgagaggtagcgggtgacatcctgtgttatccatcaacttctactcattaacgggaagccttgagactcccagtgactccatggggtgccagcctcaggcatccagcccagagcttggaggtgaagggtgggcctgactcagagcctcctcacagagggggcgaacctcccatggagaaaaacctggacaggaatttcaatttgctcagaggtctacaaaattgagttctgttttattttttcccctaaaccaaggagggtaaattcaccatgaataaagcataccgacacatcagttcagttctcactcagtcgcgtccgaccccatggactgcagcataccagacctccctgtccatcaccaactcccagagcttactcaaactcatgtccatcaagttggtgatgccatccaaccatctcatcctctgtcgtccccttctcctcccaccttcaatcttcaatcatacggactcatgagttggcataaattcttatccatccccacatttcttaaaaacggtcaagagggggacttcccaggaattccctggtggcccagtggttaaggttctactttcactgcagggagtctgagctcaatttctggtcggggaactaagatcccgagtgcggtgtagcgaggccaaaaataaattaaatttttttaaattttatttttaaaaagatggggacttccctggtggtccagtggttaagacttcacctttcaatgcaggggtacaggtttgatccacggtcaggaagctaagatcccacatgcctcatggccaaaaacccaaaacataaagcaaaagcaatattgtaacaaattcaataaagacttttaaaatgctccacataaaaaaaaatctttaaaaaatatgatcaagatgcacttaatgataaggagtgtcccaagccaggagccggaagatccagaccacactccatcctttaccagcctgtaaacttgggcaacttcgtttactctcttaggacctgaatttcctgatgctgggagacggtctcaaggttatggtctggctctgaaattctctaacttgtgctgactgaaccccatatcttagaaaatccccactttctaagatgctggaaaaatcttttttccttcacttcttctgactatcactaagaattatggttataggatttcttaaacatcatattccagcaacctccccagaggtaaagctaacaccatcccaagcaacgagaaaaaaaaaatgcttttctggtttccatttacattctaaatttctttttctgtcttctcatttctctaatccaggagaaggaaatggcaacccactccagtattattgcctggagaaggccgtggacagaggaacctggtgggctgctgtccatagggtcgcacagagtcggacacgactgaagcgacgcagcagcagcagcagcagcagcagcggcatttctctaatcagggattccttatccattgctctccaggatccccagaaagaagggaaaggtatgtatgctaagcttcatagaaataagaatcagcccttccagcttcccagaacttcaggggcaacacagacgtccctgtgaacacatcctacggcatgtggggtggaggtgaagagtgcgaacagcaaaggctaagaagagaattgcttcccaaggaagcccaattaaactgcaattactccagataagagaaccaagtctgtttacacaatggggctgtaaaccaccagcccattacaagagaactttgatctgggggcaggggagctatttctggtccagggtagagaggaagcagggaggtttctcagtaagagaaataagaatggctccactcaccccaaagccccatcttgttctggctgcaccctcgtaaggacaaaataggtggaatcacctccacctccctgtgttcatctcacacaatcgaaaagtccagagaaaaacagagaagaggtggtagacacagggaaagggaattaactaaggtcatatttctggctggtgtcacagcaacttgacatggtaagtataccctgtgcctgttttacagatgagagtactgaggttcggagaagtcatgtgcccaaggtcacgtggctgaggagtaataaacagaccaaaatttaattcaggtctttctgactccaaagcctaagtgctttccatgttattggattggccaaaaagttcctttaggtttgttcataagctgttatggaaaaacccaaaggaactttttagtcaacccagtgtgtggccaggctatgttccacagctgtctggcccaagccataaggctcagggccttccatgtagtctgacactctgaacagtcacccttgcctggcatattattaaagagtaagtccccgacataggaaccttcaagttgtgaactttcaaagacacaaatgtgcattccatcatcatcaggtgtgagtgacgttacagcttgctccccccgaccctgtctcctattgcaatatccccgctcctctccatcctccaggtagtgactcttcctgcctgttcacttgatgccagccctcggatgtcagctgttgtatggtactgctgtactttccagggtactgcactgtaaaattaaaaatgttttcttttttgtgtttgtgttttatgtattaattgtatgagaagtattataaacctattacaacacagtaccacagcgtgaattgtcttagttgggtacctgggctaactttgttggacttatacataaattggacttataaaggcgctctcagaacggaactcattcgtatgttgggatacttactgcattcccaaagacctgagctccaagagtaggtgtgtgggcagttgtctattccttccctctgaacagttcaaggtgcttcctaagctcgagtgacccaaggacctcctccacacgctggtgagggaaccaaggacagggacatgcttggtccaaaccaggggcagcccgccccgcccattcctgccctgcctcccgccctgaaagctcagcgatgtgaaggggaggatgacgcaggagaggaccaggggtgcgaggaacttccaggagcaaggcagcaagctcttaaccagcataacaggaaggagtgcttcctcccactggatgaaagggtccctgacacacagcccatataagtacctgcaaacgtcaccccctcccacacaatggccagacaacttccagaagtgtcgtttccctgcctcccccgctgtgacatcacttctttcatgaaggttttccaggaggctgaccttccaaaggggacaactcgtgtcctgctttgcacaaaggggcctcgaggcagataatgtgtgttctgcatacaatggcccttacccgagggatgggatgaattttgcaactgttgctgtgatcattttaagcctcctcctggtacagcaaataatcaaatcatactaatgccagctccaattctcagtcaaggactctgagactgagtggtctttaagggtctagaaaatatttatgtcttggtttagaagattgtttcttggacaactaaagcagtctgtttagcagaaaccctcgtttctgctgaatatagtctcaccttttttttttcctaagagttccctttcaaacacaaggagttacactcagtaccaggcttcccaggtggttcagtggtaaagaatctccctgccaatgcaggagatgcaggtcaaaaagatcccctggagaaggaaatggcaatccactccagtattcttgcttggagaatcccaaggacagaggagcctggaagctacagtccctggtcagacacaacttagcaactaaataccaacacacagtactacccctccttcaaacccaatcttgtgtccattctagagcacaccttctcaaccttggtgctactgacagttgaggctagacaattctttgtcatggggaattgtactgtgtagtgtagaatgcttagttgcaacccagacctctctcctctggatgccagcaacatcctcactccccaaattctgaccatcaaaaatatcaccaacaaaatcacccctagatttaaaaaatccactagttttccttttacccctcaaacttcccattcggggatagcttctcttcctggtggcccaggctaactaatgcagagatcagggtgccaggcaggaggacttggttgattggattaagtacaactgattgagccccagacgacaagactccaacagaactgagaagattcagatgcctgggacgttcacgttcacgttctcgtctggtaaagttcatgaagctgggctcactcctccaggagatctcagattgggattgaaagtataaggtttgctagtttttctgctaatgcctagagcttatattctataggtgatttaccaattctttcactgtcatagcccagcctgaagttgaagattatctgtcagaactagtacactgaacttgagcttggatccatcaactttatttatctaattttttaaataaagaagaaatagacgaagaaggcagaggacttcctggttgctcagtggttctgagaaatttgcccaactagctccagtggtagagaaactgagccccagaaagaagttgtaagcgctagtactgtaacaataacatagcaattcgtttacgtaactttctacttttacccaggcaactctgaaatatcgtattgaaaaggatcccaagggttgataatgtttttcagatatagctattgggggtggggataaatgagttctttgttttgaaaccagtggaaacaattcaaaatgcattaaaaataccaagtgtattcagttgagggtggggtcttcagttgaaaatcacacttagagttgttttttagtttttttcaatctcatacaatttccagatgccctgtctaggataacttaatgttatacctgcaacttatgtacttgtactgcgatttatttcagtgcctaaaatataataaacacaaatttgcatggtattgctaaacaagttattaatcttatttaattggattacaatattggcaaagagaattaacataagctgcttttaaatccacttttccaagtcaatgacacagtgtgccctggaatcacagtatccttatttaacaaatcttcacactatcatctttaagaaagatttagtgtcatttgtgctgaccttagatgataacttctttgtgagaagcagaagcagtcttttccctggccaagtctccagccatatggaccttaacaagtcccttggcaatttctactaagcagaatggagtgatttttggtctgaacttgtgcgtgtgtgttttaaatgtatttctgatgtaaattgtactctaaacatttccctgattctaatttttaaaatataatgaatggtgtttaaatggaaacagaagccacttaaaaaagaagaaatatgtgtcacagaacagtcagggaagaaagatgtattcatcgttccgtgaatgtggaatagctttttaagtaattattttcctaatattacagatttaaacacatcaaatcttttgacaattacagtgaaaggtcatggaaaactgaagggttttcagtcaaaaccaaggttaaaaactctgcagaggaggcagaaaagcattctggtcaattggtgtctatttagaccgacaaatgtatttagaaggattaacgctaaacttatctgtccatttccagagtaagtaataaatgagggccacccctgtaaaaatacacacagaatttagaatcaacagttaatgattcatcagctgctattaaaagttcacttaacagtggaattgatgaatgacggcattttgggatctctcacacatcaaatttataaggaatttagctaaatatttctacagatcagcatgtaacttgggtaaaagccttcttccctaagagcaaaaaaaactttatttaaaaaggaattttaaaattcctcttacccctctttctctaggactcaggaactttccctatcaacttgtcacactttatttccagtttcaaattctatgattagaaaaacttgtatactttagcttttatgtatgaggaccaaaacaagctaaattatgctaagaataggtctaaggtacatcagtgtgccaaaaatcttcagcaaatgaactgaactgtgaaaaatcacctggctttaaccattattcaagtttgagtcgtattctctgcaagacaagcatgctaaaaaatcttccttagcaaatccatcagtcttggatgtttcactttatatggtgatgaaaagacagataatctggcaatgtagtccctccaaaagatgtaaagctgattccagcttggagttgggttctggctgcttctaagagagatcagagagcaggagagccagggagggaagggtggggcctgggaagggccgaggaggagtcctacttaccagcactgcaggtcgagctgctgaataggtggcagggccactcactgcagaatccacaaagtagctcatcacgctgtcagcacctgcgtgggagaaagcactcactgagctgctgggcaaagaacatgtatggatgagaaaccaaagaaggcctcggatcagatagccttagaagcatcgaggtcacttgtttgtgttacggagaaagaaatgaaaatgtagaaaaacaaagagggagtttccctggtggtccagtggctaagaatctgccttccaaagtaagggaagctggttcgatcgctggtcgggaaacgaagatcccatatgcttcggggccgctaagccaaggcaccacagctaactgagcccgagagctgcaactaagacaggatgaagccaaataaataaataaatatttcacaagataatcatagaaaaccaaagcgaccaacagggagcaaggccgactcctgactgcaagagagcctgaatggtggtgtctgaggcagacagttagcactcagagaccacagaaagaccctttagagggtttctgggcaggaataggt

SEQ ID NO: 109 - DNA, 2446 bp, Hippotragus equinus
  source 1..2446: mol_type = genomic DNA
aaaattttatatttaaaatctcccaaagtctctatacattttttctcacataaaactgcggagagtgaaccttcagaaaaaatgaaagttcagagctctaaatctactgagttttttttcttaaaaaaataaaacccccaaaaggaaagtcaataatttttatacaaatatgtacaaagaatttccctctcatcccccaggtactgagagcaggcgccgtccgggtacagttttggaaaaatcggttttcggttttacctgtacggaaagatactccccgcgggcgagcggtgagagtttgctccgccagcctaggtgtgcaggactgggtggaggccgccgaaggtcggtgtcgaggggtcgggggggaggaaatggaagagaggcagagtccaggattgggcaggggggccaggagcggggcggggcgcgcagcttgcaaattgcagtcgactctccaggccgctgccaggccccgcatcccggccaccggcgcgtccctattgagcgggccacttggcttgagcagcggcggcggcagcagcggcagccgaggctgcaggctgcagaaactgtccagagagcggtacgctcagaatcggcgcgatggtcgccgtcgtccgactcagtgaaagaggctggtgcgtggccatgagcgctgccgactgcacggtcccgggcggccgcaggaaggactgcgcggcgccaccgcctccgctacccgcggtgcccccagttaccccggcgcccccagcgcccgcggccgagctcccgggagtcgcggggccccctccgatgatattctcgatgctgaacgacggtcgcgcgctcggctcggacttaatgagcgacgccgtggtgcccgcggcgcccgccgtgcctgcggcggccgcggcggctcccaagctgttgagctgcaactgcaggcccgggccgagttgcgagccgaaggcggccgctttgcggcccagctcacccgagggcagcagcggcacggcgggcggcagcacgggggccacgggcggcagcgcgtacgggtactggagcgccgcagccgccgccgcagctgccgcggccgccgggtgcgagtaagcgccggccgcggccgcagggtgcaggccgtaggggcggccgtagggccccgcggcgccggccgccgccgccaggctgtaggcgccgaagctctgcatcatgagcgccgtctgctcacgcaggtgctcctgctggtggcgcttgaagcgtttccggcgccgcaggaagctgccgttgtcgaacatgtcctcggactgagggtccagggtccagtagttgcccttgcccgggttgcccggctcccgggggatcttgacgaagcagtcgttgagcgagaggttgtggcggatgctgttctgccaggcggggaacttctcccgatagtaggggaagcggttgctgatgaactcgcagatgccgctcagagtcagcttcttctgcgggctctgcaggatagccatggtgatgagcgcgatgtacgaatagggcggcttcaccaggctgttcttgggcttgctcggggccaggccgcccgccgcaccgctgccagagccgggcccgccaccgctcccgccgccctcctcgccgccagcgccgctcttgcagccgtcggcctcggatgctcccgcctcgccccctggcccggccccggctccagccacctctttgggtagtgccaggggctgctggtgtggcggctgaggctgcccgtggtggggtgccaccggcgtcacctcgtccgcctcgtccaggcgcagctcgggcggccccgcgggactgtcgcagcccccatcgctgtctttctcttccagcgcgtcgtcgccctcgcccaccacatcgatgtccacgtcctcggccgtcagcaccgtctggccggacatgtcgctggcgctgccgccaccggagagggtcatccctcctcggggttggtggcggcggcggggaaggagcggcgcgcgatgggcgtcttcaggggttgccgccaacctcaagaaaggggtttggggcgcccccgaaagacaggggattgggagaggggaggggggcgtaggtggtccggggccctcccggcttggctcacagtcggcggccgggcatcgcacgactcgggctgtgccgtccgccccccgtggcagcgctccgcaaactccagctgtccctggcgctcggtactaggcgctcgttgctgctcccggcagcggcctcggacccggcccgggcccggcagcttctctatgccgcgccccctcacttcgcctgccttcctctgcctccggcccgggcgtggggcgcaggagcggtgcaggcgggcgcgggacgcggggcgccgagcagctcaggaaggtgcgggcaggggtaaccgggggaggggggtgtcagggacgccgaagcccccgcagtcgaaagtcccgtt

SEQ ID NO: 110 - DNA, 33622 bp, Hippotragus equinus
  source 1..33622: mol_type = genomic DNA
ctatggcacagtccttcgtccacagcagtttcctgtcgtttgtcaatttatttctcctcctccaaacttagctgagtgaccttgcgcaagtcactttccatcgtaggcctctgtcaaatgaaagttggcctcttgatcgccaagcaatctcccaaagcggaatgggacacccaagttagcaggcccactttcttcccccgggacgaatggtacggtcccggggcagccccacccccccccctgtcgcggaccttggtacaggcccagggggccctccgaggcctcgccgggctgcccttgccccccgccgagttccgggccgtcccagcgccgctgattggctggagccgtgcccgggctgcgcggctataggtgagcccgggcggggatgggcggagcacgctggaggcccggcccctccccgcgggtcggacgctgagcggagccaccggcgggagggcggacggaccgattgacgggagggacgggaggcgagcaagatggcgcagactcagggcaccaagaggaaagtctgttactattacgacggtgagcacagtcctcgcgccgggggcggggccgggcccgagccgggcgggatccgggagagggagccgaggaggtctggggcgggaggctgaggcgtttgggaaaggctcagggaggaggctgagaaaggaggctgagggcagaggctggaaaaggctggggttgagggaggaggctaagaggaaaggaggtggagcttgagggggaaggctgaggggaagggggtcgaggcttagaggggaggcgggggcgggggcggcggggggtccgaggtcaggagggtcgcctggggaagcgtgaggtcaccttggtggggaattctgaagtctgatgtggagtttgccgcggcctcctagaggggaggctgagtccgaggcaggaggcagaatctggtgaagaagattgccgggtgacatgttctgctgagaatcctacgatctctcactgcccctttccttcctcatctcttctggtgagaggcctgcagggctcagcacctagaggtcaccagctcccctccccctgtctcccagcgggccctgcggttgctgctgggaaatgggactcctggggttggaagaagaaggatgcaacttgttaaaacaaactttttcgttgaacagaaatctgtggagcagcagcttcttctgttctaggtatcgtttaggggctgaggccaggggatgatcttgccaccttcctttcactcagtctggaggagcatatagaccatgacagaaaaattgctctacactatcaggttgggaggaaggacagctcagagtttgctgggagcacagcgaagtatctgcccagcctgagaagtcaggcaaggaggtgccatctcaattaggatctgaagagcaggagttattaactaggcccaggaaggataaagataacaacaagttgagaggtaagagagaggcgagcacctttgaaaaatggctggatgtacagtatgttggaggcataaatttgaaggcacagtattagaaggtgtagagcaggagtgagaaaaggtttgcaagtgatgaggctggagaagtaaatggggaccagatcatgaaaggctgggcacaccaccctacgaaagttggattatattcacaagttgggcactggtgagtcactgaagtcgtattcaggttagtgacatcatcagatttattgtaccttagaactatcactctgggacagaagttaaatgcatgaatggagaagtaaggaaaaaggcaaggatcccaagtatctagtttgggcagtttcatgctgaatgtagaaggccatttcagttgataatgttgggttttgttttttaaagaaacatttgttgagctgtctggggaatatcccaagtagaggtgtccagtaggcagtggccattcaggtctgcagtttagaagacaaatgggaaaatagaaaattttgatgattgtcagcatacatacatacagctgataattttagttacagaagaggatgcagttacccttgtatcccatatgagaagttgtatagggtgaaaagagaagagggtccagggtgggattctaaggaggtggactgagaaaaagtctagtgttcttcatgctctgtgctcctgggtgtgtagagtatatttgtacattagtcactgtgtattggaattgcccatttacttattcatactttttacagacagtgaactccttagggaaaaggatcatgttttgtctacctttgtatactcagccccccaaaacagtgcctagctcgtagtagattctcaaaaaataccgttcataaagtgaataaagatacagagggaatgacttgagaggtaagtgaaccagaaagtgctgggttacagtagccaaaagagggagggagtggccaagtgtcggcaagaactgtttcctgtgcagcgtttagaactgaagttaaattgctgtagactgaagggttgagtgaagaggagacattagattgaacttttttttttaaaggaaactttttttttttttatcataccactctgtgtgtagggtctttgttcccaaaccagggattgaacctgtgccccctgcagtggaagcacggagtcttagccactggaccaccaacgaagtccctttaaaaggaagcttgttgagacagagagaggcttgttgataaagaggagatgtagtggctgagagttaagtatgtgcaaatttttatggaaattagggagaggttgaagatactggggagaggggctagtaacgatggagatccctgaggagcgatcaggtgagatggaaaccagagcacacgtagggacacccctctttcaagaggaaattcctttgggataagaggttaagtggcaagaaaaaacatgtttgaaggagagaagatggaaagtggagggggcttttaggatgaagtaagaaaatattccttttcatgagagtcggggagggcagttgggtagaataggaatcttgaagagagatagctgttatgaaagagggagcaggtaaaaacatttgaagccttgctgggcagtggtgagggcccatttgaagctggagtctgtgacttcatagctttatcagtttgcacagtttggtgatctccacattctcagtttaaaaagagaaaaagtggaaagacctccatctttagagaagggtgatctcttcctttctgagaaactacttgtgagtttctcagtgaggtcactagtttgggattgaaatttggctctgctgctcaaaagctttgaagtattgggcaagtcattttacatttccaggcctcaggcctctcccctataaaatggagaaactatgagaacagtgtagaaagccctttttaataaagttttaaaaagtttgaaacagctggactggttccaggaccccagcacaggtatcagaaggatgctcaggttccttaaataaaatgacatagtacagtaggccctccttagcctgggttagtggatggggagggccaactcttatctataaggattatttttttttaagtctctcagcaacctgattaaaaactgttaaagacaggataatgtgtttgggccccaccctcaggtactcccttagctttctagataagttatctcaattccccaggtctaaaccttggctggattctgggttgataggcaggggagttactagggatcaagacctataccagagaaatgggtaagcaggaatccagtttgtataacatagcaatgaccttgtgactcttgactgcccagaaattgggtctgcatcttgaagacttggatttacctggtggctcagatggtaaagaatctgcctgccatgcaggaggctcaggttcaatccttgggtcaggaagatcccctggagaagggaatagctacccactccagtattcttacctggaaaactccatggacagaggagcctggcaggctatgattcatggggtcacaaagagtgggacacaactgagccactgacacttccactttctggaagtctcagctagtgccttgagaacatgttctacctaaccccgtggtggtaaagttgtctgaggagccctgggaacagacgtctctgactgccttccctcgtactgtatctcaaagtctgtctgtatgggactgttggatgccactacatgctgtgctctggcttgtgactgtctgagaacacaggcctcattaaaatgaagaggatgaacactaggtgttcactgggagaacactaaggaaatctaaataaagtatggacttttagtaaataattatcaatattgcttcattaattgtaacagatactttctgtttcactaatgtaaaatgttaatagaggaaatagtatagtatctaagaactttgtactttgcaatttttctgtaaacctaaaattgttctaaagaataaggtttatttaaaaagagagagggacttccctggtggtccagtggctgggactctgcactcccgcagggggcctggattcaatccctggtaggggaactagatcccacatgccgaaactgaagatccagtgctgcagtaaagatctaggatcctgggtgccgaaactaagaagacctggtgcagccaaataaatatttttaaaaatagagaaaaggatgagatcctaaatattcaactgtttagtagtttcctattatcacaggccatggagtacagcttgggttctgttggtggcattccccacagtgcattgctccctggaatgaagcctatttctggcactactaaatcattgattaagaggttgggaccctttgtttcattggtaatgcaagatctgcctcatcctagtgaacttccaaggagagaactttgggtgtgcaattcacatgattttgaaatattttcccaggaactttgtaccagctagactacagagccctttaggttaattgcaaactgaagtaggtacctgggaaacctgataaaggtgtttttttttttgttttttttttttaatttttgaccaccccacttgggcatgtctcagttccccaactacggatcaaattcatgcctcctgcattggaagcccagaggcttaaccaccggaacaccagggaagtcctgctgatacagtttttaacatcctggatttggagttagaagggtcgacactcagatcattcattagctgtgtgatcttgaggaggcacataacttctctgagtctcagttcgtttccttgaatctttattcagcctgtgtgatatacagggcatatatgtccttgccttcaaggagcaatcttggagatataaaatagatatgtaaataattgagatacaaaattaagtgccatatataaattgcatgcagaggaaaagacgatttattctgattatgactatggctggagctttagctgacctttgtagtgtgaggaggatgctcagagaaggaatgaaattccaagtcaaagaaacagtctgaacaaaggatactttggtatgaaggtgaatgcgttcaagaagctgataataatctagtgtgttcataacagagattggcagttcaactcagttcagttcagttgcatttgactcgttatgaccccatggactggactgtagcatgccaggcttccctgtccatcaccaactcccagagcttgctcagactcgtgtctgttgagtcggtgatgccatccaaccatctcatcctctcatccccttcacctcctgccttcagcctttcccagcatcagggtcttttccagtgagtcagttcttcgcatcaggtggccaaactatgggagtttcagattcagcatcagtccttccaatgaacattcaggactgatttcctttaggctggactggttggatctcttcacagtccaggggactctcaagagtccactccagcactacagttcaaaagcatcaattcttcagcgctcagctttctttatagctctcatgtccatacatgactactggaaaaacaatagctttgactagatggacctttgatggcagagtaatgtctctgctttttaatatgctatctaggttggtcataacttttcttccaagaggttggcagactttccataaagggtcagatagtaagtattttaggctttgtgtgcctgggagggcttcccaagtgcgctagtggtaaagaacccacctgccaatgcaggagacttatgagatgtgggtttgattcctgggacgggaggatcccctggagaaggagttggcagcccactccagtgttcttgcctggagaatcccatggacagaggagcctggcaggtcagacatgaccaaagtgacttagcatgcatgtgccatatgggtgagtttctgtagtaactatttagctactcaactctgccattataatgtaaaagtagtcatagataataaaactaatgggcattgttgtattccaataacatcttatttagaaaaatcaagcaaccagttaaataacccaaatttgcctgctaacgtctagagcagaatgtgtatgtatgtgtatgtggtatgtatgttggggtagggtggttgtggtaagaagttagaaacatagattaagaaagtcctattgaagttgttctttatgctttatcctatagaaaatggggaaccattaaggatttttgagtaaggaagtgatgttatcaaagctgtatattaggaaaataactggtgtggcagatagtttgaactgacagcagagggaccagtggaaggttattgctatggataaatgaagagatggtgggtttatggggcttccctggtggctctgccagaatccttgccagaatgctatggacagaggagcctggcaggttacagtctgtggggttgcaagagtcggacacagcttagcgactaaacaaccaaccaacctggtggctcagtggtaatctgcctgccagtgcaggagacatgggttcagtccctgatttgggaagatcccacatgcctcagagcaactaagcccatgtgccagtccttgagactgtgctctgtagagccggggaactacagctgccgagcccacatgctgcatgccttaaagcccgtggtccgcagcaggagaaggcactgcggtgagacgcctgagcaccacggctagagggtagcccccattctcctcagctagagaaaagcctgagcagcagtgaagaccagcacagccaaacaggaaaagaaaattaatggataagctaagttttaaagagatgatgagtttagtctttaatctataaaatgggaataatactccctgtcttaactattttccagggtatttgtgagaatccagtaagaaagtgattgcaaaagtgctttgacaccataaagtattctggtgtgcaggaggtgaactgtgacttacagtaattctgagtagtgatgattattctttctgttgtgggagtgaattccttggagacagtgaggtgagtcacctcactggccgctgttccccagtagctttggactgaccccctcacactgtctaatgcctttgggttccaagggaaaaaactgggctagacagacatccttaagtgctcatctcactacggtcccctgctttttgttttggagttacccttccttgatgtgggagagaatcttggagcctagaatgaaccagacagaatttgcctagaaatttgttgtaaaaatctgtgggttctcctgggagtgtgtgtctaactgtgtcactgatgctgtcactctttcgtcttcaggggatgttggaaattactattatggacaaggccacccaatgaagcctcaccgaatccgtatgactcacaatttactccttaactatggtctctaccggaagatggaaatctatgtgagttactgggagctttacccctccctagcctcttcagctctggttccccatgtatcattcattatctcattttttttcaattactcatttatgaaatgtgttgagtgactgttacgtggcagacattgtaaatggtagagattctttgttttttaaggtgctcactctagtgctggtgaacaacatgtacacaaattgtactagagtgtgtaagggcaacgacttaaaaatgtgtaagattcagaggtattgagatggaacgtggaagggagccttggaatgtttcctagaagtgatagctaagcagtgttttaaagattaaatagaaattagcctggagttcaggaggggactagcattctaggctgagggaagagcatatacaaaaaggcagaaaggtaggaacaatatgatgtgtttagggaaatataagtagtttagtgtgcaagtattgctgcagtataaagttgacaagtgtgagagaggggagctagagctggagaggtcagcaagaattggatgtgctatattaagcaattttgctgggccagggtcaaaaaatctagtccctaaaaactaagtgattggaactgtgttgaactagataccaagtctctagagttactagagagtatggactttctagccatttggcctggctccagctgatgtcttgtgccacatcttccagttttccctgatggctcagcgggtaaagaaatctgcttgcaatgcaggagacacaggagacatggattccatccttggattggaaagatcccctggaggaggaaaatggcaacccactccagtattcttaactgaaaaatcccgtgggcagaggagcctggtggactgtagcccaaagggtcacaaagagtcggacacgactgagtgaccaagcacatagcagtttttaaagagaagccagaactctggattattacatagagtctccaaggtttaaaatgttggcccaggtttgtttgaaacatgtaggaacgaaagtacatgaacatatctgtgagccaaatttggtccagagtttcccaatttgaacttttctggaggctgtaaaaaacaaaagaagtatttattcaaaacattttgtttatttgtttggctgtgccgggtcttagctatggcacacagcatcttccatcttcattgtggtgtgctggatctttagttgcaacattcaggatcttttacttgcagcatgcaggacctatttccctaaccccgggattgaacccaggcccgctgcattgggaacgtgaagttttagtcactgaatcactagggaagtcccaagtgaagtattttaaatgagaaataggaataggcatgcattttagaagcagggaggctaagttaggaggctgttgcaagagtccaaatgagaaaataaggaggggctggggggcctgtgttgccttatggttagagtgtaagggttgttgaagtctgtgctgacagcttacgtaacctagcagcagcagcatccttccccaccattccagagactgaaaggagaggaatcttctgtcccaggcgaccatgtcatgtctctcgagcccctggaggcagctggggaagcaaggagggaaggtagacggaggagcagatggaacttgggaccagagagcattttcaggtgtgaagggcatctgggaatgaaaaacataaaagatagcagaggtttttcagggactctagggaacagactagcatttagatacagagagggtacctgaatgtggaatagtaagcaccaaggctccacggggctgcttgttgcacatctcagccatgctcacctggcctcagtttgcctccctccctgccactccaccctcagaaccctccatttcagccagatcagattctgcctctttccaccccattctgatggagaggattatttactccacctagtcatatctttctcattttcaagagttgcgttaagcactgtttctttttttcattcaacagatttttgttgagtacttgttataactcagggactttattaacctccatgagtgatactgagatattaataataaaaaaagggtcatatctttaagtgagaggagaaattaattaacatttattgaagattgctaggtaccaagccagggctactgttatttacttaatctttatagcaaccttgatttgaatcactctccactgtgcctaccctacactctatttttattaaagaagaaagcccttcctagcaacttcctaacagatttccctttaagtctcattgggtcatttgccatacttagaccattcaccagcaatttgatccttggggctgggtatacccaaccaagttgagatctgttaaaaagagggaagggagagaatagctctttgggaagtaaccaaccatggctgataataggagataataataccttattggagattacttcatctgtgtggtattcttattgtaaactaaagtaaaagcccagtgtaatctcttggtgaaatcactagaccatgttctctttcatgtgatctttttccttttctggttctaccttttttttcccctcaaaaaaaatttttttttttaatcttttgaccatactgcaaagcttgtggaatcttagttccccgaccagggattgaacctgtaccctctgcactgggagtgcagagtctttaccactggaccagggaagtccctggctctgtgtctttattgagtatgaatctttagtcctcttctctcaacagcgtttctctgttgatctcttctttcttctcctttctctgggctatgatcctagcatccctttcccaaaggacaaatagccatttattttagtgtctgtcctgaaattaatggcttttgagagttactcctgaaagaaattccctagacttctcatagaagtttctatacctgaaggagacagattgaagtctttttcacacaatttcaccttcttgggttccttctccagttctttctctgcacatctaattaatctctcccagaatcatatcctcacttttcatccaggcatcttcctatttacataattaagaatcctgctctcttccttgccttggatactaattttgtatattcccaggcttcttactcattgccttctgttcctttttttaaatgtttttataaaatattgtgtagatatgaaagaatttttacaaaatatatgtaaagtataaagaatcacattattattattaatagtaccttgtttaagaaaaggaatatttccatgactgttagaactcgtctgtccttccctgattctgtcttccccagagttaacctttgccctgaatttggggtttattatttccttataattttaccagtatgtatccttaaatgatacatattttactttcacatgtttgaatgttacataaatggagccatacagcatttattatgtgacttgccttttttgctcagtgtgttcctaagtcattcatgttgatacatatatttattttcactgtatttcgaaagactataccacaagttgtctattttattggtattggtgggcttttggtttgtttctaggtttgagctattacaaacactgctgctatgaacattctttttaaaatatttattatttctggctacactagatgttagttgctgcacgcaagctttctctagttgtggcaagcagggtcacccttctttgtggtgcataagcttctcattgcagtggcttctcttgcagtgcagcgtcggctttaggtgtatgggctcagtagttgcggccctcaggctctcctgggctcaccaattgtggtgcatgggctttgctgcccggtagcacatggaatctccctggaccagggatcaaacttgtgtcccctgcattggcaggcagattcctagccactggaccaacaggtaagtcctgaagactctggaacatgtctcgtggtgcccatatgcttgagtttcaccaggtggtgtgctcggaggatataggcacacagtcgtccttattgctgtttggcatgcagataatgccaagatggtatttctcttgttactagtgaggttgaggatctttttacagatttccctactgaagttcccattcaggccttctgcccatttttctttttgattgtctggttattcttgtgtttctgttgtaattggctcttcgatacatagaatcaggttaattgtttttcttggcttatgaacatccaaagattcatgcttggccatcttttttaagaatttactttgtttattcattcactttacttaaatatttttttaatttattttttctttcttaatacttaaatattttaataatgcaatgaatatccatattcctacaacccgatcactcttctaaattttgtgattactattcttttgcttatcatattattatgtttatcatgtatatatgtgcctaaaaatatatagtatttatgtacttgttcttgaattttttaaaaagggttagcatgctatgtgtaatcttctgggacttggttttgtctcacaatatatataattactaaaatctatccaacttgttgcatatagctataattctctcctttttctctgctgaataatattttatcatttcagtatattttatcatttcagtatatcataatcttaatttgtatctctgttttttaaaaaattaatttattgttttggttgtgctgggtcctcattgctgcgtatgggctttctccagttgctgtgagcaggggctactctttcttgtggtgtatggacttgtcttgttgcagagcacaggctctaggtgcccgggcttcagtagttgtggcataggggcttagttgcccctcagcatgtggggtcttcccaggccaggggttaaacccatgtcccctgtgttggcaggcagactctctaccactggactaccaggtaagtcctgtatctaggtttttaatgttaggaccagtttttctgtgatactcttagacatgtctctaagtgtatatatgcaaaattttcttgtggctcttcatctgggggcagaatttctggactataggatttgtgaatattaaatgccaagttgtttttcattgtggttgaatgaattggcaatatataacagataccttgatttgcatcctctcttatgcttcgaattagactttaaattttgccaatcaaatgggtgaaaaaaaaaaactgtaattatggtcttgatttggtttttttgggctgtaccacatggcatgtgggatcctcgttccccagttccctgaccaggaattgaatttgtgttccctgcattggaagcatagaatcttagcctttcgactgctagaagtcccagtgttgatttgcattttgctagtgaccggtaaaactgaatgttctctactataagtatcttcatttcttttgcccatttttctcttgggtcatttggctttcttttcttaccaatttatagtagttttacctctctcttttttatttttggaccacatggcatatacagattcttgattgtaacatattcatatttattgtttcctttaaaagtacttttatgtcttaaaaaatgcttcccaacctttaaggtgttctcttatgttaatttttaaaaaatcttcataggtttgtctttcacatacagatattcacttatctagagttgacgttttaacatgattttaagtaaagaaaccactgaagtttttcccctatattctccagctgattgaaaagtctgttgtttccccactgagctaagtgccaccactttaatatctgaaatgtcaatatttattaatttattccacaaatacttattaagcacttactttgtgccagatcctatgttggagtctgtttctgggccctgtgttctcttgactttgcctctttattgccctggccaggctcctctgtccatgggatttcccaggctaaaatactggaatgggtagcaattgccttctccaggatgctgttattacagtggcttaattgtaatagctttttatgaagtcttgatagccagtattaagtcctcccactttgtttatctttttttaaaaaagtgacttgctacttgctttttgtactctgaataaattttagagacctgggtttgatccctaggttggaaagatcccgcagagaagggaatggcaacccactccagtattcttgcctggagaattccttggacagaagagcctggcaggctatagtccatggtattgcaaagagttggacacaactgagcaactgacatttcctcttgcacttgtcataaattttagaattaactcatcagtgatacaaacagatctcctaggattttggttgaaatttcagtgactgtgtatcagcttagggagaattgatatcttgagaatagtaagttttccatgaacattgtatatatatccatttgattacgtctttttaaatgtcttatataaagatttcctttaacttctttattatgaaatattaacacagaaaactgcataaaacaaatatgcaatttaacaaattgatgtaaacatacacatgaacaccggctagttcaagaaataataaagcattgctggtacctcagaaacctgttccttcctaattgtagcctcttcttttctcccaaaggtaactagaattctgacttttctgttaattgcttccttgctgttgatcataattcaactacctaattatccattttaaaatgatatagtttaattttgctgaatttaatataaatgctgaatttaataaaaatacacaatatgtattttttgtgtatagttgtagcttgttcatattactgtatagtagttaattgcagaatataccacaatttatccattccactgttgagagggagttgagaatttggctatcaatataaagttttataattttctccataaaggtgatgtacctcttttactagatttttttcccattacttcatttttttaatgctatcataaactgtatcttttcaactttttatttatttatttttagaatttaacacatgacttttccttttattcataagttcttagtatacattttggtgtcacaaagtgaactttttattttttaattgtttcagttcagttcagttcagttgctcagtcgtgtccgattctttgcaaccccatgaatcgcagcacgccaggcctccctgtgcatcaccaactcccggagttcactcagactcaggtccatcgagtccgtgatgccatccagccatctcatcctcggtcgtccccttctcctcctgcccccaatccctcccagcatcagagtcttttccaatgagtcaactcttcgcaagaggtggccaaagtactggagtttcagctttagcatcattccttccaaagaaatcccagggctgatctccttcagaatgcgttggctggatctccttgcagtccaagggactctcaagagttttctccaacaccacagttcaaaagcatcaattctttggcattcagctttcttcacagtccaactctcacatccatacatggctgctgaaaaaaccatagccttgactagatggaccttagtcggcaaagtaatgtctctgcttttgaatatactgtctaggctggtcgtaacttttcttccaaggagtaagcgtcttttaatttcatggctgcaatcaccatctgcagtgattttggagcccccaaaaataaagtctgacactgtttccccatctatttcccatgaagtgatgggactagatgccatgatcttcgtttactggtatataaatactacctgctcagctggtggaaaatccacctgcaattcaggagaccctgcttctattcccgggtcgggaagatcccctggagaagggaatggcaacctccttcagtattcttgcctggagaattccatgggttgaggagcctggcaggttacagtccatagggttgcaaagagtcggacacaactgagtgactttcactttacgtcacataaaaattcagtccttttctctttttaaattattattattattgttttggccacaccccatagcatgcaggcttagttcccaataaggggtctgacctattccccctgaagtgagggtgctggcatcctaacactggactgccaggggattctcagtgctgttcttttctatttcagtgtatgtccaaggtccctgaggatctgattctgctattagttgtttgtatgacttcttacctctggtgctttgtttccttgtgttttgtgattttttttaatatgtatttatttggctgcattaggtctttgttgcagcgttcggagtcttctcttgtggcgcacagactccctagttgtggcacgtgggctcagtggttgtggcatgtgaggtgagttgctccatggcgtgtggagtattgggtccctgaccagatattgaacctgcatcccctgcatttcatgggggattcttaaccattggaccgccagggaagtcctcttttgtgatttttgattatgaggtcatattccttgaaactttgtggcctgggatgagataggttcttaggctgaggtttgcttttactttgtaaaagaggtagcttttgagattggctttgtccttcagaggtatgggatggggtgaatttcaaatagtagaaaggcttaatcagagtcactgtggtgggaagctctgtaggtcttgttgaagaagagttatggttatggatggttatgtttatgaaagagggtagcagggaggattagattgggaaaggaaccctgtaaagttccttgattactgttgttgttcagtcgctcagtcatgtctgattctttgggaccgcatggactgcagcacgccacaccctgtccttcagcatctcctggaccttgctcaaactcatgtccattgagccattgatgccatccaaccatctcgtcctctgtcatccccttctcctcctatgctggcctttaaaattgagtttaaagtccccttgattactgtgctagactttaaaatcttttcttttgtcattgaatattctagaagagggcattggctttttaaagatttttgtgacaccattatggaagatggattggaagagggttagactggatataaatggaactgattaggagatcaaaaaataatccaaatgagagttaatttattatgacaacagatttttattgagcacttgcacaagctgtacagggtcttagttccctgaccagggattgaacttgggtcatggcagcgaacgcttggtatcctaaccactaggccacctgtgaactcctcccctgtcttgttttttgtagaatacagtcagacctgcttctggcctcccagagtaaaataagcagctcaatttctatacaggttgaatgtgatgacaaggaagtacagggttctcaggggagcacttcagagagttaacttaactgagactctgggggtcaaggacagctttctggggaaattaacttttcaattgcaacctaaaggttgcatagaaggttgtgaagagaacagtattctaggccatagcatgtgcaaaggcctaaagatgggagagaatttccttagagaatcgctagtagagttgtgctcagcagattggtacagtgatttcattagaaaaattcagcccctcaaacattcttgtttaattcacgaagtatttttaagaactttatgttggtatccaacctttgaagtaaatggaatttaacccagaagaccctggcatttaggcccagatttcctcactagtttttatttgtttgtcaaattagctaaactgcctggctcttacaagtgctttgaatttggtattccctaggctagagcataaaatattttaggaggattctagagaggtgagcagggaccaaattattttggtttttcaagccaaactaaagaatttgagtttgatcttgtgaataatgaagccactgaagggattttagaggggagtgacatgattcagtttgaattttagatttctctggctgtacaattgagaatagattcacaattgttaaggttaagagtgtgataccagttagaagaatgttgccactatccaagccaaagtgtgtgactggggatggaagtggacaggtttgacagagacattggcggtagtttcaagagaatttgaatgtagcagatgaggagtcaagggtgatgctctgacttttgtctggagcaactgaatggatggtagggagaataggaaacctgggaaaggagcataggagaagtaaggtggtgggtgcggtcaatattatggaggggggataaaagaaccattgtggaggtgtaatgattggcaatggatcagaatggaaggcaagaagggcagagttaaagatgacacttcactaacaaaaacagcatcagagtagttctggaagttcagtttgaatgcctctaggctctcagtagtcagctcctggtcttgtttttgttgactgtatagagtttctccatctttggctgcatagaatataatcaatctgatttcggtgttgaccatctggtgatgtccatgtgtagagtcttctcttgtgttgttggaagagggtgtttgctacgaccagtgcattttcttggcaaaattctattagtctttgccctgcttcattccgcattccaaggccaaatttgcctgttactccaggtgtttcttgacttcctacttttgcatttcagtcccctataatgaaaaggacatcttttttgggtgttagttctaaaaggtcttgtaggtcttcataaaactgttcaacttcagcttcttcagcatcactggttggggcatagatttggataactgtgatattgaatggtttgccttggagacgaacagagatcattctgtcatttttgagattgcatccaagtactgtatttcagactctcttgtcgactaaggtccgtctagttgaggctacggtttttcctgtggtcatgtatggatgtgagagttggactgtgaagaaggctgagcaccaaagaattgatgcttgtgaactgtggtgttggagaagactcttgaaagtctcttggactgcaaggagatccaaccagtccattctgaaggagatcaaccttgggatttctttggaaggaatgatgctaaagctgaaactccagtactttggccacctcatgagaagagttgactcattggaaaaaactctgctgctgggagggattgggggcaggaggaaaagggacgaccgaggatgagatggctggatggcatcacggactcgatggacatgagtctgagtgaactctgggagatggtgatggacagggaggcctagcgtgctgcaattcatggggtcacaaagagtcggacacgactgagcgacttaactgaactgaggctctcaacaagttgttatgtccagtagaatttgaagtgcctataggatttgtgagcggaactggctgggaagctattggaattgtgaatctgaagcttagaacatcaagatggagtgaaagtctgggcagtcagctatctagaaggtgatcaccaaagcagagctttgacgacattgtcaagagtgtaaagggcttagtatagtgaagacaacttagtatttggaactagtacttgctgctttcactatgggtttgtgtttttttttttttttaataaaagatttatttatttatgtctgtgctcggtctccactcctgctcttgggctttctctagttgtagtgagcaggggctgctcttcattgcagctcacaggcttctcaggtggcttctcatgttgctgagcacagccctaggctcgaaggcttcagtagccgtggagcttgggcttaattgctttgtggctcgaggggtcttcgtggaccagggatcgaacctgagtcccctgcattagaagcagattcttaactagtggaccaccagggaagcccctgtttttcattcttaatattcgtcaataaaggaggattaaatgagagtcagatatctctctatcagtatctagagccagacctctgggttcttattccagcttactctctgtgtaaccttgggcaaattatgtttagcccttgtctgctgtagtttccttactgcagagtgaagctaataatactatgaactttaaaaggttgtctcatactggatagcaataaagtgcctggttggcactttattaaacaaataaaacagtggctggcacagagtaaacaattgctgttagctgttttgaaaatgctttataaactgtaaaaatatgggttattagaaaagaagagggttatctttgaaggagacccacctttaagggatgagaggaagagaacttttatttttattaaattttttggctgtaccaacacagcatgtggaacttccccaaccagggattgaacccatgttccctgcagtggaaattcagaatcttaaccattggaccaccagggaagtcttttttaaaaagaagacaggctgaatcagaatcttgggatagccaggaaattactatgtcaaagaagttttttttttttttaatatttatttatttggcctcccccgggcccggttacagcatgctggatctgcattgtggcaggtgggatctttagttcaggcatgcaaactcttatttgcagcatgtgggatctagttccccgaccagggatcgaacttaggccccatgtcttgggaacagagtcttagcctctggacccccaggaaagtccctcaaggaagtttttatcgggaggatgtgatcagaattattggtgtgatgatgaattataaaggatttaccatctatttcactcagtactagtcaccccttcttcttgaactcttagagccgtttggcccatagttatatattgttacatttaatattgaagtaataatttgtaaaacaatttacaaagagatttaataatctcatccacttctcacaactctcctgtgaagtagatgttattctctttggtaaatgaggaaattgaggcccaagcaatagacttgccaccacagttaaaaacttagaacagttttttagatttaaaaaatgggggaaaaaaatagacttgcctaagcaatagagcttgagttgcagtctaggttgtgagatactatcttttgataatcatgtttgcttaactagcttgtgagtgtcctgaggcctgaatctcatcagtgagttctttttgtcctgtgtagctcagtgccgagtgaagactggccatgctcaaggctaacatgcttctctcccctctgtcttccagcgccctcacaaagccaatgctgaggagatgaccaagtaccacagtgatgactacattaaattcttacgctccatccgcccagataacatgtccgagtacagcaagcagatgcagagatgtgagtgcgttctgctccctctctactctcaagcccccgttaggccccccttctagttggagagactcacgctcccttcgcttgtatcccccgttcaggtgatacctgatttcccctgcttcctaagggcaccacagtgctgcttttatctcaggactggctttgtttcctgattgtaaggaatagagactgaacattgtccagttaggttcacaacaccatcccccccaaaccatgattgttgtaatggaaaaagcactggtctgggagagggagacaggagatacaggtcccagctctgactcttaactgactgtcaagtcacttctcagatttttcttttgtgaagtggactggatggcatcccatgcagctgtaactgctctgactatgtgagtgttagttgagaatttagcagctacttaggacagactctagatgatgtcatctttgagttgaggtgattctgcccctgccccctggaacttaaaaccagatcatttcggaagccgcactcagcttgtaggaattacggtgattgttttagttgtggggaaaaatatgttcagatttgggaagaaactatcatacatgatttctcccttgtgttattttataaattatcatgtagcacctaagatctcgtaataaaacagtatagcggtattgtctagaagttttgagtagtttatgatagtttattttggaataccaggaaacctatgacacttccttgttactactggccacaaggtagtctgattcctaaggcagaaatttatttgttacaataattgtgcactgctaatgattacagaactacagagacctttttggaagcattaagcttctttaccacccacaactccaggaccagctgccccatctaaggtatttactgtctaaattggcagggtcttacttcatttcagcctgtctcaaggtgagacagattcattcctttgctcttgatgcctttagggggttccagaacttatttaggccagtgatcaggctctgctctcagcagagagggctctcattagtgaagcagcttggtttcgcagcagaagaatgagctctgatgtcttagtttgaaacctgtggctctcccacttagctatgtgttcttgaggaagtcccctagcctctttgagccttgttttctcctctttaaaaggaagacggtagtggctgttttataacggagtttggggggataagtaagataatgtatttaaagcaccaactgtcagtgaaagtgaatagtagcttttgctcttatgacttacagcttttattattttcaaatcttccaaggcagacagcatattaggcccttgggtgtgcagtagtttggttctggctcccagtttgctccttttttcccaaaaccagcattctaaagttgtacattaaaaaaattaggtctgagattttctatcattggaggtggaggtaagaaggatgaggctttctaaggacttcagggtacttactgacaagagccagagagatgccacttagtgcagtgctttataaccggaggtgtctgtacagagagaatgacagggatgacgagctaagctctgtttcagtattttccaacacctaccctaggaagttgggctttcctggtggctcagtggtaaagaatccacctgctaacacagggggcctggggttcagtccttaggttggaaagatcccttgagaaggaaatggctacccactgcagtgttcttgccagggaaatcatgtcccaagggcatgggagcctggaggaccacagtccatggggtcacaagagtgtgacatggcttagcaactaaaccaccaccatgaacctgagaagtcatacctctaagaagaccaaataagtcagatttccttgctcttggctagaatgtaatttaaatgctttgtgttcactttgagactttgagaatctaaattagaagttctgatctaatatttaataatgggaacataaatgcattttggtggagggcagatagtctatcaaaatatgaggctcatggtagaaacatgataaaaggaacttgtgctaataaaatgtggaggcatgcttttccattttgtaaacctacagaggtgaaatgactttcccagcaagatagtggtagaatggagaatggaacttgagtttcctgactctggagtattttaatttatctatttattttggctgcgctatgcggcatgtgggattttagttcccggaccagggatcgaacccacatcctccacactggaagcatggagtcttaactgctgggtgccagggaagtccctggagtattttaaaacaggttgcaaataaaatatttcaggcacacaaaaaagtataaaaataatgtaatgaacatccatgttcctgtaatcagcctaagaaagacaatattaccaatattgaagccccggacacctctatttgatcacatgcccttttcttctactcccctctccaccccgttaccaccgccgccgccactaaaggagtaagcactatcctgggggcagtgtttaatcccatacacctctctctgtggtaggttttttactgccttctcaacctacatctgctcccatatctctcacccactattgctccccgtcagtctaaagccaggctacgaatgagaaaagtatagtgggaagagagaaaacctatagaaaagtcctctggtctcacagattagtccaggtgagggtctgctctcccattttaccccttttctgtctgtaatcacacagctcctgggaataatggactggccatttgagctgcatattgatgtggggcctgaaggaaaatattttttctcatttctaaaagactgatttcttcccacgggggctccacatcaaacaggagtataagcaaagctagaaacccagacaggccaaacccactgaaggaggaagccgccagagagggaaatcaattgccaatggataaataaatagcctggcctgagggaccaaagttcttattgacacagcctcccaatgtttacctgggaagtgagcgagagggccaccttctgcttgcccccttatgcataccatccttcctcatagcactgctcttggcagggctacagatcagagcaccctcccaagtttaggacagtactaggattggtaactggtggctgttgcaaaccttgagcttcagctgtgtgtcaacaggtcaccacagtctaagctgggctctcctaccctcctcaccctagggctccctctctttgctccaattttattgataatagtggatgcagtgtgaaggctgaggcaagcagccttgcctctaacttctgggtatcattgatatctcagcagtttccttttttgtgagcggagacttggagctataaagttcctctctagctctgagtctgtagagttcaaatgtgtttcccttcctgtctttttcattttatttgcattattgtttgcatgtgtttccacattatgtgttagtttgtacttttacccttttaggcctgaaataattttcctccaattgtcacttgttgtagtagaaagagcactgaactgtgggagtcaagacacctggactctggttctaccactgcctggttatatagccttgggcaagtcagttaacttcacatctgtttgttcctctgcacagtggggttgatattggtcctgtccatcttttatggagttgttaggcagattcaatgagattatgtatgtgaaattactggggaaaagacgagagtatattttcgtgggcttttaggacggacagaccaatccttgaatactgcctctgccatttactggcagttacctctttgagcctgtttccccacttataaaacaggaccaaatcctacctcagaaagttgtgtgaacatagatgacaccaagtatttaaagcacttggcatggtgtccggcatgttgttaagcatcaatggaggatagtataggtctctgttctttgcatgcttgttgacccactggagtaagatccaggaacaaacccaggctggaataagaggctaaatttttctccctcaggagtgaaacaacattttccaagtacttacttgctgaatgcttccccatgtaaggtttctgttaatcttctcaagaattaggtgaggtggatatcattgttgcttgttaaagataatgagccaaagctcaaggaagttaaatgactagacctagtcccacagtcagtaagcaggagggcctggacaagaacccaagccttctgaatccaaatgctgtgttttttctatcagctcataaatatgtaaacaaaaccaaaaggaaattgtggaaactaaccttttcgtgttttttcaagtcaacgtcggtgaggactgtccggtatttgatggcctgtttgagttctgtcagctgtctactggtggctctgtgggtaaggaatatacccttcattaagggctaatctgggctgtaccaatgaggtctgtcttttaggccactgtcctagtgaggctgacctgtgaccatgtaaaatggtcctgtgggtttttacgttaggtccttaaaatgttattctgcttcagtctgaggccaggttcaatctgacatggtatagatatgtgtcctagcctgtcctttcctactaagacatcctgtatacaggaactccctgcagacctcatggggttgttgaaatgctgaacataaaagtaatttgtgaactgcaaagtgctgtaaaaataggaagtgtcatcatctgtgtcttacaaaagagcatggtaattacctttagaggtcagaaacacttcccacgtatctcccacttccattagtaatatctacgttatctctgggatcaccctaccatttcttaacaaatatttatttttctgtgatcattgttttttctcctcccctctccctaccacctcccaatataatctcagaaaacaaagaagtatacagaggaaaaaaactgactgcaatcacactgtcatggataaccatcattaccattttggtgtttgtacatccatgctttttctttgtgcatgtatccagacaaaacatatactcatctatattttacaaaaatgtgtatgtatagttttgtgcctccctactacattttttacttagtaaattttttttttttttttccggtcatgccatgtggcttgcagtatcttagttcctgaactagggattgaacctgggcccatggcagtgaaagtgcggagtctaaccgctggactgccagggaagtccctacctagtaaatctttgaaatttagctgtaataaggtttagcatgatatccagtggctacatgattattctgttatagaccaacctcagttgatataattagtccactcaagttgctgtatgttggtgttttttttgttttttctacaccatgcagcttgaaggatctatcttagttccctggccagggagtgaacttgagcccttggcagtggaagcatggagtcctaaccactgcactgccaggggattccctcacgtttttattgctgttaaagtcgtactgccgcaaaggcatctgcacacatggtgtgtatttttctcacttcttcttggacctatttgtacttcaagcctctgtctactacatttggtatcttcaaaatattttgaccgtgaaccacagtaagaaatacatttacacttaaaatccaggttatggacgcacttgcacacacacatcctctcttgctctgcagctagtttcacaaaagagtagttacctttactgttactctgctatttttattctatagtctatctcatttaaaaaaaaaaaaatatatatatatatatatacacactatccatagcccactaaaccaattttaaggcctattagtgagttttaccactttcagtttgaaaaacaggttttttagagtagccaatattgtgtttattcccattggagtagacagagggagagggttagctggtgaattgtatagttcagctgttaaataggcaggtcctatctctcactgggttcccatggttttttggggaaaggagagagagggactttgtgacaggcttgtgttctttcttccggtgcccagcaagtgccgtgaaacttaataagcagcagacggacatcgctgtgaattgggctgggggcctacaccatgcaaagaagtccgaggcatctggcttctgttacgtcaatgatatcgtcttggccatcctggaactgctaaagtatgccttcctggccttgtctcggaggagcaccttaggccaggtccccactccctctcccccgggcttgcctccctagtttgcctttcctagcggcgtgccggctaggatgtgttcggtgagtgtctctggccatcctctccttgacgaggccttgattggatctgagcccacggcaagatcaggggcaggtgctgctcagatcctgcctccagaatgtctctgtgtggctggagttgaccctggctgtagagtaggaagatcggacttggtcggcttggtcaggcctctggagacaccctgccgctcttccaccttccttcagccagtttccacgtctctggtgcttagagatacctgagggaggcagccagcccggtaagctgggacctggcgcccttggcgcgtcccactcccaaagagcccccagaaccccctgacccccttctgatcctaggtatcaccagagggtgctgtatattgacattgatattcaccacggcgatggcgtggaagaggccttctataccacagaccgagtcatgactgtgtcctttcataaatatggagagtacttcccaggaactggggacctacgggtgagaactcccttcagggaccagccagctcaccctcagctgccagctctaactctcctgtctcataccaccaaaacccacttcctgcctcttctgccatttggagaccacacacctgccacgctctttccctttcttgttctggaggaagggaatgatggagcatacagggttgtgagggatgggtgcctcctgactcattgcatttcctcctggccacagctgagttgcattacactgttcagatgtcctagacagcttgaattttaggctagaaacatcaggtactctcccacgggctaggaattgggacctttgtgaaccaatttaagggtatttttaggttaccttcccctttgaccatctgactgaaggctgctctctccccagaaatgtacatgagattttatgtttgatattgaatagttaatagacacctcctcctactgaagcccatccatggacctcaggataagaatccctggaagctaattcattaaactcttctgcttgtgttagcatggatacaatgaaaccatccactttgtcatcccagtggcccttgggtgaaaaagtggcattaagtcagtttgctatggcaagcgttagaataactgagcatttacaattttgaagaattcttccctttctgcttgctttccacacctccgtagagctgagggtgggggagcagaggagtgagcagtaaagtgttctggaaaagcgttgctgtggggtgggtgttaattctgtggtccagcccccacctttaacccagtcatgctgtgggggtggtatattcagcctctggccccagaaatgattctcagcctgagtgcagactcagtggtttgtccagagacgggagctagagttgtcccgccagtgaggggaatggtgctaacttgctctgtccctggcccacctcatggacccagcttctgtctcttagaaccactgcttctttccttagccttccagcccctacccttgagcttccttctagcttcatctttcagttttactttaatgtccttcttgattaggatattggagctggcaaaggcaagtattatgctgttaactaccctctccgagatgggattgacgacgagtcctatgaggccattttcaagccggtaagtattatgctgttaactaccctctccgagatgggattgacgacaagtcctataaggccattttcaagccactgggctgtaaatgggattggtctaagggaggggtagcaaaagcacctcaggggtctctccccaagagaagctggctggaaatgagacgggtttgaaccctggattacatgctgtatggccagttgagaggacaaaatttctccaagtatatatctgaatcttttatccaacactgttgttatacaggaatgtctaaggcatgatctgtgtccttgaagaccttacagtccatggtgtgggaggcaggcacatccccaaatacatgtggttaatgctgtttttgagggatgaccagaggaacgagagagaaaaactgctgcctgagctggggaaagggtagtcagaggtgatttcacagaggtggtgacatttgagcaggactctgagaaacgaggagttactcatgtgaagaaggaggcggggggcgggtggcagagggaacggctccagcagaggcgccaatatgtagcatgtaggcctgtatgatgtggggaggggtcttgaaggatgtggtagaaaatatttgttgggttagtatttcaaagggagctttgaaggccatgctgaggagttaaatcttcacctgtgagcaacaaggaaccagccattaccagagtagtaacctggttaggtcacatagtagtttagcaaacaccaggtgcccactattgctgcataccttgtagtaagggtggcagagaagcctgagttgcagtctctgtcctcagtcacattggaatctggttgtgagaatgagatatacaaaagtgaggtggctctttgtagtgtgaggctcaaagtctgtaggaccaaatgcatagagcagatgcagctaagggtcagaagagcttcttggagccagtggtcttggacctagagagcagggaaggatgtggggaattattaaggaggctgttttaggctcaggattactagtgctagaagactcctggaaaactgaacaaagtagggaaacgggaagcccagattggctctccattttctctactcctcagcctggggaagagtgaaaaggcaggagtggcaaataaggaacagaagaaagtgttgcacccacacttttcagcctgaaccccagaagcttttcttgaggctggtggtgaccaggttgtgtcctttcaggtcatgtccaaagtaatggagatgttccagcccagtgcagttgtcttgcagtgtggctctgactccctgtctggggatcggttaggctgcttcaatttgaccatcaaaggtgagtccaggtagcatagagatgggcgggcagggtcctgctgggtgctcctgtaacttggcaccccttctcccaccaaagggcatgccaagtgtgtggaatttgtgaagagcttcaacctgcctatgctgatgctgggaggaggtggctacaccatccgcaatgttgcccggtgctggacatacgaaacagctgtggccctggacacggagatccctaatggtaatggctccagggccagacgggtccgggcagtgcgtgagctcctgtgtccttgagctcacaccccctacccgctggctctgcagcgtctccttttcagactctgattctgttgctagcctcttgtgattttcagaccatagccatcagttttttcccgagtcctttagctgcccctgtccattctcccttgacttttggtctggacagaattatcagtagttatagctttggaattcatactctgtagggtaattggggtagtgaggggtagagtactctcagtgaatattacctaaatttttctaaaccaggggcgtcagccttctccttatacacaggcactcacatacacatacccagacaccaccggtgtgaaccctggagaatggctttggcttttaaacacttgaaatcctataggatttcccaagtctcaccccatcttaaaggcatgcttctgtttgatagctgggctaacaggcccagataaacctgcaaatgcttttctcagggttccatggtggccagatctcttaactctctcacctgcccccaccccaattagagcttccatacaacgactacttcgaatactttggaccagatttcaaacttcatatcagtccttcaaatatgactaaccagaacactaatgagtacctggaaaagatcaagtgagtatacccccaccccacacacccctaattgaacatttcaagctccggttggttcctgatcagagcccagccaacctctctaccattggccatagacagcggctgtttgagaacctgagaatgctgccccatgcacctggggtccagatgcaggccatccctgaggacgccattccagaggagagtggcgatgaggatgaagaagaccctgacaaacgcatctcaagtaagacccaaacttcgggggcctctgcctccctactccgtaggcccttgtccaagctgcgcaactgttgagaatcccagtgctcgtacctgtaggaataatttagagtccaggtccctttccctcggtgtcttttgcgggaacgtgcagaaaagcattctttgctgagaaagaatctgctctctcactggagtgtcccattcattacctcccagtctgttcctcggacaaacgaattgcctgtgaggaagagttctccgactctgacgaggagggagaaggcgggcgcaagaactcttccaacttcaagaaagccaagagagtcaaaacagaggatgagaaagagaaagatccggaagagaagaaaggtgagtttggttgggccaggacttgggtcttgagccccaggccctggaagatgaatttatgtagggcactgtgggggtggggagctgacttggcactgtcagctccttggggtactccctcagctacatgggcctttctgtggttcctagaagtggcccacagaacagctacgtgggcctttctgtggttcctagaagtggcccacagaagaatgaaactcaattcgtcatcctcactggctgatagagccctgccaggttccagagccagggacatgcctgggctctccttggtcaggcggggctctcacataccacccaagcctcccagtgcttcacccgtttcccagggggctgcctccacccactgggtttaggctttagcaggctgggaaacctgtccaacctgtttgttctctacaggtctagctgggagggcttgggacgtacttttctctccactgagctgtgatgttgggaaggggtttcaggagatcccatgagtctttccgggggcctgcccttgaccatccctgcattcttatgttctagaagtcacagaagaggagaaaaccaaggaagagaagcaagaagccaaagggtaaggaaagaaatgtctgtctgctccctggcattggagcaccagcccctttgtcccaccacaccaagagggaaagcacagggacagctggtccagcttacaaaggcctctttcagggaccagtctgttggtttctgcagttctaggcagagctcggaagctctagccttcagcagtcacctgggcagccaagggcctgaggaagtcactgtgcccttcctttttccaaggcctctagggtgggttatctaatgccagtctctgctctctccacagggtcaaggaagaggtcaagttggcctgaagagacctctccagttctggcttcttgccaaatccccacctttatcccacagcccttcagattttatattttctatttctctgtgtatttatataaaaatatattaaatataaatatccccagggactagacaggaaccagggccctgaggtcagggcacacattacttttctagtagttgccttgcaacccatccctccaaactcttgaaccctaatgggtactgggtaaaagggatccgcttaagcagccataggacaaaatcttgaagtgcctgcttcatagctttgaaaaggtgcccttgctgagcatttgagaaggggtggctgggtcttcagggactccctgttgtttttaggttcttaaggtaacatcagccatttttaggttggttctgttctcatgcctgccctgtctgtcttcccccaattctccaggtgaagattggtagtctagtttccattttgagatactatattcatttttgtgagaatctttgt

SEQ ID NO: 111 - DNA, 8237 bp, Hippotragus equinus
  source 1..8237: mol_type = genomic DNA
agcacatgtgactacaccgctacctattgtagtgggcaacgcagacgagaacattcgcaccactgcagaaaacggacagcaagttgtgctcagcacggaaggcctcagggacctttatggggctggtatctgttctgatggtgaccatgctgtgccaactgataactttttgaagtagcacctgagtacacttgcatttgagtttatagcagaacattagagtttatggcacattcctcagaagaactcaaaacctaacactccttgggccccaggccccaagtcaactcatagctctacctatatagccaagggcaatgactgtatttacatgaacatatccctgtgccacaactgtcctttctcctgccatcttctccatgaccacaactgaaaggatttcacaacaggtgtgttaccactcatcccccaaagttaagctcaggtaggatgccaacaatgaacccatcagaatgtatctacaaaaagtaaaatcacctatgatttagctctaaataaaaggccacaacccttagaaacaatacaatttttataaaaagacaaatgtacatatttacatacatgtacatgtgtggtcacacatgacttagtggtcagatgatatttccaattttaaatcacaccaaggcgctcacacttgcctccctgggcctgctgggggcttctggggcctgcctgagggggcacgtgggtgcagggcaaggcacagtataaataaatgcaaaggccaagagcttgggaaaacgttagtgtacacctctgatcagaaacgtggcaaggtccacaagaaaagtgccaggttttttcacaagcccttcagcctaggcagggagcagggtagagctcctctgaggcagagggggcactgtcccacagggaccccattcttccttcacatttcactggtgttagaacagtccccagggctcagctaggaagggaagcggttactttgggaacaggattcacttagtgcaattgtctcttagtgcagagccagccctggagttggtgccatgttttctgaggtcactggtccgttctctcgggccagctcaggaatagcaaaaccctctccaggcagtggggctcagaggggaaagctggaggctgactcctgtctgagactgccacctgacacaccagtctcagaaccccatcttcccaggaggcagggccagctttaccccacaagatgagtccagaccctgccctgccggactgcaagaggccactgtcccgaggcggaaagacccatccttggtcagcagtggggtcacacttcatcatatcaaggggccacaggattcctgcttctttgcaccacagccaccatgatgccaggccctgttgcctaaaggagtcaaagggggtcaggggcccatctatggtgcacaaggaatggcctggatggagggcagcctgactggggtgagcaggctgtccaaccagctgggatccatgttcttcatctctgatgatatcaggccaatataccctagaagatataacgaaggttgtgtgaggactggggggtgaggaggcaggtgttttcccctaccccaccaaccctccagcccattcctggaaggcacatacacagcagctcctgtgtcaacccctcagcagcctcatcttaggcaaacctgagggcctaggagccacagccagtctgcaatctgtctgtacccagatgaatttaagaagaatgctttacctctgctgctatctcgtcctgcccccaagtctcccccaccacctccatgggtttcccatctttgagaaaccatatggatccagggtcttcttacccccagggctgtcaacttctggctcctccttgcaactgaactctccatagacagaggtgggctgggccccgggttcattaagcaggtaccccttcccatccacgcttgtctgctgccaccctgtttgctccaagagctggggacagataaataagaagccatcagctcacttccagtacagactcaccctctggccctgcccccattgagccaaagcttctcagccaggatcaggtccttggctattttcatattctcagatggatacatatgtggagtgcaattaggaaagaggcccagaggtgagggtctgccctgggaccctgggctaacattcccacatctaccttctggcatagaacctccaagacctccctctctatagggtaaggacataccaactgggagggtggcttacagcaatggttaacatgctaagaaaagatgccttgaaatttcagctagaattagggaattatccccatatctccattttctgtgctgaaggaacacagcctgggtatagctactacaaaaacttttttgtatttattttaaaacctgaagcagaaaaaaacctagagaataatttgcttaaaaaaaaaaaaaaaagccatcatgttatagatcccaaagggtgattattgaaacctgatgtgcatttcccaaactaacaggactggggcatgttggggcggaggacgcgggccagggaccagcactgatgggagctgagtcagagctatctgaggcctgctttaggacagcatgtcagaaacccagcctccctcctcccctcattcccatcagccaaaaaggtcagtggtccccaaccacatggacgtgacgcttgtcggactatgcaagccaacaggtcacaccagcagcagctgctgcctaccctccagtttggaagccctcactgagaagtagccacctctaaagggcaccaaaggaggaagaaaggggcttttaccttcatgatgtcctcagttaatttcccttcctcgtcctcatctgttgcagctgtggatggggaacagcagagaggttagctgaggtcagccaggctcaccctgaagtgctagcccacccggtccccctgcctcttcccacacgcacacacacacactggcctcccagcagatgtctgcctgccatgaagattacagagcaaaacgctgtcctggtgacagcctcttgaaccctggagccacacctcttcccacctcttccctctcctttccagcccaccagtcagctcagtgccaagtggagttctgagcgtcttttctccctcaggaaacccctccttggaccccaataggaaggccaggccccagaagcacgaaccttcagaggtggagggcatgggggacacctgaaagttgtacaggtcgctggtgctgtctggcacaatttccactggaatgggccagttagggagagtgctgctgacgccacacggtgacagcgcttcaggacaacagaaaccgagggtcagagctggtgctgccttagtttgccaggatacccagcaccccctgcccccactcatagcctgctccaacaggccaccgtccacaagctcagcgcctgctagatccaagagtaagagccttcccaccagtctacacggtcccctgacagacccagccctcctcacctggagtgagagtccgttcgatgtctaggtcctgcgccatgtagctgcgaactgtgtagttgctgtggtcatcaggcagggtggagctactgagtccatcagagaaggtatcggggctgtattccccatacggctgtagaaggagaaagacgattaggcccaggcttgctgtggcactcctttcactacccaccctgaccctcaggagaccaaaggctaactgcttaggatcacactcaccttcttcttggccttgctcctagcatctcggctggacttggactttctctctgtggggcaaacaggctgtcagcccagccctggtagaggcaagcatgctggccccagctgcccttcctcctccttccctctctccctgagggcttccccaggacccagaggcctttgggtacctttcctctggctcttggtgaggggtgggagcatccggtacacccgcacagctgaactgcccttgttcctgctctggtccttcacctcctcaatatctggcagtgagttcatggcgcagcgaaagtttgccttccaggtcttgggatccggctccttttcccctgctttgtatcggcctagttggcaggaaagggggagaggatcatcagggctataggtgggaacccttatttgtgccctggctcagaaggacaaagacaagggtatccctaaagcttgcatgttgccagagatccacaatgatcaaaccagcaggtattcctggatgacactggtgcaggccctgggcttctcaaacgcccagacttgggcatttgatacacccagcaagcctctgggaaagccctacccagaagcactagaaagcccaagcccaaagtgctacctttgtcacagatcaaggcagtctctctttggctgtcagcagccagaaagaagggactggtgcttatctgatcgttccaaacatgggagaggacacagagtaggcaacaaagaatatttactgatagggggactgagtggtccgagatgggccaagagccccatccttgaaggataaaaggaggctgccaaccagatgggcccaggaccattagtcaacatcaagaaaaaggaagacctggatctttttcagtgtccatgcttgccactgcttttgccagggagaactttaattcagccacaaactccatgaagccatactttttaagattttggctttataaattcctttgtgaacttgctgaaatgatgaacctctccccccaaaacacaggcctgctccctgcccaccctgaattatgtacatctcagggaactcagagaccccagtgaagatcctctgtgttaacagaagtgcctccctttctctctttccagctcctcttaagctagagtccagcacactcacctgtgtgaatggcccagctccgaaacagacaggcatctttgttgatgtcccagccatgcttcgcagcgtgcttccatggaatctggaagatcatctcctcctatatagcacacgtacacacaaagctgtgtcagctcagagaccacaggtttttggccttaatctgcccagcccccgaggtctgggaaaagactgacttccctttttcaccctgacatctggctggggttgacccaccccaacaatggcctaaacagactggtccatccctctggatctctcagaagaggctctgggttctgatgagctatggcatcatcaggtcagcaaagacctccttctgctcattacagatgtgctaggacccatacagaggacccctggatgcttctctctggcttgtcagcaccaacatggaagtgagaactcggtccattatatggggcttctcagaacaactgtgaacactggctcctacaaagggagttctggtcatttacctgcaggagcccaggaccagacttggatgatgactacctgtgtgaccctggcattgacactgtacctctttatccctcactggtttccatgaaatgggggaaaaaaaaacaacaccacagtaacaaatataaaagctaaggtcccactgttatcattactggtggttaacagtatggatttttgaggtgggttgctcaggttcaaatcttggctccatcgctttttgtgtgatctcattatctacctctcagtgcctgtttcctcatctgaaaatggagatattagtaaaatcttcctcgcatggctactttgaggattaaatgacacaatgtaagtaacatgcttaacatggtgccatgctcattcctagtaagtgagcagattaagcattagctattattattagcactactaagccttcagggtctgttctttttgcaacagcaagaggcctcttgggtctggacaactggtgcaaggttaattcttggctcacctgctgggtcagccacctcttcctgccagcagtgcccacttctctgtctcctatctacccaagtggagccctctagaaggctgtgtgtgcctgtagaggtctccctcagtacaggccagaactctggctctgcagatgctgggagaatcttgctgctggaaaactgttaagtggcctcaggtggatgccccatgcatacctcaagaagggaggtgggcagaaggcagccagtagagccctgcctgggctgggtcttatacactccctgcaggatccactgggaaatacatctacctactccttatcacttccctttttgaactgcatctgaagtgttggacccccgaagaacataggttaaaacagtggcagaaaaatccaaacagtaacactcactttattaatccagatcagccctgggatttggttggaattaatctgcatctctagccagggtctcatgcgcatccgagtgatgggcatgttggctgtgaagagaagacagaaggctcctgtttggagtctgttgagcagtccctggccactacccagccccaccccaggtcattcagttaccctcccctgccctcatctagataccaagtactacaatcatgcagaaggggactttctctctaataaaacctccctccaaatcttttcagcatcttgagcaacacactccctccctcagcccctcctagacagtcttgggaggggacagccatgccaagtgatactctgaagatttatgttaaggaaaagagacaaaacacacagatatctaaatactagaacttactccccaaattcaaattgtttggggagagaggggcttcttttgcttgatgccaagaaatttccctctttgagctgttgtcactagccgtgcaccttccctaatggacagtcaccctgcatcctcgtcaccaccaccccccaatctatcccttgcctgcctgacagcctcagtgccaaggcccgtacgctaaacctttcggcctggttgccctccttgggcaaagtggcccaaagaacacctgtggcgcctcttcccgctgttccgggaggtcctccaaccacccagcgcagccggccccagcctccgccacctgcagagacagcctgaaacctgggggctgggcctgagctggaaccgccgaaaagcgggcgcagggagcaaagggcgcccacgctttgatatacagtcgaatcccccgcacagcccttggatgcgcgcaaccaacacagagggccacccagaggccgccagcggctctggcacggacaacctcggcggggtggggggtccacgccgctgctcgccctccccgcgcagctgcttgcggctcctcgggcgccctccgagcccgcgcgggggccccggcaacgccgcgcacccgtcactctcccggcaagggtgttagtcccccacttcctggtgccccgagcgcgcctttatccgaagccaccggtgccccttgcggcgaaggcgagctcacctcgacagcaagcgctacccgacggcagcaaccgagggtcccggcgaggactgcttttgccggcgctaggagcgcgattccagtgggaacggggagacggcagaggatgcccgggtcgcggagcctctgggcacggctggccttgacttggcacggctggccttgacttggcacggctctcgctggcctctgctagccagacttgggcgcacgtcctgcctcgacgaaggagtggcgcgctctgcctgaaccgcggcgccgcggagaatctaaacacttagcgggattcccccagcccgggccgggccccgcctcctaaagagccgagaggacgcccattggccagcgccgcctcatcatttcggggaaatcaggctgttgtagagctagcggcgaaggggaagtacagggcggctgcccctccccaccccctccggcctggcgccgccgccccggggcgaccgcgggcccgccccgccggctcccactccacccccataccagcgcaccagcgctcctggaaagtcgaacgcccccggcccgcagttgctcccctcactcggcgctcacccggcctgctagctcctgaggccatctccttgctcttctttcctggggatgccccgggatctctgtcttcccagccccggtgagggggtcaccccggcacctgccgtcctcttcagagtggacgcgaggattgagtccttgaaaaccaacctgcttcctcaagcccgttaatgggtgtcaagcagggagggtttcggccttcaaaccttcgaggggtggcccacctccgggggttcaccttacccggggaagtaacggaaagcctaccctggcgaggggctgc

SEQ ID NO: 112 - DNA, 81049 bp, Hippotragus equinus
  source 1..81049: mol_type = genomic DNA
caccagcggcgtccagcctcctccctcgggagcttgctcgaggggcggtggcggacctttattgtctggggagcatctgccaggtggcgggccgatcccttgatgtgcgcgtggtgcccagcttcacaaagcgcgcggcgggcagcaccactctcgtccgggaacatcaccgcggaggagaggtggagagatgtgtgggctctggggtcgtgagcgcggggcgggggccgacgtgctcaaccactccccgcgggctcagtccgccgggatcagcgcctcgaaagaaccggggtcagacaccgccgccagggagccagacccagacccaggcgaggaggggcgcccagaaggggcgtggccgtcgcacagggggagggcgctgggaggagcggccgcggcttggcgctcgcggctctgggggctcggctttgccgcgctcccggcactcgggctagagccggaacgtggaacagagctccggtcccagcgcagccaccgcgatgagaggcgctcgcggcgcctgggatttcctcttcgttctgctgctcctgctcctcgtccagacaggtgggagggcgctgcgggtactcgggccgcgcctcccccctccccccggcgcagcccgtgccccgttagggtccgaatacgttggggtggctggggagaggtggctgccggtgcgtttcagtttcgggaagattcggggcggccccgggactctactgcgccctgccctgctcacctgcgtcgggagccctcctcagccggtgggggtggggggaggcgctgagctgcgagtctttcaggaaggcgggcggcgaggggcttacgctgagggcagcgggttgtgtgtgagtttagggctgcttttgtgaggagggcgagctgagcggggtcagaggcgggcggcgagggagttctcacgcagcgcgttatctccgccggctgaggcgcggcggttgcatccttttgttaaaagttgtgcgtgagaaccggcccgcaggttctcagccgcgccgagggcgaagttgtaggagagccttttctttgctctgcagcggttgccttccaaaccgcggcgctctttgtgccccagggccggggacgcacccgctgcctcgtctgttcaggcgccacgctggaccggagtcgaaggctgcggcgtcctcgggttcccgggttatgcctttagcaggggggagcgtgcggctctgtggccgcgaacctggaggtgcggctccggggacaacttgggcaggggtgtggaaagcaggcgctaggctgcagactttgcttttgtatatcccgtgcccgaggctcgccgcgtgccgtttctttcctgcaacgcgcctcggagtggctggtggctgcgtttgctgcctgctcccgggggagacagggatggcgcgcctagacattgcggtccccgaccccaaccgccgtccacgcccggcctgagcgcccggccaggtcgacggggctctgccagccccttcggtgtctgtgacctctaatcgcaggtccctgttttctttgggaatattgagaatcgcaacacagcctctcgcgtgatttacttaacggctgcccgaggtggggggtgggagatggagtggaactttcagcaaatcttacttaaatcttaaagctgttgtgaaaatcggttatatctgcgtgggaacttgggtcttcaggtggaggaggaggatttgtagactcctggaagccctcaatcacattcttgccctctctttttttctgggtgtctctggtgcgcaagcgagtgcaagtcgcccagctaaccccctgaagctctactatttcccacgtcattttttttttttaacctataaggctaacttgatgatgttaggatagaaagtgagtctgaactggaattcaagggctccagaggaagcatcgctatgaactattgtggaactgtctcgtcagttttctgactgctggtcagttttcccataaaatcttaaagcattgtgagggctttcctgtgggggaagagaggtaggaaggatcatgacgagtggccaggttccggtggcttatttgactgcctaagcttcaaatgagatgtttggtcccttacatcttggtgtcttgatattttagtttcatttaagatatgtgtactggacctgagggggaaacattttccattttttagaaaattaaatgaatagcttccttcttcctcagaattagcctgctccatcctagagaattttttggcagaggggattttaaggtctggctcgcggggggcagtgtggtatagtgacaaaggctcacgctgcctttctggttcttttctcagcttttattggctgtctgccattgtgccagtcccttaaactcaggggagcacagggtcctccacagggtagtgaggggtctgcaccgtgaaggagcctttgggtcccaaattctcctctttcagtgtcgtgagcagagactctttacttctgagctctttccctgaatccttcctgcctccttgaaattccactgcctctcctggtcacagaggttctttggtggtaccctactcgcctgcctctggttaaagcagccaggtgtgtgttctctcacatgctcgcctagtttccctttcagggctaggaggtgcccactctgcaggatcctccatttccagcaccgccccccccccccccgcagtgtttataactcctgtacccagcaggatgaacctgcaaagaatggtgaatcataccctgccctcgtccctgcaggtgtgaggctagagtcattctcagcagctggacacagaacattctggattattatcctgctggaaataacatgacggttttatacaggaaacccagataattcatttaatgccctctctggtctctcccacccatccacacatttttttccctcaagactttataaatcactcatgctgtgttattgcaacacgtttttctagtgtgccttaaatttcacattagtgccaggtcctgtgttgggttccattgcctgaaatttccagtcccctccataagccttggaggtagtcctgttaccatccctaccaaatctggagaaactggctgagaataagccagggttcccacaaaaatcagtggtcaagcctgagattggccccatctgcccaggtgtatatccattcacatgatttctcagtcagttataaagtgagatttatttgaaactattatatatcatatgctaggcattgttggaggttctgggaatataggctggtcaagattattaccttcccaatgttggtgaaaaaagaccttgaattgcctgtcacagggtgtctgagttagagttctcaacttgagggaagtttcatcgaagggggagtcattcagtgatagctccccagggctatgtatgatatgtatgtatgatagctccccttttgacgctgggtatgagggcacccactccagtattcttgcctggagagtcccatgaacagcgtagcctggcaggctacagttcatggggtcgagaagagttggacatggctgaagggacttagcacagcatgagggttttaggtgtgaactgtcctgttccagttagaatccctccaaaatgaagatgcgctgtctctaaaatgatgatgcaagttagctgaaattttttttccatccccactgtattaaaaaaaaaaaaaaagtggtctttgcgttgtatacttgtggtgaacttgtgagagagaaaatccccagtggtggataacaccattggccgtttaccctggatgagcaccatgagttataatgcagttagttcaccactcaaaacctttctctctcccaaacaaatggtgtgccagattattctgtgggcttcccttggagcacgtttatgtacagatgttgttgtggtgatggattttgctgctgttgttgacggccactaaaagttgcccttaggattttgactcatttcctcaagtctccccagctgattaaaggataccaggaaatgagccatggtgtcctgagcggagttcttgaagctgaactgcagtgcgggaacccctcaaggcaatggtcaaggctgcagcggtattttccagaatgaatttagtttaacagccaacaggctagggaagtgctaaatgttgctgtgttcatgtttggtgtctttaaaaacaggcaccgaaagacatttgaagaaatcttaagcatgcaaaatttcacacgtggtctctgtaacttgaatagatatcttcatggctgcaaatccagagtgaagagggcctacaagggagttaaagtttgaatatagagcgaattcagtgtaaatcattgttgaaagtagagaggacttatgaataagcctggcttagcagctctggtttctgacattttggacctgagacagcccatcttttgacttcagacacttaattgtaaactgatagcccttacttggatgtgttttatttggctcacataatacttttttagaaaatactggggaagtatttaaaatatggagaatttgtatcaaaatctagatttctcaattctcttgaagagttgaaaattgcctctttacatgggacctagacaatccctctctactgccagtcaggcttttaggcgtttagccttgggcaccagtgagcacaggtgggatattgcaggtaccttgtggaaggagcacaggcctaagcaatgaagacagccttgtcttagtctgctgactccttgactgacagctttgtgaccttggaacgaattgcttactcttgctgagcttccctctttcatcctagttttagctgtgtgacgttgggaaaattacttaatctctctgtgtcagtgagtatgtagctacatataaagtttttagcatggtgcttgcctggcacactcatggtacaaactcaatacatgtcaagtttaatacataattattatctataaattagaaattattgatatccctaaaatgggattaatgccttctctaatatgattactttaaagattagaaacaaattattgtaaaaatacttggcgcagggtatgggatgggatagccacctaacaaatgaagaaacttcataaatgtgtagaatttgactatttctctttataatccttgcatgcagattttgacaacttttaaaatgaaataaactttaatttttgtcttgaattttatatagcttttgacataacagttgggaatcactagtcttagagattgaacagatcttggactattttttcctcaggaggaaaaaaacccccagatttctccagtgaaaatatttatccctcctaatttttcccattcatcttatgctttagccttagtgcttaccttttagttatgaaatgattttgctagatatctttggctgtatacctttctgacagctatgtttttaaggcgtttgcgaacttttaaagtttatgcgaaattgctattcagggtatatggcatcccagttagagcttgggctctgaaattgacaagctgggtttttattcagttctgcctcttgccagctctgtggcctgggatgagacccttctcctcgctcaagcttcatttcctcacctgtaaaatgggaatgatggcatagggctactaaaaggagaaaattagattatgcacaaaacacattttgcatagcgtcccttacagggaaagcatgggaactccaccgtcaggctgattttaatgtttctgtttcagctttgcctcttaggaaagaaatttagaaatggtttaaacccaagttatatagaggggtttgtcttagtattaatcaagacgagatattaatcaagtcgggtccaactctttgcgaccccatggtctgtagcccaccaggctcctctgtccatggaattctccagaaatactggaatggggcaggaatactggagtgggttgccattcctttctccaaggaatcttccggacccagggatcgaacccgagtctcctgcattgcaggcaaattctttaccatctgagccaccaggaaagcccagatcaagatgaaggttatccatttattgttatttttttacttatatatatatatttattgacctcatggagaggtatgtgggatcttaattccctgaccggagatggaacctgcacccgctacagtgaaagcatggagtcttcaccactggactaccagggaagtcctgaagcttatccatttaatgtctggggttttttttttttttttttaaagattcagttagcgttgtgcatcgttccctccctggttctgtttaaccttattcatagctgctttctataaaagggggtgcagctttctggataaaagtttaggaggggaaagctctgtagatggccattttctcaatgtgaataagtatagctcacagagggtccctgaatcctatgccttgtaaagtggcattgaaagaaagccttgagagggagaggctcctccgtgacagtaagaggttcttctctagccgttgaaggaccaagctgggcttgtccgttgcccccagtactggacacacagcagtgctgagtcaatactagtttgaactctcgcctgttcttcagcacttgtatagagctttgctcagtcaacgtttccgattcagtttagcaaaggtgatcaatccctatgctttggtccttgcaggtactgtacgtgtggactcctggactgtggaggaataaagtgagagcagaaccatcaattcaaagtagaatttggtgtcataagtgcagagaacccaggcaatatttcgaaggagaggagttcacatcttggtgggcatgtgataggtcagggatcagtgaaagtgtccacttgggagataatatttggcattaagttctacactttaaaggagggcagagtgtctgtggttgaggcttgtattggaaaaaaaactgctgaaagagggagcaagagattaagatcttatttgaagatacaattcctgttaggactagggggaaggaattggagggaagaggctggaaaggtggactttggttagcctcaaggatcgttggtgggggagggtcgttttagtgttcggtttggtccagattatgcaaatacctttgtagtcaaggctacggtagacttgacccaggagtggccctcccagctttgctcactagtccagggctgtttgctccaccattttgtcctgatgcacactccccagccagctccaaaaacttgggcacccccttgctgtgggcagctgaaactaaggagtgtgtgtgtgtgtgtgtgtgtgtgtgtgtgtgtaagttttagtaaaatacacgtaaagtttaccattgtaaacattttttggtgtacagctcagtggtattatcttcacattgttatttaagatagaacactgccatcttacaaaaacctagtactctcaatccatgaaacagtccaccagcccctggcaaccatcattctactttctgtctgtacgattgtgacactttatggacctcacataggagaaatcattcagtatttgtctttgtgactggcttatttcatttagcatactgtcttcaaggttcagggcttccttcatagctcagtccagtaaagaatttgctttgttcgattcctgggttgggaagatcccctgcagaaggaaatggcaacccactccagtgttcttgcctggagaatcccatggacagaggggcctggtgggctacagtccctggggttgcagagtcagacacgacttggtgactacaccaccaccttgtggtcgtgcatgttggaatttccttccttttaaaggaagacagtgcgtgtacatggacgtgtctaccacagtttgtttatccattcatccatcaatgaatacttggcttcccccttttggcaattgtgaagaatgctgttatgaacatgggtgtacaaatacctaagggagagtttctgagcctctgttagagtggagttaagcctttgagcgttatatgttagtggggagctgggcaggggtccatcagtcacactctttagatgattagatggtctttggatgaagaactgagcgcttgggtgttagagtgcatgctctggagagaaagagaaacactttagaaataagaggaagataaaggtggcagatttggttcattcacttggccaatttacaggcatcttggatttgccagtcactgatgagataggtgggggaacaggagttgctgtgggtgtggcaacagaactgggggtgctatggaattaacagaaataaagctaagaggatgagcccttttgaaagagggcatgtgatgctatgtttgttctttggtttcttacagactgcattttcttgaaggccaatttcacagaaactacgacagatataaatgaaattcttcttagggtcaggtccaagtgaaaaacaaaacttaagctccaaaggtcaacaaaacatggctctgtaatgttacagtaggatttggggattagaaagaattgtgtgttgtgtaccagtcatgtaatgaaaagtaaattttcctgaaaagaaattgatgacaggaagataattctgcatttattctctgcattagaccatttaaaaagtatgtttattggttttctcagagaataaaatggatgttttaggtatagaagaggatatagagttgattaaagctttgggaaataggccctttgaaagcaacttaaagaaattggatttattaagcctgaagaagataaggtgaagggaggtttagtgaatgacagtcttcaaatatttgcagaatatgagtgaagaatgggactaaataagactagtttaaattgccccagaagggaagtggggtgtgttttgggtgtgtgtgtgtgtgtgtgtgtgtgtgtgtgtgtgtgtggaaaatcctttgattggaaaggttggaaggactttattgtgttaccagaactagttatagggtcttggctgcaggtatgacaaaagctaagtaagtaatttttgtctttaaatggttatgccctgcacccctcagttggtatgatgactttttaggggcctacctgaaatctttgctaaataaaataaccagccccttcactgccgtggctgtgaagtgtttctcatcaattctgagtagactaacaggatcttcacagtttttgcttatgttgaaggtagataataaagaacttggacctaaaattgggttattgattgatgtattggaggtgggggtggtgaaaacaaccacagaatgaattgtacagcgctatagcttaagctgaaggccagaataaaaacaaggaagtttgaggtctaaagtaatctataatcagccgttaattagccctgacctaagaatggctgtgctctgtgattgccccaccgagtggtgattctgagacacagtcagccatgctgcatacaggctgaggtctgcaaggatgaaggagacctttccccttgattactcagggatggactgtttgctctggggctggcccagcattctcacttcccttcgcatctgccccttccctttggtcatttggtgttcatggttcactggcagttgttaaatcagccgaccgtccagcaggggaaggtggtatggaactgcaattcagcagtctcgttgattacatcattacacctgtcatgtcgtcatgcatgaagatttctgagatgtgatttcctgccttgaaggagccgggaatctatggaaacagaagtgctaggtagatgctaatgtagtaaaatttataataagactttaacagttcgggtccagaagctaagacagacacatattgtattgcattgggctgaaggaataggtttcacttttcaggtagaatagctgattgcaaggaagatttggaagccaagttaaaccttgaagagtggggtgattggtcagggtgtgaacaatagaagcagagggtgacagctgtaagactcctgtagaaaacaatctctggagactaacagaatacgagataggataagttttagggcacctgggtttttcttcagtaattgcagtatttcctataatgccatatgtgatgagattttttataagtgtcatctggtcaagtaggtgcttactcagagaagtaattttaggaagagtgtagatctcacttttgcatggtattacatatattgtgggcttgctaggtggcgctagtagtaaagaacctgtctgccagtgccggagagtgaagagacttgggttcaatccttgggttgggaagatcccctgcgggaggaaatggcaactcacttcagtattcttctctggagaatcccatggacagaggagcctggagtcgcaaagagtcagacacgactgagcaacacacacacacacacacacatatacactatgcgcagtgtacgtgcatgcgcgtgtgcacgtacacacgtgtaacacacacacacacacacagtatgcacagtgcgcatccagagtaggtccacggatatgtacttggagctgcttttaagtccagggctgattacccgcccctaccttcctacctatccgcccccagccaagatcacagattttgtatgctcaacatctgatagtagcaagagataatctttgagtcttagcttattaacaaattttaaatatttattataatggtaactcaagtatggaacataaatttgtgcataaatatgcataaattcatttgtttaacaaacaaaaaaacccagcagcaagtaaaaccctcaagccttgaaaagaattctgatcggctctggattccctagccctgccttagaaggtaattaaaaggtaatgagaggtgctggttactgccctgtccaaagcactgatccccgggggggaggtagctgtttatgagaggtggaaatctattatttgagataaacatgtgaatgatggtattttccagggaatgccttgtacttgacctaatggattaaaaaataatagggtaaatgaaaagaggagaaatccttactttttcctttgtatctcttaaacatttggttttaccccaggtgactcagataatttcaaaggacgttttaaaattcttgaaaacaatcagggctgccagtaagttaaatataatggcctatgcagatttagcagaggaattgctttgcagggtttgaacaaaggaggcgttaccaggtttgctaattgtttggtgtctcttttgtattggaagggaagtatttatagaaacagatcaaatgtagatttgacttctggggaaaatattagtgattttgtgtggcctttggctgtttttctacttggctaggatatgttttaaagaaaacaagactaaatagtttaaaaaattgggaattattctacttggaaagactggctccttttaaagcgtgctttatagtttgtaaaatgttaaaaatgtgtttccatcatgttcttcacaatgtagatttcttttttaacagctgatggaagattttcatctcaagaaacagcctggtaaaaccgcacaggctttaggcttttcgtcattagttaaattaaactaggatcctttctctaaaaatacgtcattagaatcgccacttgaaaacagttaattgggaagtttaagtggttttgttattttagtatagtatatttactacagggaaattgtaggcaagtttctagctcactttcatgaaaaagaacccttctttccagtcttttaaaataaactagcatatgtagaagggtttatgaattttttaaggagatctgaacgcgtagcctaatttccattccagcattttcaagggatattattttaaatgatcactttagtttcagaatgagtgccttctaaggagatactggccaggatgccgaaagtgctacagtagtgagcagcctgccgttggcaggtgagcacaatccaggcaggtgagcacaatccaggcaggtgagcacaatccaggcaggtgagcacaatccaggcaggtgcaggtggcttctctctccatgtggaaatcttggagcagcacctctgggcataaagctgtagtgcttaacacttacagcttcattctctccgtcccttcagtgtcttttcagtggaccctacatgtaccaggaatttgtagatttgtttacaaataattattgatatgctggaggggcatagccacgaacaggcaaatatccttgtccttttggggcttatgttctagtgaattcttttcctttcatgagcccaggtttacaaagagcccagaagaaagaaaaggtctagggtctctccttgagaaagcagctttatttagatttatttcagttttgcattagggtcaattaaagacggaagtaaagaaaggcaagatttctcagagggttgggggtcacagggaaggaggggccagaggaggcaaaatggagagagatgggagtgtgggaagggaaccgggttgcggcaactcaggaggagctctgtgagatgtttgtctcctgagccctgtctgcctctgtggtgccccacataccagtctcccagcttgttatggctctagtctttgtaacttcagcctctagcaggtatgagactgtactgatgaaggaggtaccagagtgggtgacagaagtgtccacaatgccagggaatgtcttcacttctcaggagtctgcagagccttggatgtgccaaaagtccgtcatccgtctgtaggtttggaaccattttttcctccgaatggaccagaatggtttttcacagctgagagagatgcttcagggatgcaggctgaatgctctccagtctgtctccaaggacgggaggctctgtacctccttttcaccttctttcatcttttttttttgggggggggtcaaaattgaccatcttcagtttctaatgatacctgtatttagcactgtgagtctgacaaagcacccaggtcgtggagaagctaaaacacaattcagccactgtcttgtcatgctgggcatggtgtttccactccactgttaactgcagtagcgtggatgagaggacaggatgacttctttgccttttagccttaggataaacttttagaggtccatgaagtgataagccctccagtttcaaatcaaggactccccccagtgagaatggatactctgggtacacaggacaggaaagctcctcctctgtccgctcttgggcacagagtaggactcgtgctgcctttggtggcggtagtgtccatgctcaggaaagaatccaagatgaagactggggaacagcgagtggtaccccaggagttgtgtgtggcagagaaggcctccccgctgactacagctgtggttacttaatgacggcattaaggtgagtactcaggtgcttgggacagtgtcagttaacaattctggtgaaactaactgccttaggtatacaagtgtgggtgcttaagtaattatgaaatcagttgctttaaagcacttcatctagagttgatggaagactagtgtttctaagctgagaatagaaataaaataaaaatccagtgtcgtcatcattcattagcacctgttgttttgggtgagagcatcagggcctaaatgtaatagcctttaagtctgctctcagttgactagggaagggttgaagaaaacaagagaggggcctgtgacttctcagctatttcctgggttatttgaaaacttattagcagccattttatttcaagatggaggaattggatctcacaataactttaaaaactatataaatatatacctttaaaatacacagaaatgtaagtgtgtatatatatgtgtgtgtgtttgtatgtatgtgtgtatatatatatatatatatatatatatatactggggcttcacaggtagtgctagtggtaaagaacccacctgccaatatagcagatgttaagagatgtgggttctatccctgggttgggaaaatcccctggagggcatggcaacccactgtagaactcttgcctggagaattcttcagacagaggagactggttggctacattctgtagggtcacaaagagtcagacatgactgaattgacatagcatgtacacaggcatgtatataataattatgggagcatctcacacatggagacaaatggaacgaaccctcatctacccatcatccagcttcagcaattggatcagcaccagtctttcttcttcattttgtcctcccattttgtttttcctttttggccttgccatgtgtcttgtgggatctttagttccctggctaggaatcgaaccctggtccatggtagtgaaagcctgtgtcctaaccactggactgccagggagtccatcccaccttgtcctcccattattttaaagcatatctcaagcattgtagaaattcatttgtgaatgtttccagtatgtagttctaaaatagattcccttctctggctataatgatgccagtgtcacagccttcaaagtcagtaaagttccacaatgtcatcgagtatccaggatttacatttcccttattgaaaataagtatgaaaacataagtggtgaacatataaagttttgctagaatccccacaagagccacacggcctttaagtcatttctaatttgtaggctgtattccccagtgtttgttgaagaaactgagggtttgtcccgtgcaattttccacagtccaaatgctgctgctgcctgcattcctgtggtgctgtttaacatgttctgttccctgaatttcctgtaaacttatcatatcgaggtatgatcatactcgtttgatttcttttttaacaagataacatcagtagatggtatgttcctctataattttattttctttctctgttttggatatactgttgagtacttgcaaagtttttggcttttgttctaatggttgcctttacactgacacctttatataataactcttggttcactctttctgggcccagtttcctactggttgccttctgtgagcaacatttaaattagttattggtctgttctttcccttttctctcctagcttgggatttgaagagatacttttgtactcccagttactatctataaggcaatcagcaagcatattctgctttgcagagactcctccatcccctaacttttctgaaactacaccaaaattactttatcacaatgtatagcagtcacatattctgctatctcctttttaaatcatcatttaatcttagttctgcaagtaaatctatatttaatgcttgccaccacggcttatgtcttgtcttttctgacattttggttttccgtagcttgttctctaaagtacctcagaaagcactcatgggaagtagttcctgaattatgttcacaggagcttgtctgtagcctttgctttttatacttaaaagccaggttgtttgatgtaaatccttggctcatcttttctttgctcaaggatctttaatattttactgtattgtcttttgccataaagtgttgtcaaagtctgctggcaatctgatttcctttccctcatatttagcttgatatgtttgtctagattcccaaaggactgttttttacctttattctttgaagtctagtagttctgtagtgttagatgctctgggttgatttccccccccccgccgcccccaccctatcgggacataatgtgctatttccctggtagctcagatggtaaagaatccactgacaatgcaggggacctgggctcagactataaatttaaatttgcttacagtgcggcttttgctcttggttctatttttcctcttggcttttagagctcccattgtgtgcatgttagatcttctttgcccatcttttattttgacctttctctctcaaatccttttaatatcttcatagtttgatagaataaaaacattttcctcctcttcttttgaggcattattcattttatttgctcttgtgttctttttatttaccctttatttctaaaatggcttttttctttcatttttcttagttttttatctccatttttcaaatcttttctccggtcagctcatttttttttcttttttatttaattgaagtatagttgatttacaatgttgtgtcaatttctggtatacaacaaagtgattcaggtacatatatatatatattcaatcagtcagctcatttatgactttaaaattccgatttagtctattctttataacttttttatttcttttagctcatttttgaagtattatagttttcatatgtgttttttttgaagtattacagttttcatatgtgtttttctggcatgattttattgtctatactagggatgtgattctgttccttactctttctttaaataaaacattcttttctgttgttcactatgagttttagttttcctatactcttagtagatagaaccgttatagctcttcttgcttcacagttctaaagaacccacttacattgttttcatgaagtggtttaaaaaaatggacttgacttttccacttctgagagcttaactttttggtctctgtccccagctcttacctgactgaatctttcctttgccccaatttactcaccttggattcatccttagcagtttctccacagtgtggagctttcgcttagtttgttagttcatagggattaggcctcccccacccccagagcatccccgcacattagaaatacatgggacacaatccctctacacttcctagggaagctggaacctgcagagtactctgccagcttctgtgggtgttccagaatggggatttggagctttccagtgagcacctagtggctgttcttcaagctcctggtagtctgtccccacttccttcatacacagggttcctggggataccttatcacctgggtttgttgtagatgctgtctatgggtttttggttctgctctatttgtccgtttttatggttaggatgaattggggagattcaatgaattacgctcccaccaccatcttgccagaatatctatgggctttttaacatgaaattgataacctttgggtctgctagcaaaatagcaaagtcttaaaatattaaatcactaataatggctgccttatttaaaagtaattttctttcaaaatataagaatgtgtgatagaaaagtcagtgcttctaactatctgcaaactggccactttatgggctacttaagccatattctaaacttggtgttacaaaatgtaatggttgaaattatctgaggaccaggaagtcatctctgggctgttgtttctgaggaaaaggtgtaaagagccacccacttttgccattatttgtttgggttgatattccttgagttctaaaggagacaattctattttatagttttaaaagggttaaaccacatttgcacttttaatgccatctagtaaagataaaatcattacttaattaggtgcatttttctctttcagcttttctccccccagtgaagaatttgcatatctctaattatagtcatttgaaaaaaatgctgccaagatttgacataatattaatttagatttccaaaaatacaaaatttccttcctccaatttgagtttcctccagttggccattgatttaaattacatgctaaaaggtgacaatttagaattggcccccttttcctcctgtatttagggacaaccattattctaaagccattgaaagaagtaaaacttactcagtgggcatagtagaaacttttttttaaaattctggaaaatagagcaagatcatttttagacatttccttctggttttctatgaagagattgagaagaaatcatttcaaaatggagctggtctttaagaatcctttgcaaagggtagcaggcttaatgtattgctctaagtgaatgtcacccaagaaaaattaagggaaaagtcaatactcattaagcagattgaccagccaagtgttttggtacatgttgcaacaaatttgaataaactaattttgtccattagtgtgcttttagaccaatgtgattgttttggtctaattattttttattttgtgtattcaaatgtagaatggctgcagaattaatgattgcagcaattatctgattagcaatttagaaaattggtgagtggtatctgactactcaccaagcagtgcctggcatttcataggactttgtgcaggagcacatacagtctaaggagaggcttgggctgttgtctgtctttgacccactgcaggtgggagccctgaggtcgtcactggttagcctgggctgtggatgtgggctcttgcatgccatgcaccagattgaggtctggtgtgctgcagaagttgtatttgccaccctgtgtcactcttccggagtcctgtagctgtgactggtgaattctgcaatatttcccacttctaaagcttggggattcgagaaatctgtgcccgagtagctgccaaagcttgtcagggggacccagcacgaggccgatttctaggtgtaaaagccaggcagatttgctcactcaagaaaatctgttttttttgcaggtttgctttgaattccaagatacagatccagattaatgctggttaaaaaggatttttttttgttgcactaatgccataggtttctcctggtaactgactgccttgtcggggaggggatggttggttctccaagtatggtcctagacccgcagtagcagcagcattacctggggcttttcaggggtgtgcagactcccttcccaccccagacccaccaaatttggaaactctggggatagggcccagtgatcccttttaccaagctactccagctgtatctggtgtaggctaaagttttaaaaccaccaatcctgagtataaaaatgactgagctttgttacagtgttgggctgagatagtttaaaaaaattaaagctaatgtagcctcttgaatattagaacagtgtgcaattctctgttctctttccgttgcactgaaaagatggataggtgtttcagttgctccaaataggaaagcagacaattgcagttctgggggacaatgcccctggtagaggctgcaaaaaagtcgttcatggaagtgggagtgggggaatggtggtagaaaggcccctctggattgtattttaaaggaataaatgtgattgtgttcctctctgattcaaacctttcagagacttctcagtgttcttggagtaaagtctgtccatgtagatcccatccgagacttccagtggctccacttgatctccactttgcacacagtacctgccgcgtcttctgttctcagggcttgcttcactccttgaagctgtccttgctccttggagctccctgcccctctgcccctgccaggggcaccagttctccttgcttcctggtgcccttcagaccccagctgtcatgtttcttttctgaccccccagggtaggtcaggtcagggcaccttgtatgatgcatgtctccccactctgcacactgtaattgtgtgattggacaattactggttgactggtgcagctaaatataaattctgtgatggggagagagagagaccctgcctttttcagtgctgcgcaagggtccagcctatagcaaatattcaagaaaagtttttggatgaatgaatgaaaggtagggagaagtagtcccatttttattcctaggacatgtggggtgattaatgtatgcaattttgatggtgtgtcacctagtaagttttatttataagaccagttgccaccatcatctaatcctactgctggaagggggattcccttggacaggggagcagaatctcatgatttctagtttggaatctggcttatgggacgcccaagagaggttcttgagtattatgcattcaggaatgtgggaaaagggggaaatcctctgatcatggagatattcataatacacaggccagtagcccgagtgctaaaggtggcacctgggggggtttcagggaaatgactgttgtcctctgttccctcagggcttccgggaagacctgctcactctgctcacagagttgatattggggcaccatctttctccccgcgcacttttagatctgtttgatagaattcacacgcactcctttgcctcattttggtcaatttgtcttggcctaggtaaagctaggatttttcattcctattatagaaggtgacaatatacaagttacctcccagaggtgatagcttcaaagtgggagcattttgcctcaaatcagaaactaagtaagccttggtaacaatcagtggaagggttggcaatagcatctatggatataatttattaaaaatacacatatttagaggagggctcatttgttttttgggaggtgctgcacaggggatcttagttccctgaccagggattgaactggtgcaccctgtagtggaagcagagagtcttaaccactggacagccagggaagtaacttaaatcctctttaaagatggtggtttcaagatctagagtggcttgttggcactctttcttttgatataggaagctgataatctgctctctgtatttgccaaggcaatggcacccctctccagtactcttgcctggaaaatcccatggacggagaagcctggtaggctgcagtccatggggtcgctaagagtcagacaccactgagcgacttaacccacttcacttttgtgtttattttacatctggggctcagcatactctcatacccaatgtaaactcctgatagaaagagtgaaatggaataaacacagtaagttttggaacaaacaccataaacactatttctcatttgcaaccatttattgaccataaggtaggtataggatttagagataatgtctaaatcctgatgtagctcactactgatttatagatgtcggaactctgaagcttggagaggtcagataacttccacaagtttcacatcactcaacttggaatctctaaaacccataccttttccattttattcctgtggcctcccctgctcatctaagctcagaaaagcagagtcatctccagtctctgagttggactctggactttaaaatactgttgaataaagttacagaagttgcaagatgaatgcagagaatttcaggatacccttcacctagattgacatattaacatttcgccacatttgctttgtccatgtatatacatattagtttttttgactcttttgagagttaagttgctaataggcctccctgaaaactcatctgagtctcagccttgggcttatgagaatatggaggccacccaggctgagttccttttctggccccaatccatatggttctaccccctccaccgcccccccccaacccgccccaagcagggagcctcagctcactcttgccctcagcatcagtcccagtcctttaatttagatcctaaaacccatgcaactgcctttttaaaaatgggctctcttcagcaaataaccaacaaaccctcttctatggcacctagtataggcaaataaaaaggggttcctcatgtttccacttactttgtgaaaaagggggagaatggggtttcattctaccttgttcagggctgcagataaactatttgaccccttccctttgacttctgttttcaagagagttggggcttcccttgtggctcagctagtaaggaatctgctggaagtgcgggagacctgggttcgatccctgggttgggaagatcccctggagaagggaacagctccccactccagtattgtggcctggagaactccatggactctatagtccatggggtcgcaaagaactggacacaaccaatgctggttaccttttctctggcaagtgcttcagataaaattcctttttttttttaaatcaataatcttgtttttatttcctctgttttaaaccagctataagatgacattttgaaagtggaaacaaaaggaaaaagttctgtcctcctagtgtttgggatagaggggaaggtgcaatttcccttgtctgacaggtctgttaaaagcagaattcggagtataatcactaattaaatgtattgatttacccattatggtgaaaattagcttaaacatctatttaagccacgtattattccaagcatttttctgagctagaaaagcagagagcgcgctttcaaaaatatagatcacatttgaagacagagtttaaaaagcgcctcaggaaaacaacccaaatgtcaggataaatggagaaactaaaatgtaatgcaatacgcacagtgaaatattattcagccttaaaaaagaaattctgacacacactaacaacgtaggtgaactttggagaccctatgctgagttacgtgagacacagaaggacaagtattgtatgggtccacttatgtgtgatccctagagacagcaagtaacacagcggtcaccaggggctggggtgtgggagtgatggtataatggagagttattcctgaatgggtgcagactttgactttggaatgatggagaagctctggaaatgggtagtggtagtggtcacatgatattgtaggtatatttactgccattccattgtttaattaaaaatggttaaagtgatagattttatgttccatatattttgccaacaaaaaaatgttctaaatacccccattggcatatatttacattatatataacagtcctttgtttattggtaacagtttgatgtcattagaatgagatgctgtagaattaaaactagaacttctaagtgtcacatttttattttgtataagctttcatttgcttttaactctgcctcatttccccgtttgatcctgggaattggcattttgaggaattgtcagtttcctggttggcggacaaggtgtggtgattagattagaactctatgcccacactcactctcaaccgcacatgtccaggacagcgctggcgtgaagtcagtttctgacaggtccttctgcaggtcccttcaagggtctggctattctgtcctctgtgaagcgtgcagccaggggggtctatttagaagtgagatgcctgcatgttagttttccgtggccctgggtaggtctggggtgaagctggcctttgactggcatggctgactttccatgcctttcttgccctgttccttttcactttgccattaaaagaagcgacatctgtcaaagctcttctcaggttggagatgatgagcaaagttattaattgtgtctgctaagatatttaatatttgttctttaagtcaaggaagttaacattgaaagaaatcaagagctcccccacctccaccccccaaccacagacttcacagatggtaagggttttgttctggtgtttattgatttgagtcctgctgctgcttatctggtgcttctttctgtaattgctttccagaactcaaaacatggaaatctacatatttacaacaagagctgcactaggctgttggggaaaacccgctggaaatgaggacgttcctcttttctgctgcacgggtggatcctgatacatcgtgcttgtcaagtccagaccttatctgactcccccaagacacacttcataatggccttgcagatctttgtctaagatcaaaaggggaagttctgcttcctcaaacatcaggttgtatttttcttaggataaatgagtaggaaatatattaagtagccttgtgaaagcctttgctgtggaggatgtgggtgtatctagaagagattttgcaggataataagatgagaaggatcctcctttcattgtccaatgaatgacacatgcttactgttcattttgtaaaatgtaagacctagggactgaattccatgtttaggcccttattctaattctgtgttcaaacagtagtttcaaaacaaagcaggcaattaattatattacttatataataagagaatcgttgctgttcattattgccacaaatagttgagtactttttatgtctagctactggattttttttatacttttttaatcatgactcttttaaggcctaagtatttgattaggtacattcgatgccctctttttagtttttcagaagaggaaacagaggcctgtggacttgctcaagatttagaacctagaatttctctatgtccccaccattacattttttcttcacttccttcactaactgcttcagaggaaaaatttccaattacacatttcatctaaaacatacagataataaatatcttagcagataccagccaattaataactttgcttgttgcctccaacctgagaaaagctttgacagatgttgtatctttaaaaggcatttattgaaagcttgaatccttgatgctgagtcctcttagtatatttccttacaggtgtgcagaacatctaactaacatcttgatcttggctgtgcttttcaaacatcaaaaacagcccaaggatgtcttctcttgccaccagatggcacacttgtgagtggagagccgatggaaggaaggagttgagggttcaagcacagggaggctcccagttggggacttggtggatctgagtggggacatgctttatagcagagcaccaggcctgcatgatttggcccaggatcataataacagccagaaaagcagaaaatggcagtactgcaggaaaggtgtgatcaacacaggtgatttattagttctgggttagtccatgtggttaaggcagaaaatagaggggctgactctggccccaggaggaaaccactctcgggagcagaggcaggaagagcccaaaccacaggtgaatccacccaggctgaaagcctgcagaagggtgagccagtgaagggggtggtggggatacaatcctgcctcctggagaagggcacccccgttcacaacgggacatcccttcctagcatgaatgaatcactcttgctcagacgtccatcagaatgtgggacccacgtgtggtcccatggctcctttgtgcatgaatatttttctgaaaagaacaggtccaaagaaacaggggcttaaaaataatagtgtttttactctgcctcatgcagctcgtggccacattcatcagcccttgcggtcaggcagtagctcccttggtgcttccatcaggtctgccgagggaccttctctgctatctctcctctttgtctcttcttcccgttccctcttcctttgctgttcatcctggctgcctgctcctgtggatattcatcctcccaccttttcacatgggcctcctctactcactgacttcaggagtcctcccccctcaactcccccactcatccctcccctcctgaccctccttcccttgccgtgctttcagggctcctcttctcccatatcctatgactgcagtaccttcagagattctgcaggaattggcgtggtatagggctgggaggttggggtgctggtgtgcagtcaggggtgcaaatgagtggtgtaagttctatgactcagccctcctccctactgtcagtgatcagctctgtattgaagactctgagactggttctctgaccattcctgctcccctcccccccacgcccctgccgctgccatcaaaatctagcatccttctaggagtctctcctcaccatctagcttggagtttcctgcttctttcttaccaatcaagtcttcgtcatctctaccctactccagctaccttgggccttgtcactttcttcttggcccctctgttctttgtagtctccaccaccttcgtggatgacttcgtggacacccctcataccaccctctgaccacccactgggtgctgatgagtatgtctccggccctgatctcccccaccaccccctctcggtttgcgggaccttctagcgaccgcctgctggtccacatatctctaaatcaattttatccccctctagtcttttggcaccctttcttataggtgtaagccccaaactggggtgtcttctctccttcctcttacttcctcactgctcagatccagtgcatcccaaggccccatgttcacccagtaagcccatctctcctgtccatccccacacctggcttatgctctcattagctcctgtctggatctagtctcctgactgttcttgtctctagtcctgttttgtcagtactgtcctcccctgctgccagagggagctgcccccaaaacatgcaccagtagctccccatcagggcaggctcacttccttaacacgacagagaccctcctgggtctctggtcttaacacagcctgatgctgcagggattctgagtaacacatgacttctaagcatgcaccttactggttctgtgacatttgctcttgtggtccctgacctgatagaccaccttctctgtctgcatgcagcctggccaggtgacacacattctttaatccgagctctaggaatcctttctgacccctcttcttaccatccccgcccccatcgccctttttgcctatgcttgcttcattgtactgttattatctgtgtgagtccagcttccccactgggctgccatcccctgctctgtattcctggtccttggccccacccaggcaaaatagtagaagctcaattaccactgcatccgtgaacacacgtttcagaagtgctggctttgtttctgagccctttctctgtgcgattaatgactaacactccaggttttctttctctgccctttggtttctttctttcaattaattcataatctttagaccaacattgaaagacacttgagttgctttaaaaaaaaaaaaagctgtgctgcaggaaatctttgttattttctgatttttaaactgactttcaaatggctgatcattttacaatggtctattgctattacttgaaaccgtaaaccgtctcgaacatggaaacagattttgtgtaatccctaaatatcctggacctaaagtagtgccaagacctagcatgcagagagaaaatttcttttattttcaaaagctaagtacaaatttgcattgtaccaaggaaatgttttttcagtccccaaacatgggaatattacagtgagagacttaaaggatggtgaggaagttgtgtcagttactttttattcatctcaagtctaaaaccaagtagatttaggcagtgagttctactcagttgagtcctttaaatctctctgttacaaaattaaagataactctgaacttttctcctacccgcgcccaacccctcccccacccccacccccaccccgccacaatccatcagaaacaggacaattgtaaattggaattcacatgatccatttaggactgttctcagatttacctgtggaggtgctcttcaaggttggagatactcaggatttgggtgatgtgtttggaagtgttgggaagtgttggaagtagttgggatgtagttcagtttctttgaaagctcatgttttttcccccctgaaaagatgcatttttttttgttgttttacggtatgtattgtaatataaaacaaacgttgacagtaacttgtcactgagtgaaattgaccttcaagaagactgttaagcaatcttctagctgagaaaagcactgctctgtaaggtgacgtcctaaattaccttccccaatcctgcacctgtatgtactcattccttcactgtgtacttactgagcactttgtgtattcctggtaccccgtgaggctttgaggctagagatgggtgcaaaccttgctttggattctgagagctcgcagtttagtgggtggcatggggtcctcataggatgaacttttcctcaaacacacatacaaacacataaaagtcttcctggctcagctctcacagcgcctctccgtggagcttttcatgttcgttttgggcagaatgacagctgcctccttttagtcttgggacctgtttgtcatctttcagtatttttgcttcatttgcattggatttgtctcctttgcaagactgagttccccaccagcatctagttcactaccatggtaataatcctgcgatagatccatgttgacaccagtgacttcttaatggttctggtggcatggcttcaccattgtgggatggggaccatgctggggtcctccatggcaaggctttcttcagtttgcgtgaggatccagagtggattcacaccctccctgccactgggcaagagcatttttaatgacttgtgttcactgagctcatacctccctcccccagctctattctatttccagtatgatccacttgtttttaaagcctcatgggtcttgtgggcaattactacaatccttccatcttgatttttatccagtttgctcctgtgggaatataaaagtatgtcagaaacagtaggatatacaaatcattagctcttttattatgaattgtggttgaatagtatgtgaaccaaagagtagctgaattgcagtagagctttgcacttagcctttacttccccaaaactagaatagcctctctacgtgggtcttcttcagtgccattattttgcctggttccttatatttgtgtccaaagaggagaaggttttgtaatgacttccttactttgaacttcagctgtaaatctggtttttgcagctttagatatttgtgaaggatattttagatatttttgaaggaggacaggtgagacttgtttgaataaacagttgacatggtccagccactactgtagatgcctggggagcctcctgtgctcaagcaagtcaaccctacttatgtgggtcattaagagccttctctagaagtccagtgtggactctcaatgagtctttgaatccaaagattacagaaaatagcaggtctacctcgaatgggcttattttgcttaagaaaagaaaaattgatagctttgttctttttgatggagaagcaaaacctttcctgagtttgggttgactgatgggcattctcagaccgttctgagctgctgtcctccacacccacaatacagagtctgcagtttttaattttagcttggaatgcataatccccccgtgtttgcaaattgaaggccctctctcactcttctagtgtttcacccacatttaacttgaagtacttgtgggtgtttttttttttccagttgagccacccttgtaagagtgttgcttagttatcagagaatcgacagctttccccccacaacatactcatatttcatcaactttcataacatgtgcttagatataagagacgtgggttcgatccctgggttgggaagattccctggaggagggcatggctacccactctagtattaggcagagggacctggtgggttatagtccatagggtcacacagagtcggatactactgaacgacttatcacacacacaatttatatataatatactggcaagtccaaattctataaacaggtttgaaaataaaaccaaaggactcagctggtgtgaggagagaaggaaaaatggatggaagaagaatctggtagccttgagtattcaagtctcttgggcagtagtcagtgtgatttaaaactccgggttattcagcccggagagttaaaagagcttcttctatgaatgcctactttgtattaaggtagtagaaaactacgaagaaaaggtagtgttcatgcccttaagcacagctgtgtggaacgaataaaaataataacagtgattaatttttagtgatgtggatttaagataaatttggggggctcacagaggctgctactgaaggtctgagtggtcagataagaaagagcgaaggaggctgagaaagtttgaggcttcacctggaccttgattttaaattagatcaattttaattattattgatttattgattttaaatctaagaattactgattttaagtttctaaaaaattgtggcaaaatatccataatataaaaagtaccatttaggagtgtctaattcagtgctgttaaagtgtgtttacaatgatgtaccactgtcgccatgtcctaaagaaaatcatcccaaacagacacactctgtagccattaaaagagtaactctccaatccttcttctctttagcccttggcaagctctctcctattttctgtctctatgaatttgcctattactcatacctcatatatgaggaatcatacaatatttaaccatttgtgtctggctcatttcacttagcataatgttttcaaagttcatgttacagcatgtcagaatttcattcctttttaactcctgttttgtgtatacaccacttgcctgttcatctgttgatggacaattgggttatttccaccttctggctattgtaaatactgcagctatgaatgttggtgtacaggtatctgcattcctgctttcagttcttttgggtatggttgaattgagtcttgcattgttgactattcgttagtgcccttttcctctcttatttatgctttttgagatcagggactgtctcctaggtccagcacttaagcaggatagctggaatgaatattttctgaatagatcctggagttcctagcccccagctatcattcactgtactagttggtcctcagaatggtgggttttgccatctgtcatatttggaggactcattaattaacatattcaggaaacagaaaataactcagtgtttttattagtcaaacatcattagggaagtacatttcaaacacaaatggtcctgacatagataaaacttcattcagcaaatgtttgttgagaacttgctgtatacagatacatttcaaaatgtatgattccagagcagtttcaaagctcagttggactaatttattgatattgacttttaaatataaaggtgtgtgtgtgtgtatatatatatatatgtctgtttgtatgtgtatatgtgtgggtgtgtgtatatatatacatatatatatttaacatgaatctctaatctttgtgtttgtgtgtgtgtgtgagagagagagaacattataacagcactcaagatagtttggagaaaagagaataaataatatccacagccacgctctagtatatgctcaagtttgtgggtcaaacttacgtcaaaaaccctgaatgcttctggtggtgactattttaaaatttttttttttttaactctaaagtgtaagctgctgctgctgctaagtcgcttcagtcgtgtccgactctatgtgaccccatagacggcagcccaccaggctcccccgtccctgggattctccaagcaagaacactagagtgggttgccatttccttctccaatgtgtgaaagtgaaattgctcagtcctgtccaactcatcgtgaccccatcgactgcagcctaccaggctcctccgtccatgggattttccaggcaagagtactggagtgggttgccattgccttctccaaaagtataagctagtgatctcaaatttgaaagcttttcttttggtggtatctatagtaattttaatggatgaatcaagccattactttttcttagtagagcagcagaatagacattgtcctcctttggagaagaggtcagtagatttgacatttgttactggggctaggtgtttcggaacctgtccttccaccaatcttttatatggtcagtgattgaagggaatttttgtgtaactgtgctggggtggagagggagtacgctttatgatccttgttctgagggccctaataccccagagtgggcagaggtaagatctagatgtagaccactattgtacatcagaagccaaatgggtgatgtagctgaagattttggagagtttagtgggaacaggtgatcgtgacctggaatagttagagagcaaacactatccatgaagattgggctttcttcctgatgaggaggcaaaataatggagtagttatgtcctgggtgcatggacagagaggtgggagtagcatggaatgaagagcgttcacaggatccttaggctaaaaggattggagaggcaggttgggtccagaggaaacagctagaaattaacaccatgagagtgctctgtaagctgtgagtgatgtcagcgttagctgctgcttgcctctgttcgggtttttgaggctggtgttggggctgttgaaaaagtgttttaggctgatgggtctcagggttatgaggcaggatgatttcggggtggggtgagtggaggctggaggcatggagatctttcaggaaaggatgttctttctggacattgtaaatgatgtctgggatcagggcagcaggagtggagagacgtacagggatgtgtgacagaggctctggggaatgactggtatgatttattgccaaggagagagaagtcaggcagaaatctgggaaatgatgggcccagttacttccacaggaaatgtcaggactgattggagggaagatgagactgttctagagtaatcgtgtcttgtacttattatgtgttttctgcatgcctgaggacagttctgagtgctttccataatagctttataaattaggtgctgttactgtccccactttccagatgaggaaaccaagctagagatgcttggtaactttcttaagaatcacacgcttgcatcctggcagatgcagatctggacagtcatatctctagatgtgatcatactgagggaagtaagttagatggataaacaacaaggtcctactgtatagtgcagggaactatattcagtattctgtgataaacgataatggaaaagtgtaagaaaaagaatatatatatatataaaaccaaatcactttgtttatagtagaaattaacacataattgtaaatcaactatacttcaataaaaaaaaattagaaacctcaaaaaaaaaaaaagaaaaagagtcaagttcttctctaggatgccttctctaggatgccttagtgctttcactataataactaactgaagaaagaatactgcagcatactccagtattcttgcctgggaaatcccatggacagaggaccctggtggtcatttccttctccaggacatcttcccaacccaaggactgaactagcatctcctgcgttggcagctgtgttctttacccctgagccaccatggaagcccagaatgaaatacatttgcagtataaattcttaaaaattttggattaaattgaaagtacttcatttttaaaggagataaatacttgaaaaaccagcgtcttcacttaccactgtgcccattttcattatttaacagtctgtatgactaaaactcaccccaactacttcatttccatagtctggttccaccatttagagcttcagtctggggacacacacagtctggaccatagcacttctcttactcttggtgctcggtaacatgtgatgactaattcactttattgttgaatcttccatgactcaaggctgcccagaatcttctgatctggggtgtactttgcgtgacatcatggggctataattgatggcatggttggaaggcacccagatgaaatacttgtctggataactaaactgagactggtgacttatacacaccttcaggggacaacttcagcccttctgtagagcacttttgggccatccctctctggattctgttcctgctattctcagatgtcagcatgcctatttttttttttttctataaacttgtaaccttttaactgctactaaagtgttaactacagatctatttctgtgctttctcctgccatagttctccaggaagaggtctacacttgcaggcttaaccttgaagccaacagaaattcccactcaactgaaattggatttcctgtggtgtcttcctaaccagatctggggacctgtgttcgctccctttgatcttgctcagcatctgccctgggacccatccaccttctcttggaaaccttttgatgtgttgcctcccttgtcttttttagcctctccccttcctttctgatggtcccattaaaaaaaaaaaaaatctgtcttggctctttcctacccactcttagctggaagaactctgcgaccagtactcagtgtgtccctcttttttctacataaccgtttccttggattatttgatcctgtcttataacttcacaggtacggctcttgccccaccatctgactttcacatcatcaggtgagaagtccacctgctggccaggtgcggcacctgggagcaggtgtcccgcttctcccacctctgcccctttctcaccttatctccatccctgccctgaacgtgtgcagaggctcctgctgtggcttcctctggccgcccctgccgcccactggcccctgccgcccacacgctgcttcctccactggcttggacagcttttgctgctccttcagaacccacgtcagttcttgtctctgaccttgtatgtgtggaggggggcttgtgcctccccaagacacatgaaccatccccccatgaccctgcagaagtggctgaaagccccccagggagctctgttatcctggtgccctcgccctcctcgcccggattgtacatgagtcaaccttctgtgtttttcatggcgccgtcaccactagtgtgctctttctctggccgcctcacatcgtcgtcttttgtcttaaatccttaactgagttctgtggcttctgctgacctgagggccagaacttttcactgatctccttgaatctagttgacctcgggtatctcactgtgcacgagtgtctctggtgcctgtctgtggtatctgtctgtctgctctttctcctcttctgatactgtggaaatccagtgcactcctttctctgtagcctgaagctgtcttgaatctatgtttcattattctgacattgaacactgtgtactttaagctctggagtgtaaggactgtgtgtcccctctacgtggatttttttctcccagcatctaacacagtgcttgcttttgcagctcgtaagtaatgagcagatacttaccttcctgcaaggatgcatgtatgcattgtatgcacaaatgaattaatggctgctgtgattttctaaggttccagtttcatattcagattctagttttgtatctttagtctgaccctctcccagctgagctattcaggcactccttttagtttttgtatctttagtttgctatgtagcaaatttctgtaggcattaggttgatcaggctgcaacccaacgtctgctatgaaatctcatgatctgatcattaaaataagattttcattttctgccttatcatttgaaacacaaagatcttttttttttttaaatgaccatcaccgaataaagagaattgcatagaaataactgaattcacaaagctgtaagaaaagccaggctaaaatgatcatgtatattttgcctaaagagtgatgggccggtagtttttttgttgtgttgtttaatcgtgtgaggttttgtttttgttgtttctagactgggtgtcagcatgtcagtgtcatcacagtggcccatactcagagtggatacttgaccctgttgtgtttaacccagagaataccatggcatccagcaagtcttggcttgcataccaagggtgaccctcaggattaattgagagttgccgaaaataacttaattttctagatgaactttagaaactttaaacagaactctctcaccataaatagctgggcagctttgtcctatttttattgtcgagtacacagaagatggaaatcaatattggaaaaaatgctttatttcgcccaagaaaaagatcatgttcaacacaattttcgtttttcttggcaggctcttctcaaccatctgtgagtccaggggaactgtctctaccatctatccatccagcaaaatcagagttaattgtcagtgttggcgacgagattaggctgttatgcactgatccaggatttgtcaagtggacttttgagatcctgggtcaattgagtgagaagacaaacccggaatggatcaccgagaaagcagaggccacaaatacaggcaattacacgtgcaccaataaaggcggcttgagcagttccatttatgtgtttgttagaggtaaatgctcagctttctttgatgctatgcttagagaactttatatcctgtccttaattaaggatgacatatagatagctgagtcatggataaaatatggctgggtctagaaagcataaaacacaattttcttggttagttttcccgcatcttctgatacacagtggcttcgggtctgactgcagctgaaggtcttgtaaggctgtgacgctcttcctaatgaggttacaatatggtttagcccatttgtcctggtggtgtcagtaaactctgagaataaattaggccctttgggaagacggcattttaatgccttgagatcccagatattcccacttagtaaaaacacttcggggaactaaaggcctctaaaggccccaaacagaccaaagcttcaaatgaattgacccacttttagagagtaaattccagaaacaattcagttggttaagcaccctctgtccttcctgagttcttaatagtagtcagttcattcatttaaaaaattgtgacccttgagaaataaaaggaaaatgtgatggttggatttctgtacctcatttcctgtgatgaatgccgagattcatctgtgtttgtgcttttaataaccttgtcagaaggaggtttcctggtggggccagggcaaggggtaggggaggggtctttttgttggtgtaaaaactagaatacttaaagcttaagagacataccaaggttataggaggagaaatagtttcagttcttgtcctgggtttgcaacctcatctgtgatattgtggaagaagatccaataaatttgtcctagattgtgaatctgagtaacctctggagtcacggttcctcacagcaacacttggataagatcacctgctctgtcttccttatataattgttttcagggagacagaattaatgcacattctagctctatggaaggttagtaaaattgactctcctgttcgctataaagaaggttgccatgaaactgaaactgcctctccttagtttatcttttagtctttcctgggtggatagctgaaaagaaatacatgttcacaagccatagctagcctctgggtatgtttccataattgttgagccacccgtgttctgttctttgacattcaagaaggtactccgtaatttccaggtggtaatgaagtgtcattctgcttattaataggatgggtagaggtctgaataaatagggaaactgctgcattagccaaatcagtctcacagagcgctcaggttttctttataggggaagtcatcctcaataacttagagctatatttaattattaccagtttaagatgtttagatgcctatatagtttgtcttatggcagtgaaggaaatcggggcattagctcaagtgactgagaaagaataagtgggaaaataaccaactatagcctcaaaccatatttcagccattatgagataatttatttgcagaataaattagttaggctgggaggtgcataattcatttaagaaaactctttgaaaattggtcaaaattatatgataagtggatttcaattatgtcattggtttatgtggagcactcaatttgcatgtggaaaggacatttaaaaaacattttagggacttccctggtgatccagtggttaatattccacacttccactgtagggggcatgggtttgatcccaggttggagaactaagatcccgcatgctgcacagtctggctaaaagatgaaaaaacgttttaagtgtaatctgttggctcaaccatgcgtctgtatgatcattacacagtttagaggtggcagcatattgtgtgtacagaatgaggtttgtatagaggtcccagtcggcctaaggctttcccagtccatgccaggtatcccagcataattactaattgtacctctttcacgtccaagtgtcctggtttggacaatcaggtatttgccacagcattgctgaacctcgtaagcttcctttgtgcgtatcaatttatttgattgccagaaattctatttatacgtatctttcaaggaatatgaatagagcacagaccacatgttatttgtactgtgtggccccctgatagttttctagattcttttcagaagctggagggtcctggatactgtgaactccggaaagaaggtcactcgggttagtggagaacactttaccccacactactagatgtcatcaggctgcctattcttggcctatgttctttgcagtgttatccattttagaaaaaaagcaaatagtatataaatattacaaatatttatattcataaatataataaaacatatgtataaatatttatatttataatttaaaaataaaatttaaaataaaaataaaaattataatatttatatttataaatattatagtaaaatattcccagagttttaagagctcagattgtggtatcagtcagacctgggtttgagttctttctagtcatttctgggccgcatcacttaaggagagttgctagttttgagacttcggtttatctgtaaatggtgataatgatagcgcccatcacattataggtgttttgaggattaaatgagaaaggtaaatgtgtaatggtccaatcttagtgactgacatatggtttaagtgttaccttttccttattagtatagttcagataaattctactttcatttgcaaagaataaagtcagcagccatttgggctactggggatttttgctgtgtgagagcttttttttttttttttttaattttttggccgagccactcagcatgcggaatcttaattccctaaaatggcaccccactccagtactcttgcctggaaaatcccgtggacggaggagcctggtaggctgcagtccatggggtcactaagagtcgggcatgactgagtgacttccctttgacttttcactttcatgcattggagaaggaaatggcaacccactccagtgttcttgcctggagaatcccagggacgggggagcctggtgggctgccgtctctagggtcgcacagagtcggacacgactgaagcgacttagcagcagcagcaaccagggatcaaacctgtgccccctgcagtggaagcatttgaccacaggattacaagggaagtccctgaaagcaacatcttagatctttataaaatgtttttattgtcattttatatacgtgctgtttgaaatactgattgtcggttatgccgtagaccctgagaagcttttcctgattgaccttcccttgtacgggaaagaagaaaacgacacgctggttcgctgtcccctgacagacccggaggtgaccaattactctctcacggggtgtgaggggaaacctctccccaaggatttgacgtttgtggccgaccccaaggcaggcatcacaatcagaaatgtgaagcgcgagtaccatcggctctgtctgcactgctcagcgaatcagaagggcaagtccatgctgtcgaagaaattcaccctgaaagtgcgggcaggtacaggcccatttgctttctgctaggtgtcggaacatccattgatttaaaagacttctcactggtccatcttagtatgttggtcactcaggcggctgctctgatcggttctcccagcctcaaagtaatgccagctgcttgtaaattctttatttcacatttctcatactgtatgactggcccaagacccgcctccagctgggtgggtctaccagggaagagcaattagatggtcctggggacagtcattaaacctactgacatgaggacatcccaaagtttcgtaaatgcacagtgttcgtttcaaggaaaacttattgggaagccttacactgtttgaaaagattagcatacagattattcactccttgatttactgttgatctgtgaattgacttcctccttaaatatttaattttaatgccttcttagactgttcacaatctgagaaggaaagtaccagctgacaatggaccttgttatgaatttgacatgaggtagaatattttggtagctggaggatacctagaattttgtatttcagagaacaactaactcaataccagagggcatttagctattgagtagttatcgttaaggcttttgaaaagggttctctttggagttaaggaaagtttgattgtttaagacctgtcattttaagaaataatcaaaatattaattttacagtacatgggaaagttgcctgtttggttaaaaggatgtaattagttgttggtcacctcctcatgaaaccatcacgtgaagtaaagataaagacagcttcactatgctagggtttctacctagctttgttcaggattattatcatctcaaagtagacattctctttttcactctatattaatttacttgagggacacacagtttaattcctgatttcttcaagtacacaagtaatacagataggttagtgccatactttatattttacttaaaagaccacagagtgagctgggcatggcttaggaaaaatggtaagttaaaatgttaagttacaggcaaccagttgtttgagggccacttttcattttattctagccatcaaagctgtgccagttgtgtctgtgtccaaaaccagctatcttctcagggaaggagaggaatttgcagtgacgtgcttgattaaagacgtgtctagttccgtggactctatgtggataaaggaaaacagccaggtgagtggagtatcttctccgttttcctcaatgtatcatgctgtgagggaggtttgaaggcttttctttaaagaagtgttattttttttaaaatgtattttattgacgtctagttgatttaccatgttgtgttaatttctgctgtacggcaaagtgattgtagtacatatatatgcattctttttcaaattctgagagagtctattaatcatcctgaggatgctcagctggtgtgtctgttagaggtggacctgtcgagtgtgttgagatgcgtctttccccatttcatagcaccatatgcagacatgtacattcattatgagtaacaaacaaatgtcattttataaatttattttgagaaaattgaaaactgtagacttactactctatactgtttctctgaatgactttagtggggaaaattttttaaaaaattaacagttcagtgaatagctaccttgatttttataaagttattatggaaactactcaggccagattatttaaaatactgtgaaaagttgccattttccccttccatattaagaaacatgatcttagatattaaccaggaagcccttccctcccccatgaaaaggcctgtccatttgagaaatggatttctttgtgtatgggtctgatttcctcctttgagactgcttacctgagatcaggttgctaatggttttctatttgttttagttgctattaataaaatggttatcttcaatatgaagcatttggacatgtttaggttatcattcatttgacaaatgcatattaaatgtctactatatgtcagatactgtgttaggcatatcttaataaattttggctggttatatttgaagggttttttccctctgaattcactcacattaatagcaaggactttgaaatgtccagtttccctagtattttgcttttaagattcccattggctgatttttcaataatatctgtttgtataatcttggccatctagttaatttgctatcatagtagtttttcttcagtacacacatatgtattacattggaaggaagaaaatactgtcttttcttcttcctcttcctcttcttcctcctcatgctctgaattggcaattttatgcctgtttagagaatcctatgctaaataagtaaccgtggcgattagcataatgcaaagcattatgatggtgttcctgcagacctgtgatggatgataccttgctaagtgaagtctgccattgactaggagaatggaaccaatgtctccaagaaagaagtcctagttttcatatcatataacctaataaaaacaatagcttacatatggatttttgactaaccctatagaacacaatcccatattaattgcctttctatgatccttgatttcagatgagagaacagtttagactgtgtgtgtagctgagcctctgtataacttgaaaattagtctttctgagatgagaaataaattgccccaggcagttttgttctgaaccattttttcccaggagccctgcttgccattcccaattaatccactggtgctggtagataaggctgcagtgttgggagctctttggggaaatcccagtgcgtacctccaagggttaaggaaaaccaaatcacgtgcaaacactatgtaacgtgtgacttgcagatggggctcatggctgaatgccagagttcatccatgaatcttttgctgacatcctttggcttaatttggaatacttagtgctattatagcactatcaaattatttttaaaatctatagaatttgatttgaatcatttgggataagtttaactcacaatgaaatttagggtgaactgagtgttggagagagcttttgcaattgtttgttttaaaatgtaagaggatcttggagtttattcaacacggtaaatcttggttagcttttctaaggcttataaactctcatatttttactgcttttaatcatgatctctgatagtatcctaaattatggcctccaggtttggatgttgatattgtatcaattattgacaaactattccttccagcaccagtgtattcattgtcctgtttagctccctaacaatggactcctgggctcttgcagaaactagagtgaagattcggtaaatgtagaatatagtatgtgacctgtccatcgtctctctgcctttacagaggagaagtctgtaacatgatggactaggagaggccagagaaaaatgtcatttcccctttgtctcttcttaacaattgctgttaggcagcaaaaatgtcagatttctgccaattattaggagaatctcttagaagggaatatcttcaaatcaacacagtgctcccagactagaaaggcctttaaagacttttattctcttattcatttttggaaataaaatttgagaccatagtggcatccttgacttggccaagatctcacagttagttaaccaagcaggtttctcttctttttatttcaaaacatttagctttggcagtcagcttttatgtgtgcttattttagtgtaaaaaaaatttctaaaaatataataacatgagaaaaaagagaaatagctataattctgccactgtacattagcagcactgtgcaataaaaatagaatgtgagcctccaatgtaatttaaaattttctagtaggcacatgacactaaaacaaagtaaaatcaatttttaatgtatttagtccagtgtatccaaaatattttctcatgcaatcaacataaaaattattaatgggctattttatgctactttctttcatattaagtctttaaagtctgggacacattttatatttacaacacccttcagtttgcatttcaagtgcttgcagtctcatgtggttagtccttataaatgctatattgcccacattttttcccatgtttcttttctctctgtccccatgcatatgtatgaacacatggttactgtcttaaggtatactcattctacactttttacataaaataagcatttttaattttcatgtattcatagtctttttgatacctggtacacactaggtcatctctaatttttcactgcagcaaatatcttgaagcttttgtttcctgttgagttgtttctttgagataaatttgctggagttgatcagggctctgaacatgcttcctagttgctttccagaaggattgttctgctttacagtactgtcaaaatggtctaatgctaataggtccaccatagcctgtacagggagtcacccttgatcttgttccatgtcaatatctgctgttgttttggggttttttagttgtttcccctctccctcctatccctccccattgtaataggaatgtgtaaaaaaaaaaaattggaagatgcagaaaactctgctattccgtttcattttttcagagaatggttgtagtttatattatggtttttttccccatgaggtttccatacaagaactctctccatgtcttatgtgcagacagatactaacagtaggatggtgatatcacaagagtaaatgcacaaccttttttcttcagctcatgtgtaaataacttggggtttggtcttacatgtcttatgtacttctgaatgctctttaatagttgccaaaattctgctggataagaacaataggatgaattttcaagttaatcttagacattgtaaatttacttttattattgaaaataatataaacaataaaatagaacatgattgttagtagtgatgtgttttctttcaatcactgggctatagaatagaaaatacataaattccaggcaagagtactggagtggggtgccattgccttttccaaatatgtatataaaacaggaaatattgataggatgcaggtatgctgacttgtaaaatatcagtatcctgtagtatttcttatatactagcttttaaattttggcactgttttttaaaaaaatgtttagcactgcagagaatttggaattacgtatgctgtgattattaagaaatgaattttcatgttttttcccaatcattaataatgactatctttcaatataatcctgtaatatgaagtgttccagtgacagacttgtcatgatgttttattattcttacttaagtagtgtataatgaatgctaatatggagaagttaattgctgctatttttaatttatctaggaaagatcctgaatataaattgtatggtaatctttgatttctttcttcccctccccttctgagagcagcagagtaaagcacagacgaagaagaatagctggcatcagggtgacttcagttatctccgtcaggaaaggctgactatcagctcagcaagagtgaatgattccggtgtgttcatgtgttatgccaataatacttttggatcagcaaatgtcacaacaaccttagaagtagtaggtaaatatctctgggaatgggtaaattacttggcacagtgaatgaagaaattacctaatagtttcctttttacattaatggaatgttaacagattcttagggattttggtatcactgaatgaatgaatgaatgaatacatgaaaaaaaaaggtcttccaaccagagcacaaaagcaaatcctaaccatttaatagaggcaaatgaaaagctgtaactgtgaaggtgtttgaacatgtcattctctgcttaacccccctaccccaacaaatgtaggttgagcttttcctaaaattttactccttgctgaatgacctgagtttggaaatggatggagacttttttctttggagaaagatgtgtgcttagaccttaatgtatttctctggatcttttggtgaggttcttcggccttttggtttattgttttatagttcatgggctctagtcacttggcagcagaaagggctggactgacttttccttctcagtatgcccctcaccttaccctgtcctctgaccctacaggctataacataaaccttcaggaaggcagcccactgggcatggctccttgtttctacagagcataaacaaacatgttaacctgtgccctaacctatatcataagtggtatacacaactggtttagttttccctgatctagcaatcttattaaatacttatttcccaagcatctacttaatgagagcagactggtaaagtacatgatgtttttgagttactggaaagtctagtaattttataattatttcttttacactttttgggctctcagtattgtttgcatttaatctattttcttggtgtttttttttttgttttttttttgggatgccaccgtattttcattgcttgattttgattaagtacttatagggtggtgaaattcttcctcataattttatcaataataaaattatatatttgttttcatttctctctttcccccatatttcttcaataatttatgtaacagtgttagaggtttgcagtttatcctacaattatctcatatgagttaggtgtttctgctcatgttgtaatggaaagtgtctcaccaaaatgaacgtgaaaaagatgctttatttgcaattacagagctagcccagagaaagggtactattctgtccctaaacatgattgtgaaccatttattaatttgaataaaaggctatgcttttaaaatattaaactccataagtgctaatttgctaagttgattagggagcatgctgatatatcagcttcagctccagaaagcaattagtaaggatgttttgagcatattgttgtatgtaatcagatttttaaaatccattcatcaatttccaagaatataactgtataactggaaagacttggggccatgtaatctgaatctgtactgtttcgggagagggttggaatgggacaagagcaggaagagacaagagaaaagtgatctttaggggctgggagtagaatttggacacagagtggagtgatgtgcagcacaagactttaggatgacccctacctagttttgagttggggctctaccacttaaatttcaaatgcaccccactttaactctgcctctattttctcttacgagacacacaacctctaactcccaaggctgtagaagggagaaaagcaacagatattatagatgtgcctggtatagtgtttgaacttgattaactgttagtgtctcatcagtttcttaaaccatcctttataacaagccagataggattttttgattctaataattcttacacttcatgaatttgaaactccattctattataggacataaaaccatattgacgaaactagactgtagaaaactccagaagaactagtattttgttcatgatgattgtgacagaaatcagtgcaaataataatgcctgtgatatttctatattttgcattgtgttttatctttgaatttataaccttgagcacctgaaaatttaatgtagctttcagataaaacatttatttcctcaaaactaacttaaattagcttaaagaatgacagaggggcaccatttatgattcaggtattagaacaagctgttggtttccaacttgatttcatttggatgttttttaaaatttcacctgaaaaatgtttttcccttgatacaaaggacagtcggattcctttttttttttttttttaattctgaatctgtaggaaactaaacagtaaatattctaatggcaacctcctgtggggtaccaattgcatgttagatgctctccggaggatatctactcagtaggtggtagtggtttagtcccaaagttgtgtccgaattctgcgacctcatggactagcccaccaagttcctttatccatggagttttccaggcaagaatactggaatgggttgtcatttccttctccaggagatcttccccacccagggattaaacctgtgtgtcctgcattgcaggtggattctttaccgaaggagacactagggaagcctggagtgtaaatatatttgactaaatagtaccagagacagtgaatgacagtcttaaatgttataattccatcttaaattttgaaaaagaaataaaacagtaagattaaaactccttcatgattccactaacttgctataaccatttttagggtttggtatatggtttatggacttcctggtggctcagatggtaaagcgtctgcctacaatgcgagagacctgggttcgatctctgggttgggaagctaccctggagaagaaatggcaatccactccagtactattgcctggaaaatcatcctccttgcagtccaagggactctcaagagtcttctccaactgcaacaggattttaattatacgtgtaatcttaggttctctttctcacttaaagtatgtggagactctagggtatgctacagtaagaagccggcctcggcctctcactgtgtatattcatgtttagtctctgcctttgggtagccagctatatggctttgcaggacttggtttcttttctcatctataaattaagggttatgaggttctctttcagtattgctgtaagattaaatatttgtcataattattaaataaatatgctaaagaatctaatgcagttcttggaacatagtaaacatttcataaaaggttataaatataatattggcaattattttattatggtctttttcaagctcttcattgtattattatataaccatttctaagggctgctttatttacttaaccagttctcccttttctcatttttaagattattatgactagggtaaatagcacttctattttgcatgtagctatctacctcactaagaagagttctctgtattaaactgaaaagtagataatttttttatctagaaatgctttctaaaggagttgtgccaaattacaatgtgtaattcagcatgctattttaattacacttgcaaaattattaagtttatttcaaattagctttgctagttttccatagaatggatatacattatttttaacagctctgttgaagttttgctatttttaatatgtgaaacgggatcccctatttaaattactagtttatttttccttctatattttcatgtcttctttttcctattaccttaattaatttttctatatgtagacatttgaaaatgtgtatgtattcagatttgtcttttataagttttatttttttgattgcttctaaaaagcctagaaaactgccccacccccacccccagcttggtcaaagtttaatagaagtcagttttgttgtttagttaaaaatatggcttaattgttaaaatgctgttcttaatcatctgtgatgtatgatataagagatctaagtttagttttctttaaatactaaattacattcttccaatatttttattgaacattgaggctctcttcccctccttgatttatgacatcttcttatcacatacaattatattgggtctaggaataggctacttagtccaaataatttttagcataatatgcatcaggactagtagttctaaaagacttatcccatggtgatagatctttaacagagttgcttaagagataaaaataagagaataaacatttccaatgtgtgttctttctcatttatgactgtgattctccaagagcaaaacaaaatgtaaaatggctagttaaaattcttacttggtatgctaagggtgtgctaggtaactgcagtcttgtccaactctttgtgatcccatggactgtaccctgccaggctcctctctccattggattctccaggcaagaatattggagtgggttgccatttctttctccaggggatcttcccaactcagggatcgaacccaggtctcccgcattgccagcagattctttaccatctgagccacctgggaagcccaagaatactggagtgggtagcctatcccttccctaggggatctttccaacccaggaattgaaccagggtctcctgcattgcagggggattctttaccagcctatttggcactaccagttaatactggaaatcagtcagttacctttataatccaaaaatgaagctgtgttatttgttaagatttttgcaggtaacagtttctttctgtttcattctgctgtggttagataaaggattcattaatatcttccctatgatgaacacaacaatatttgtaaatgatggagagaatgtggatctggttgttgagtatgaggcatatcccaaacctgaacaccgacagtggatatatatgaacagaacctccactgataagtgggacgattatcccaagtctgagaatgaaagtaacatcaggtaagaaaagggccttttactggcaattatgcagttctacctttccccttcacttgttgtttcatcactaactcatgtccgatttttttttttttgaccccatggccttgtagccccgctaggttcctctggccgtgggatttcccaggcaagaataatggagtgggttgccattcccttctccaggggctcttcctgacccagggactgaaatcccatctcctgcagtgtaggtggattcttaaccgctacctcatccatttctgtaaccgccaatgtatgagaaaatagctgatacagaaggaagtttggggctgctccctgagtcttcatcatttcattttgccatgcgtttatagagcacacaaaattccgtgcctcagctgtctcatttgtaaattagaggagagtcttgtcctagagttctgaggataattcagagcagtgactagcatatactagggccacagtaaataattcttttcggagaaagaggcacgttagtttattgcctttagttacatttttaaagctagaaggaaactaagaattgttaagcacctttgggccaagcagtgaacccaagtttcttttacatcagacttctcattcgattctcaaataagttgtatgtgcttgtttctggccatacgctgttctcattcccttatgtacattaactcaataattttagtcctcacaaatgctatgaggaggcacgcttacttccctcctttctttagaagaggaatttgagacttcgatgagttaagtaatctcatcaagagccagtggcttataagaggttggtgcctagttacaattggtgttttttttccccctagttgggagctcttggctgttgtgaaaatatgggtgagagaggatactgtcctggaccaaagtctaagggctggaggaaggaggatggattgggtgctgtccaggcttcgtccttaaaggactccgtgactgaaggggcagggaagagggaggagtctggctggggcagccagattggatgataagaggtgataccgttccagtgcgagggagaggggcaaatccagtgacctgagtttggggtttgttgaatttgaacttgcctgtgggatcttgagtggagatactcaggtaggatgttttgtaggtcaggttccctggatgcagctcctgagagtgggattcacaggcaagggcttcattaagaagagagagatctggcagagagttggggaagtagggtagggagggggaaaggagggaaagaggatgtgggtgagctgcggtcctgtcctaggggtgctttggactggggaggaaaggactgcttaggtctggagaggaaagaggcgtaggacagggaggttggactagaggtcaggatttgaaagttgtaagcaacagtaagtagttcagaggagcgtgaatgcccacggaatgtatgcagtgtgacaggagcctgaacaagccaccccccgtgcagagttgattgtggcccttgggggtctagggctacccagagtgctccgtccacactggagcccatgtcagtaactccctgatgatggtgctgaacacagccacctgtgataaccttggtgtaaaacagaagccccggtagcacatgctccgggggacacttggaagaagcggcaggggtaggaggagaaccaggagatgctggtgttgtcagagtgaaggtgagggccatggtattgaccttgctgcatggccctgaagtgtctgctttgagacaccttggtggagatgcctgccagtctggggttttgccaggcaggtgctgttaaagtagggcaagtgagttcaggacactggtgagagggaggctgaaaagagaccagggtggggaaggatgctggccataagaacagcacaggatgagggtgaggttgccttatggtaagaaagcctttcccgactctgttctcatataccaggcatttgtctcaatgaaatatatgtgtgtgtttgcatttgttaacgtggattttgttaacactgaattacatgggatgtagttttccaaaacaggcatggatttccagatggaaactgaaaaagccacacgtttcgaggtaggtgatccccaggtgactgatgggttgttctttttttgtagatacgtaaatgaacttcatctaaccagattaaaagggactgaaggaggcacttacacatttcacgtgtccaattctgatgtcaattcttccgtgacatttaatgtttacgtgaatagtgagtagaacaaatggttccttatctttttattttttattcttttaagttgtggctggtgtttgcaacagctgccgccccgagttcattgtgtactgggtcaataatgtttcatgataattttgaccttaacaaagacctcgtggtttggtggttggaaggatgtgtacaaaaaccaattccttgtcctacaattcgctgaccacatgaccttgtagctggcgctcagatgctgggtgctgccctttgaagtcaacagaagagacatagaagttaaaaataacagtttgagggagaatgtattattattgattgccgagatggggagctggaggttgaataggagctggattatggtattaggtgggaaagaggttctatcaagccccaacaaacgatttctttgttatagcacctttctttcagggttaggtattattttgtgtgaaatgaacgcggtattgatcagctcagagtgtccctgctgtgtaccatgcagggactgggggagaagggagcaagcaggtggtttaaggtgggaggatggccgcggacacctgaacatctgagccctgtgtggtccacgtcccacagtatctctgtacaaaggttgactgcaggggctgtcctcaccagctggggcttttctcaagtgcacgacctgctcttggctctattgtggggtcacctgcatttcccagaaagaggggcaggtgcctgccacaccacaccagcaggggaccaaaggctggaggcctccaaagacatgggattccaagggactgcccacaaaatgaccagcagaattagctatctggggtgtatggtcagggggcggtgggtgagatgacaacctgggacgttccctggaaaacagctcagtaatggctgagcccttcatatgtgttgggctgcaggaggggagccagttccccatcttccaggagcttcctacttgctgcgtggagtaattctccatcgttacctccctgatggagctgctcaccagcatggtggggtgggaagcgtgatccccttacaaatggaaacatctagtgagtgatactcaagacaggtttttggttgctaatctggagtcttttgtctgttccagcatttccaaaattgtatttcctgaaaaaaaggtgttagcgtgtatttagataaagagcatcatatccacatacagatttttctgagctacagacttcctcagcatccttaatacgctaatgtatattttgcctgctcagaaggaggcgtgggattgagcatatatctcagatttgtatgaccacaaaactgcttttccaagggaaacatgttaattaacatctcagttcttcagaacagttttgattacatggtattctcattggcctgcaattcaggtatctctagattaattcagatgttaatcagagattagtgtattacacatgggcaaaattgcctgcttctgagaaatcttcatgttcaagtaattgaagagatgattgcaggtgaatcaatatccttgtaaacatcatatgcattactgtctatacaaaaccttattttaggtgttctagtgcagtgcttctcaacctgatcccaaggaccttgtgtatttgtagtttccaatttgttctgaatcaatactccttaacaaaatatagaaagaactggtcactagaatagagagatggaaaagaacaaagatatataaaatcccagaatggatctttttttaaatttatttattactagactcaacagatataattaagtgaaattgctccttctcattgcttagtcttggcttctgtgcttacatactatgcagcagaactagtagattgtggccgtggtctactcgacagcctcactttgagaagcttagttgttgggaattttctaacattgtgtcatttgtatccatctctctttccctggcttcaaggtcaagggctcattaagatctctctccccctttttcctgcttccatttaccagtatgtggcctgccagtcagtcatgagtcattgaccttagaaagacatctctgaagtcacccttacttttctctgggtgacaaaattgctacgtttttacttaccagcctaacttgccatctgacaggatccatattgatcacctctgctggtgaactcatgcctatttgaaactagagaggaaatggcctgaaccttcccaaatgatcctttcttggattccctataattctggggcctgggtcacaagtactttgcagcatatgctgagctcctgcttcaagcactgggcacaaggatgatggtgtgcagtgtctcttctcgttggctaagctcttcaggggtctattcattgaagtcgcttcagacactaagctgactaaaggcatttacttcacttcacctaacacattggagttcttgatctctagatgctttgacagaggtagcatttttgtgtgaatacttcatctgtttcttgggaactgtgtccccagttgcccttcacagatataattagctaatttctttgctgactttttattttttggattgaaaaaaaaaactagttgatgctctcatggggcaagatttttttatgttaaatttaaaatcaaaagctaaaaataagtttaaaatttaaagtgggaccagttgtgtccattttgacatattattttagtgagccaaatgcatatgtagatctgctgcatggtttattctgtaaataagctgagccccaagggtgaaaggaactgtgctctgcagaaactagaatgaataaaaatcagaataataaatgcatgctgttagtgtaggaattcaggctacttttagtgacagggatgcataattgcttaatagattcagccatgagaaatgctcaaggaaatccttgattttgagtagttaaatatttggtagttgaagacttcatttgctttgaaaatttgagaatattgtacttgtgtgtatttgtgttttaatcacttacgtgggaggctttaagagaaagctatatacatttaaactttaaaatgttttagtactatctttagcttctctaacaaggcatgatttgcatgggtctgttgactcagtgaccttaaaggtggtttgtaatggccaaaaaatgaaacaaaaaaatcggtgattctttgccttcaacttgcattgctataattattcttgaattgcttattgaagatgtatatagaagtcagattcttaattctaaaaggaagtttcatatctttgatgaaaacggccatttgtttccatttcagatcaaaatttggtgaaaaatagggttttaggaactataaaactacccaaaagtgttttcttaatacacgttaccctttccaagattcctgcaggtgttagaaaaagtgataacaccaagattctgtaggttaggtagcctgtgatggttgcttagaaatctgtggtctctttggtgactcatagacttggagaatgaatttaatggttgctggagagaagggcagttagggagtttgggatggacatatatactctgctatacttaaaatatataaccaacaaggacctactgtatagcacatgcagctctgctcaatgctatgtcgcagcccggatgggaggagagtttggaggagaatggataaatatattggagaagggaatggcagtccactccaatattcttgcctggagaatcccatggacagaggaacctggtggacagttcatagggtcgcatggcatggatacatgtaaatataaagctgagtcccttcactgttcacctgaaactatcacagtattgttaattgagtataccccaatagaaaataaaaaggttacattttttttttatgcaaaaaaatataattatagaaatcttacaaattagcaaaaaaaaaaaaagcagtggcgggggagagaaacttatctctttggtaaaaataaatgtcatacaataaaggtttttaccagatctaggacaaataaaaggccaaacacgtattttaaccctaattaatcctgattctcgacttttctgtctctctcttatacatacacaccacattttctttcttcattcatccactgacggagatttgcattgttttcatactttgattgttgtaaaaattactgtggtgaacatgggagtatagatatccttctagataagaaaaaggtctgcattttccataatgggtatagcaattatattcccaccttcccgttatgttaaggaaccagaagttttattttctccgcatttttgcctatacttgttatcttttgttttttttgatgataaccagattgacagatttgaggtgatagctcattggtagttttgatttaccagtaacctagaatgacactggtagcattacatcaataaaatgttatctggtagcatttccagatccacattatgaatttaaaatttgtagcaaatggtatttggagatttctcttcaatctcaaagatctgtcctttaatgacagacctacttcagcttccctggtggctcagacagtaaagatctgcctgcaatgtaagagacccgtgtttgatcccagggtcaggaagatcccctggagaagggaatggcaacccactccagtattcttgcctggagaatcccatggacagaggagcctagcgggttacagtccgtggggttgcaaaaagttggacacaactgagtgacctaacactttcactagctgagtaaaagaatggtggtactcaggtggtggtgcagaatggccagcaggacaagaaaagtctggagaatgaaagggcttgcctttcatctttgggcttacatggaacacaaatgatgttaagctcgattggatatccacatgactgctgaacaccaaattctcagaatcaccggtttcccttcatttatggcaaagtgttaacagaggggttgaaacaatttaaggaaatgctaactaatgtattattcctaaaccactgcatcacataattaacatcctgtctggtgtaagcgattatttatagatcatacagtatacccaaatcagtcaaagtaataaatcattcagaatgaggccttcgatgggaatgttccctttgaccacatctgtagaatctgggctgctttttatatatttgtggtcattgttattatttagtcgctaagtcatatctgactcttgcaaccccatggactgtagcccaacaggctcctctgtccatgggatttctcaggcaagaatactggagtgggttgccgtcccattttccaggggatcttcccaacccaggaactgaacccatgtctcctgtgtttcctgcattagcaggcagattattttaccactgagccacctgggaagcccatttgtggtcctagttaaatccagttatggacggctagaccatccttccagggagaagctccccaatgtggaataccctgcaacaacttgtgcagcccaccatttggcataggtgagtgtagggctttcacgacagccttgtagctagatggctttggatagcctgcttgccagccatctgagtcacccacctggctgcaaatctcagtgattatatttagggtaaaagtaatactatcggatttggggcacctttccagatcttcatgagtcaagagagcagagtcactaggactttgcctttttggaatatggacatgttttccaaccgcttaaccattttaaagtgataggatcttccaaacacttgagtgtccaaaccttacttgtgttagaggctagaattttgagacttaatgctaacacacttatcaagttttgcttgagaggctttgctttttagtatttttcttttcttttttctggttgttgctgctgctgccaagtcgcttcagtcgtgtccgactctgtgcgaccccatagacggtggcccaccaggctcccccgtccctgggattctccaggcaggaacactggagtgggttgccattgccttctctgttttttctggttaggtggattttattcgacctacttctgtgttaaattattggagttcttcaacattaaataaagctagtgctacaaagataagtgctaaataaatcagaactcctttctgatttatttacttgcttttcagagtttgctgtaagactaccacagtatacccagaatgaggcctggtttgtgcctcattatacacttatacacatttgtttttagattaaaacaatgttttcatattagaaaattgttatatgacaggtatgataacttgaaattataagtaggcaaaaataagaatgaaataagtttaattcttccttttaaagttgatttacattttatggattaccagtgctaatatatctcttttaatatatatcttcacagaccacttaaaaaaactttttttgtgggggatgacaaaaatgaagttcttttgcatcaccttgtgttttggtgctaaacagtgaactcattgtgagctgttttccatgccgtaagatttcttctacagtgctgtgcttagttgctcagtcatccgactctgtgatcccagggccatagcccaccagcctcctctgtccatgaggattctccaggcaaggatactggagtgggttgccatgccctcctccaggggatcttcccaacccagggattgaacccaggtctcccgcattgcaggctgattctttaccatctgagccacccaggaagcccagtaatcactttgctatctccttgcatggatatttcgtgatttccttaacctgtatctgataccattttgagacattgtggtgttatgaggtgaaactctgaaataatgtgattgaattttaaaagaaatctattaaatgattatttaaagtttataattatttaatctcaaatgagcaaccttactctagtggcaggaagtcaatgaggttatcatctgtcattgtctttcatgctcctatatcttgaacatatgtctaggaagataggctgtgctgacttgcaggacagttccaaattaaggaatagtgttagtatgggtagctaatctatgtaaaaatagtttcttgtctttctacattaattttttttataggtaatttgagatacttgacagtatgtgaagtctgtttttattttcttttcctgaactcgaaatgagtttttgttcttaaattgcttgggagttatgagtgttgtttttgatgtgacactttaatatttcctccttatgaagaggatctttgtcgatgcaagaattgctatagacatttaaactggaagaataaaggaatatcatggcaacctacttttaaagcagagtttgagtctcatattttaaaaaaatttaggcgtgttggcatgatttttctttcatgtctcctgagaacgttggtggtctggctgggtgtgtagctaatttgggggatctattcaatcactgaactgatgggagaacagggtaacctatctagatcgttaggccctttgttgatatgatctggccatgatttcatgtttatggtgcgaaagcagaagaggttcgtaactgcctacttcagtattctgggccttccctggtggctcacacagtaaagaatctacctgcagtgcaggagacccgggttcattccctaggtctggaagatctcctggagaagggaatggccacccactccagtattcttgcctagagaattccatgaacctggtgggctacagtccatgggggcagagtccagcccgactgagacactttcactttttcattttcgaacttcagctagaattgaccctggccctgggacatacttctctaaaaatagcctgagtagtcgctttcatatgagtggaactgctgttctgtggaaatttcctttccaattgagccccatgtgtttttacatcaaattagtctccttcggttacagatgtatacacggtcacctataatgtatagtggaaatttaaattaatccaagaataggtatgtaatttttccatgggcattgtgttaacccttctcttccacttctaaattaatgtggcaaaatgaatccactacttatacagagtagaaaaatagcactttatcacatgtctgcactcctaggcagcaattggactgcattgtaacctgtgtacacatccccccaccccaacccctgggtcactggtgatggtgctcttgtaaattgagcacagtggttctggctgaggaaggctttctccaagtagtttcatcattttttgtaaagctaacttccaggatagggagatctttttgatggctgttcagaataaggattgacaaactatagccgcctggccagatttgacaagtatcctgtttctgaatggctcataatctaagaattttttttatttctttgggatgggtgtgaggtaggaatgattttaaaaaacaaaatttgtgagatgtgaaaaagtcaaatttcagtatgtgtgaataaaattttagtggaacgcagacttgcacatttgcatacatgtctgtggctacatttggggcagaattgagtgtatgtaagagagtctcataacccctaaagtaaaatatttagtttcacctttcacatgaaaagtttgcatactttttatttaagacatcactttattaggagaatgattttttttttaatgatagacattctgcaaaacataactgggtgcaaaaaactgtagttgaagttttgtttagttggttaagtgaaattctgttaaagtactcacacgccagtttctagatgtctttaagaatgtataaaacaaaatgtaatttctttaatttttttattaaaatatggttgatatacagtgttatattagtttccggtgtacagcaaagtgtttcagttctgtgtgtatgtgtgtatgtattctttttcatattcttttccattatgatttattgcaggatattgaatataattccctatgttatacaatagggtcttgtagtttatattgtatatattagtatccaaaatgtactttcaaaatatctgttctgaagattttttttttaaagtataatactccttttgtaggtaaaagttaacccgagtttttaaatacttttttagttgatttaaattcctatattataatgatattatggcaggaatgtggatgtgacccagatccaaatcaggatagtgacaaattgctacaaagcatcactgtgttgctgataaatatcatcagacctacagttgtaaagacaaattcatccttgtggttcctcttcatttagtgttttgaaatatggacacttgggcttcccaggtggttcagtggtaaagaatccacctgccaatgcaggagatgtgggttcgatccctgggtcagaaagatcccctggagagggacatggcaacccactgcaatattcttgcctggaaaatcccatggacagaggagcctggtgggctacagtccctggtattgcagagttggatgcacacatgtacacaacacacacacacacacacacacacacacatatatggacactaaagtctgagttctctgctgattagagcatgtgggcagatgtgtgtttgtagcaagagttggtggagtcggttgctgctgctgctaagtcacatcagtcgtgtctgactctgtgcgaccccatagacagcagcccagcaggctcccccgtccctgggattctccaggcaagaatactggaatgggttgccatttccttctccaatgcatgaaagtgaaaagtgaaagtgaagtcgctcagtcgtgtccgagccggttagggtaagccaaaaactatgctcatctctttcccaccaattacttgtatacatcctcccaccccaagccccccagctcctattatctgtgctgtgttctttaaaattcaacttgttcttgccttccttatggacctgatggtggtgaaaaggaatttttttttaagatcgtatatctgtgggataaatcagcaaatggttggggtttttaattgcatgagcagtaaattctcagaagagttacaagcactctgaaatctgcctacgagctgatcagtgttgtcggagatgccagatgactcaggtccacagtgctttggaaggagacaaggctattttttttttttttatctctacaggaaatacataacttatacacctcttaggcttatctaaacctccaacttgggaggatttagggaatgtgtcatttggtatactgctgattgcagaatatctaagaaaacacagctcagatttaacctggcgaattgcagggagttatgtatctttaaaagcaaaatgtatatttaatgacttagacggtgcgttgaggcacttacaaaatgcagatgagcccagattttcatttttaggaatcagaattatacctagctcattctgtatgcattaaacatgttccttgtgcaacgtgccacgtatagccccagctgtactcgtgtaatttagccctttcagaatgaagtctcttgtcaccagcattagggacagggctggaattaggatgaggcaagagagatgcctagggtgcagaatttaagaggtgctcactcttggtgtctgcctgaatctgcaggacctggaggatgagagccttcttaaattcctcaccttaggtgtttttcttgccacatccttgtcctggccctgatggggtcccttgaagattttctaaaataaccccattctgggtcagattctcaaattacttaatcttgggggaggtgaggtgggccaggaatgtgctttttaacctcatctctctgtgctttaaatgcaccttgaagtttgaggggccctctgatcttggttggccagcctaagtgccaacaggacaaaagctgcttggcttgcctcaggttatagttgggatagtagcttaaaaatgtgcctgatgaaccagcacacaggaacaagtaggccagccggaccacactgtttgccagccctggccattgtatagctgctaccaggtgtcatgctggaaggcttggatcttagggcacttgaaaccaaagctaaatgtaattgattatgtaattttcagctgttccaattttttaaattaaaaatgttttgtaagtttattattagctgtgttcattgttaaaaaaaaatagaaaataagtcaaaagaatgaaacagatattgatgtataactctactacccatattcaacaactataaatataatacaccctttcagccccctcttttttttttcctagtgagtaatagttaatttcactaaaaatccaggaacaatgaatgacaagaggaaggttgttatgaggaaatcttgtcttatgaacttgattcccatttgaattctgtccagttggattctatccagtaatctttgctatctgtgtgtggaccttctctcatcgttaatctcagtatggaagaaaaaatccacatggccaggtttatgtgtggatttcttttctcgtgacccactattgcaaaaatggtgtaacaggaaagtcaccataggctgatattccaggtcccttcctgtgacactaactgaattcctttggaatttgaaggacttgtttctttgggaagacttaataattaacagctcttactgtgtgtctgccacaggtcggactctgctaggagtcagaagtacggtccgtaagacatggtccttgcccttgagaacagtcggatggaggcagaccagtttattatagaagtgtgtcaggtgctctaaagtgcttcgggagtagggaagtgagaccaaccaacttggctttggagagttgaggatggctaggaaaaggagatgacacttgaattcagtccagagagacctgccgtatggcgcctgccgtcttcagcaaatagcattctcctaaagttccactattttctgtgttatgtcctacttttcagcctggtcacacagttgcccatgataattaaatgaaacttgccagatggacgctttcgcaagacgatggcttgtcttcttgctctatttgtgaaagctggcgttggatccaaactctcaaggatgcccctaccttgagattgcttttggagtgttgctcttttgtgtgtattagccaaatggcctgcccatcagcagggccaggttgaatgacaggtgggtgtgccatgcatgcagacactttgatccctgccaagccattttgcctgcaaggagatgaggtgctgagaggttgttctacaaagatgtcatttatcagcattaccttccttcgaagaaattagtttgtgacctgttggccttttcctctgaccaaatatatttatttttcctatcagttgcaatgtaatcaatgtcagattcccagttcttcaggttaaaacacatacatgttatcatgctgtcttaagcaggttttcttcaatatctaatatctttatatattgaagagaatatgtagagtgaccgatacagttaacttaattggtaccaaacttgattaacctaggaggatgggtactctaaggagaaaaaataataaatgagtagtaataaattagtaattaatacttaaaaaaatttttttgaaaatttatttactggctattctgggtcttagtcaaggcatgtgggatcccaggccccctgcactgggacatagggtcttagtcactgaagcaccagggaagtcccattaattaatgcttttactgtttgatttctgtgaatcattcttgattctttgtcaagaatcatttcatttcattgtcacaacatcactatgaagaattcctgttgttactattgttattcccattggatacccagagacttggtggacagcagagatccaccaaaagccagagcttgggtacagttctgtctaccacacacatggccacccgtagctctctgcacaggcctggggtcggcacctgcgatgctgtaccagggatgcaggatgagctcatcaccgtccctgccatcagatgcttccagtgtagtttactcattctcagagggttcagatccttcaagtgtattaccagtagaacagctgaatgtaagttcttttcctgttcactaatctcaagaatttgcagggtacctttgattgaatatctgttgattattatagttacacagaaatgtcaaattagagcattcctgctgatacagtttactttttcagtgattgtactcaggtttagacatatgtatgagtaaaactcttgggctggtttcctcttctaattttctattcctatcctattttgcatttgaaataaaagtttggagttaaaagcccatattgtgttttactctgatgttttggcttctctttaaaggggtgatttggctccttgtctgcaccatcccttccatacccccatcaaaaaaaggaggggggaaatttccgaggggggggtcttatctcttcccgtaactcctcctaatttcttctagttcttgcaataacttgaaattccagtgagattctgatggcaggaatactttaataaacagtgttgttaagtcacatctgactctatgcaacctcatgcacaccaggcttccctgtccatcactatctcccggggtttgcccaagttcatgttcattgagtcagtgataccatccatccatctcattctctgctaccctcttctcctcctgccctcaatctttcccagcatcagggtatattcgaatgagtcagcttttcacatcaggtggccaagagtattggagcttcagcattttcacctgttagacagttgggaaccctagaatcctgattagaacccatctttcaggttaaccatccctgggaacagaaaccctgccaggtgatcctgcaacctcagtcatccctgacgcagggagagctcagagacccccacatccacaggatgaacagtccacatggcggctgggtagctctaaccaggaaagcctttttcttggtcaaaccttcacatccgcctacctgtaccttccattcactggttcacattctcccctttgagcaacatgttccctcagggtccccttaatccttgagaaagtttttaaaaattcagaaattgtggagggagccttgatgaggtttcccagcagtctgacatatggctgcttctctcttcctccagcaaaaccagaaatcctgacgcatgacaggctggtgaatggcatgctacagtgcgtggccgcagggttcccggagccaaccatcgattggtacttttgtccaggaactgagcagaggtgagatgattattttggataccacttaacactcatcaggaagactgcaattcagttgaatttcaaatatgttttcaaagtattttttttttaaactttgttttgattaatttttttctatccacgtggctttttagagagcataattgctatatttttcttggtagacattaattttgtttgctgaaacatgattactgaacgacatctttattttggtggttatcttttggatttatcatgcaatttccagcctgcaggtagataaagcaatttcccaggacagagtaattagatttccaatatatacacaggaggtaatatgtgtgggaaatgtgactgtagttatcatgaaaaaaattacctcagaagttaattgccaagttaccaaaaaagtaacgatcgcacaattaccatacatatggcgctggggagctacatgttttaaaaaggttttctccttgatgaggtgcccagcccctgagcagaatgcatctggaattgtacttcctctctttcacaatccacacttaagccttaaattgtcctttcgcattacctggagatgaaaatggggtcagcttcactgtttttatccatcaaatgctatttttcgttcaggctttaaagcccagtgtaacatcacaactgagtagtcaaaataataatcatttttcacagaacagctctttttaaaaaaaataaacagcaagttggagaggttatgtaagactgttgttctcagctgggttttagttgagtgttttctttgggggagaagtagggaggttcaagacccctggaaagtttgcccaccggggacacagccccagtagttgtagacattcgctgagaaaatgtttatggaataccaactatatgctggacatgggtctagtgaacaaaatacacctgagtcccattagtgagtttatattctagtgagtagagatggatagaagactgacagctaccatatgcaggtgttacgagccaagggagaaagtaaaaccaggtatgggaacaaaattgctaggcatgtggaggggataatttaaaatagagtcatctgagtccggttcctgatgatctttgccccctggagttcattcaacccagcaggcactatctccatctccctccatggcactttgagccagagcatcctcacttccagggtgtgggggtggccctgtcttcatccttatagactttattgctttcctcctccaccgccttccttttcaaccctgcatacatctgttcacaatcactttatttataaatggctgctgtgtgcagggatgggagccaacggtcttactgaattcatctctaatcctttcagtaaccctccaagatgggtattactaccccagttttatagctgtaggaactgagtcttggagacttaagtactactcacaagtcaacagggtaggtgtttgagtccggatttcaaacccacatctcacctcaaaacctcttccctttctcctcttccaagtgcttttctttctctcggtggcacagacatgttcatttgtcatcacacttccacttgtaaaagggaatatctgattatgaatctctgacttggttttaaaagtatgccgtatccaatgtattcaattgattttctctgagagtaagtctgggctgctgtttctcccacctaggtgttctgttcctgttgggccagtggatgtacagatccaaaactcatctgtttcaccatttggaaaactagtggtttatagcaccattgatgacagcacattcaaacacaatgggacggtggaatgcagggcttacaacgatgtgggcaagagttctgcctcttttaactttgcatttaaaggtaacagcaaaggtatatttctttttaatccaatttaaggggatgtttagactctgcctgccatgtcaatcatgacttttaagtccattccatcactggcatgtcatgtccggtaatatctacattacgcatgcgattgtcatcaaaagtactaagtttcattctgtgctagttttttaataaaatgtgtgcagtaaccatgcactttatgtgttttatgtattttatgcgtgtgtgcacatatgtatgtatgtgtgaatgcatgcatgtgtatatgtataaaattaatcatgtatttccaactgtttccattagaaaagggtagagaaataaaataggggaagtagatttaccttatacccaaacagaaacagaattaggacaattaaatttaaattcaattaaaaattatttacattgttacttaaaatcagttattttaacgtatcaccagataccttgttagaaatttaacattaccttttgtgaaatcatgttaatgagctattttcttttaacatctttaaaatctgacatgaatgactagctctcccaacataagttaaatgatcctgtagacaaattgatgaattggtatgaagttggaagacaaaagaactgggtgcatacattgtaggattcggtttttgttttcttcagttggcaaagacgagtgccaaaaagtggtatttgttcggtatttgagtgatgaggagaagagtcttatattgttcttcatcatggctgtttttttttttccaggcagggcaatgaaaagaacactttaaaaaatgtttttctcagttgtgaaagacactcaatgctccatgtagaaaatttgggaaatacaggaaagcataaagaataaagtaataaaacatccataaaggaaacatcttaaagttaaaggcaggaatttgaagtgcaaagttcactcagatgtcactttttactgaaaaactgcctaatgttattcttgtgctgtggaaatctcaacttctttcccacagttttctggttgaaagttcttatgttaaaagattcctagagtaagataatagccaaggcagggagctcagatgcacctggtttgactcctgctgtgatgggcggtaggtagtgcgggaggtgggtgagttggaggtaagaggtgttgtgtgaagatccaacgcagctaataggttgtgattccacatccctctttaattttagaacaaatccatgctcacaccctgttcacgccgttgctgattggttttgtgatcgcagctggtttaatgtgtatcttcgtgatgattcttacatacaaatatttgcaggtaaccatttatttgttctctctctcaaatgctgtaatggcagaaccattaaccattaaaagatgactcctctttccctttctctctccaccagaaaccaatgtatgaagtacagtggaaagttgtcgaggagataaatggaaacaattatgtttacatagacccaacacaacttccttatgatcacaaatgggagtttcccaggaacaggctgagttttggtcagtatgctacaggggttttccatgacacctttctgttttcacatagcagtgcctttagggaatcccaatagctttctttattttatttcacctgtaacagtaaggtttttttctgcgatttcactgcctttggtagatttagcatcaagtacaccttagggaagtgtatcttgacacatttgtccctaattcctttattggttttgaaatgacacaaatgtttcttcagttccaccaccaccactttactctcttgtcttccttcctacagggaaaaccttgggtgctggcgcctttgggaaagtcgttgaggccaccgcttacggcttaattaaatcggatgcggccatgactgttgccgtcaagatgctcaaacgtaagttcctgcaggctgttatgggtgctcaccgtcagtgtcccagatttgctttttgctaaagtaagatgtttttaattttagcaagcgcccatttaacagaacgagaagccctaatgtctgaactcaaagtcttgagttacctcggtaatcatatgaatattgtgaatcttctgggagcgtgcaccattggaggtaaggacatggccaacctacctcttgtaattggtcaaagtatcaaaaggtgggagattttgatatgatttttgacagtgcttgattataagctccttgcaggattttgacccatatggttaaccttttgctggatttcccccaaccccactgaatgttaagaatgtatattttaatgtatataagaatatatggggcttctctggtggctcagacgataaagaatctgcctgcaatgcaggagacctaggttcatgtgtcttgttcttaagaactatattttgtgtttattgtcatggggtagaacacccaggacatacctagttactgtcatgtatatcacaccaacattgacctcttgaatatcttgagaatgtctcatctcctccagaaagcttttcttttatcttgtgagcttttatataggctggatgactctttagccactaaagagttaatgttcatgtgcatgctatcattaaaaataggcctccaagcctaccagccctcaaatctacaccaaatgagcaaagacttcactttgataaaaaaaagaaatttccagttttgaagcattcattagtcctcccatcaaggctttctacgatgtttccagaaaacattttggtctaaaggaacaaagatgtattaaaatgagccattcctcaagatctggagagatccacggtcaagttgacagctttctgtaatttcttaaaacagcccccataaatgttgcttcactgacatcatgaattgttcatgagagatttttgcccgagttaattagttgtctgttaaataacttcagagctatagttttttaggcttttacaacagggaaagaaaatagaagttcaactgatagggccccgaacacatgtgatggccctccttttcagggtttctccccaccttccagtctcagctggtggttccagtggttggttttcctattatgctgccgtttgtgcttatgctcatcatcatttccataatgacattacaaaaggcgtgaagccctctctgtaaatagaagtgaatcagaggactcacgtaggaagcttgataactaatgatgaaagctgtaactcctgtctaaaaccagcagtcatgcctgacccctaatcaggcagaaattcaggttacaaaggttgtttagttttactccacacaatcctgagttctgctaagcaatgttcatagataggattgtactcgtacttggtaggcttagcattgatcctgaatgtgaatggctgttatcgcccttgagtatttttatggaagactggatggtctgtatatctcacctccctctaactgtctcttaaatgctcatagggcccaccctggtcattacagaatattgttgctatggtgatcttctgaattttttgagaagaaaacgtgattcatttatttgctcaaagcaggaagatcatgccgaagtggcactttataagaaccttcttcattcaaaggagtcttcctggtaagactgatttacataaatagctgttgacaggcagttcatagggtcataagggtttgcaatcaaggctgattctttaaaaaagtgaactgaggtactttgaggtgcaaaatcagaattattaaatcatttaaatgtgattaacggtttagaaagttcaaactgtttttagagattcaaatagtcttgaacttaaatttttgttgattttttaaaatgtatctttagtgtatctgaactttagttctgtttagttgaatgaattctgtacctgtttctctcagaatggttgctgtgtgtcattctctttatactgttgagccagggtcctatataatttctgtacctgtttctcttaccgtggctcgttcttgtgtgtcattctctttatactgtacagtagggtcctatatgcgtctttagagtgagacacgctgtttatagggaacatgggaaaggctgccaagttgtcacagtgaattcctttaaaacctttaacagaatggcagagagctccaaacagctctctgcaccaaggtttctcaccatctacctctgaattatttctgtattccttgcccttttttcccttaacttaggttatcaagaggcacaactactgtagcacattttaaaaaattctgcaccttattttcatctcttttatccttgttaccattctgaatttgaatgtgtcaagagtttcaagttgctttaagaagaattggtgtagtttacaatcagaatagaattctctgccatcttttgccttttctttccaagtgtttaagatccgccatttaagattttctagatttatgcaaccctacagaatcagtcatcatgtctaatcccttatacattttatctctgcagttgtgtgatgggtttcctctttgctttttatttaccatatcccctatattttgagaaggcaagactttgtctcctgaacttaaccccaggccctgaaggagacctcggtaaatatggttaatgggcgattacctcataaagtgtttttctgtacctctggctgaagttttaaaccctagatgaagctttttattttttttcaatcctgtaaactttgagtggtgtcaagtagcagtaaaatacaatataaaccaaaccacctttggatgtttctctagcacatatgctctttatatgaataaatgaaccactttgccttatttctaaaaccttggccccacatatattttttgattttctgaaataatggcctaaatagttcaatcctatgtagtgttttttgtgctttgggatcccatatgggattggaaccaccagcactctctgaaggagattgttgtcatggtgtttctatgctaatcagaagcaggaagtactagaaatcttgaagactctccagccaaatgttacagattcaagaggtccagatggttcagaaaatcatccaaattattggtgtttatctgaaccaaacttggtttttttaaactgtcttccatcagtcgctatatgttaacgatccctgtcttcccccactaataacacatctcaggagcgctggttctttgtctctttcttgtctctttcattttatctctcttgaggctaatttagagagttagaagtgatgtgggataatggttttggttctctgtttctcattaaatccctggtgtcgagagataggacatttctaaccagagtcccctctacagttgaatacaaaaaaagggccatctaattcctagggattggacccaaatgttgaatattaaaaactcatatcttactgagcaagattttcttcatttaaacttggcagtactttctttaaataaatcagcctcttaaaaaacggagtggagagatagcctgcctttcacgtgctcccccatctcccattttatttactcgtgatttgatggatgtttcatttctcgcagcaacgatagtactaatgagtacatggacatgaaacctggagtttcttatgttgtaccaaccaaggcagacaagaggaaatctgcaagaataggtgggtacctaccaaacaataagaacaacctcattgactcagagtttctcataccaccgtggaatctaacatcattcctggtagtaaccggttcttctttacaataggctcagggtaagtgggtatttggagtcagagccttggcatcagcatcttgttgcatatatactaacatatgaatatcaaaatacatcagatacatataaaaaatatgagacttttgtgttcatccaccattcttcttccttaaagattttgtaacttagcccaggtttgggaatattagctttgtgattccgcaccttcctgtccttaacactggggagaggatttgcctgcaagttcacatcagttccctgattaccagcccttggtgctgttgtcactgtcatttactccccttgttttaaagattttaattgctaagaaaatccttcttctcctaacaggttcatacatagaaagagacgtgactccggctatcatggaagatgatgagctggccctggacctggaggacttgctgagcttttcttaccaggtggcaaagggcatggcgttccttgcctcaaagaatgtaagtgggggtgattctcagaagggtcctgtccctgcccccaccgcccccaaaggggtatttagagccatacttaggatgcagagtgtcgcttgaagtgtggtaaccaaaagcagaagaaatatagtttcttcatgttccaactgctgtctctttgaaattcctgttctcataagttttaaagtgcaagcctgtctaaatgagctttctatgaatatattttttatatgcaatgaattcatttagaatttggcttttaggatgtagctgctcttagaaaataaagagatcgttattttatcagccaaaggaaagggtatctcgtagttgcagtgcttgatgaagcatatacttgagtctttttgaagttagacttcaaatattgcatgtatggtttaccaagtgctggggaagtaaggaatcgagagagtaataaacatttgatcagaaggttgagggtaggaagagaatgaaggaaccaaaacaagaaacatgaagggtgagaggaatttcttaggaaaccaggctaacagaataggatgaggttacagatcctacccttaagtgtcattggtgacatttccaaacaattaccaaactaaaagaggatataggatggctgaaataaagagcctcttccctttgtcctttggaggggtcaaattcaagttgtagacattttagaaattctttttaaaaggacatattcaaagagaaacatgtaaaattaaagcagtcctaagggtgggggggaagcatttattcaagttggttttgaaagcaattatagtaattaaagtcctaacaatgtaaaacacaaatttgaacatcattcaaagcataatctagatatttatttttggtgcaccgaatagtttaaatgtaaagcaaaactattggctctatataacataagcagcattctagctttaaatatagctttcactctttaaaaagtttaaaataaatttaaatggttttctttgtctcctactcttctaatagtgtattcatagagacttggcagccagaaatatcctccttactcatggtcgaatcacaaagatttgtgattttggtctagccagagacatcaagaatgattctaattatgtggtcaaaggaaacgtgagtacccactctctcttgacagtccagtaaaagatttttgtttcaattttttaaaaatattgtctttttatgatttttataatgcaaatcctgcctttgcaatatcatgcattttagcagtcaaattaaatatactttagcaaaattccaataataggattcctaattctaattgtgtaattatggggcatgtgaaggaaacagaaatagctttaattttcattataacttgagaatagcaatgaactcgattttgttcaagtgaaacaaatgtggacctgaaggtcacagcaggagaattttattttgagattgacaggctatgtgaaaaagattaaaatctaagataatgttcagaattaggtatatagaatcttggatcttataatcaagagagcttattaaacacattcttaaggaataattggcttatggaacatagtgattttatttcaaagtgctttatttcattgccaattttcattgtatcaacagggcaaccccttggcattagaatgcagcgtcttcacattttaaaagttggggaaactaaaagcacagtgtattttagtgatatttgtctgagatgacacggatcagtagaggctgaaaccagagcctatgattcccagagcaatatcccattagtatgggaagccagtagtcctgaacatatatttttctccatctattttcccaggctcatatctccagtccagagctattcctagaggtagctatttgtgtgcctacacataatgtaatatttccttctccatcactaaggcgtctctgtgtgtgggctgtactagacttggtttttgtagaaatgttgctgggtttactttctgatgacagtatgtgtttctataataataactcgctaaggctaggagtgttaataacaccaagtccccaccatcctggtgcactgctggaaggaagaatgaaaggtggttctctatccaggcctttgaatattgacaaaaggctaatggattccgggcccagtcttgctgagttcgaacctggttctgtcatttagtgagtgtgtcatatttggtaaagatgaccccagcccttcggatttcttttattaatagatctcaagttaagagcccctataagaactttagcacaaaatctgggaggggatactagaaagcattttatttttttcctactgactaaaataactttaagaccagaaaaaaattgtcttcccagttttgggtcctaaatggattatgggaagggttgatttagctttctgtggtaaattaagatccaagaatccagaaatgtctctaagagaaatagtcacagaaagtttggctcgatgttagcggaaggagttcaggatgtgaagttcaactgttgaatttaaactctgcatctgccactcaccaccttggaatagtcatagtcagcataagccactgctgtctttatcaagtggttggttgtacagggcaattttccacatcctcgtgaatcagccataccaaactaagcaccggcacccacattatctcatttaacccacaagacaactcatggaatttgaggtttgattttttgctttacagaaaaatatcctgaggcttctattacagatgtatgtgatgttcccagtgtgttagtaagggataattgtggttgtatttgacagaacacccaaaaggaaagtaaaataagtgtaggagttgcaggccaggcctggtatggaggttctgtaccagggaacaagttcctcaacctttccattttataccatccctggtgtggcccttagcttcatggtccaagatggcctcaagaaagccagccaacatatccagaaggcaagacagtggaggaggagacaagaaggaaaaggccacaggacacatgccaacttcatattaagaaagttttccaaaagctgtcatacaatacttagtggccaaaaccaagccgcatggctgcacacagctatgaaggagctgggcaatgtagtccttaccctgggaggccacatttctattaagagataagggtaactaaccttctttggtaactaacctctgtgttacacaaggccagtggtggagcccaggttagaacccaagtatctgtctctgacaactatgctcctaaccaccaggctgtactcagtgacccccatcttgaaaatgaagatagtattgggcttccctggtggctcagacagtaaagaatctgcctgcagtacaggagaccaaggttcgatccctgggttgggagcatcccctggagaaggaaatggcaccctgactccagaagatagtatacagttgaccatcgcacaaggcagaggtgaatctcagtataaatgaaagccagaactccatatccatggttcctccacgtccttggattcgaccaagcatggatcgtgtagcatttattattgaaaaatattcttgtataaatggacccatgcagttcagaccctcattgttcaggggtcagctgtactcgtgatccacatatttcagaggtagtcagaaaaaaagtaaaaagtcataattcacaagagttccctgctggtcccctggttaggattctgggcttttactgacaaggcctgggttcagtccctggtcagggcactgaggtcctgcccactgcttggcacgcataccccactccaccccacaaaagaaaaaccatcccaaactaaaaaaaaaaccacacataacgtaattctcagaggcaatcagggtcctctgaggtcatatgggtagaaggtctttgtgagatgcccatcaagttctcaccccacctctctataggaatattttctattcagttttttattttttattttttgatttgttaatcacaatgattaatatcgttggatcttccatgcttcatatcgttggatcttccatgcttccattgcaggctcgactccctgtgaagtggatggcaccggagagtattttcaactgtgtgtacacgtttgaaagtgatgtctggtcctatgggatttttctgtgggagctgttctctttaggtaaagtgagccttgccaaaggcaccttaatcacactcagagctaccagtgctctccttgctgattgtcatgctgatttgcaaactgtttgtgcctcaggaagcagcccctaccctggaatgccggtcgattctaagttctacaagatgatcaaggaaggtttccgaatgctcagccccgagcatgcacctgcggaaatgtaagggcccagatgtccttccttcagataacgtttcctcttttgttttcctttttaaaagacagaaacccgtatgttgagggttttcactaagcatagcttgaaatgtcatttggttccttgtaatgacatcctgggcaaatgttatttctgtcgctgagtttcataaaactcactaccaaataaagttttggcagagtctcagtacacacagttttattttataccaatgtcattcagtatgtccagttgtgtaaccctggaattatgtttgaaattgttgaatgggatatacctgcagatcagttaagggcattgaggaatgataattggccctggtcttgcaggtatgacatcatgaagacctgctgggatgctgatcccttgaaaaggccaacatttaagcagattgtgcagctgattgagaagcagatctcagagagcaccaatcatgtgagtatactctagccaggcataggacctccattctcttggttccaaagcatgtcctccttctcaggttccgggggtgaggactaagctacccaccctttctctccttcgcttacgctataaattgagtaggaaagtgaagcaatggaaacaagttctttttgcctagccccctactctgagccaaaggatatgagatgaagaggggaaagagtagagggcttgacgctcagaagtgtgggcatggaagtttccataaggatttgccacttttccttcttcaccccaagtgttggtcatgggggtttgcatcttctctgtctcacatgtcaggccattcagcctttggagggttggggtaaggcacgtagaaaagacagcttattccctgcagtaaaataaaccttctgctcaagtaagtataaccacaatatggcagattgctttcatggccacaaaccgtagagaatgaagagttgcttgaagttgagggatccctcccagtgatttgagaagcagggagttcaaaactcaaattcatgatttcttttgcttttaaggaggaatgagtgattcttcgactcagattttttttaagctgctttttcttctggattgtgcttggagctatcttttcttaagattataccattgatactttcaggttgaagctcgcttttctgggtgtcaaagcacatttcaaattagacagcatttcacacccaagtgcctggttctcaatggaagaaccaccaatttcttagtgaatgacatcagctattagatgggaattggctacagaaatttatgcaccttttaaaaaaaattaggtcgttctcattcctagatgcatcccagcagaaaagcacattctggactatcacttcttatgtaatcaaaccatgggaaaatgagggataaaacagcttatccttggtcagtgtgatttggttcttggctgtaaggtcttgtcagcctcctggctgtaagaatcttcctaagttatttgcagttcccaagctgcacatgtgccctattgttctttgtggggactggcgtattgactgtggatttattttcctcagatttattccaacttagcaaactgcagcccccaccgggagaaccccgcggtggaccattctgtgcgcatcaactctgtgggcagcagcgcctcctccacgcagcctctgcttgtccacgaagatgtctgaagcagagtctgcatccgggggtctcctgacaaccccaacccccctctcttttggtttttacaatggttcctttgttttccttccactcgaatcctactcaagggtagtggacaccctgtctttatgagcaccctttagtggccgatgatttttgtcatcagctaccatcgagctgcctatgttcctaatagcacactagcccttgctaacgagaaaacttcagacttggagaaagggtgggtgggatggactagacacactgagtctttcccaaggtttctccaatttctatctgaaaaatgtagtgatagttttgagtacatagcagtagtcaccttcattcctcataatcacccatgatggtatgatgatgcagcaagactagaagctgaaaccttatcctttgatgtggaaaatagaatgttattcaaaggccagaagcctatgaatatctgggctcaagaaatctagtatttcatgctgggagtaagacataggcc

SEQ ID NO: 113 - DNA, 92262 bp, Hippotragus equinus
  source 1..92262: mol_type = genomic DNA
ggcagatcagagactccgcgcccggggcgcagcgcgagtggcggctgcagcgtgttcaccttcgtcctaggcgcccccgcgccccagtggtctcccagtcttgcgcgcaccagccccccagcgctggaacgcgcttcgcttgatctgtccaacttctagcgctccagccgccctccagggtctgcccgcctgcccccctgccccctgccgcagcccaggcttgcttccccggggctccggaagggaaggaggcgtgtccggagtaggcgggcgggagccgtataaaagtgctggcggcgcgccggcccgggcttcgctcaccgcctcgcgccgggacagggatcgccgcgccaagcactggcagtggagcgggcgttgcgctcgggctcaatgcgtggactatccgcagccgctgctcatgcagtatgctggagctccagaacagctaaacggagttgccacaccgctgcttgggctggatcacagcgctgcctttccttatgaagaagacacaagtaagtagggcgcgccggggagctcgccagctctccaagaaaaaccgtgcccggaggccggcgcgttccggccccaactgccccggcgtgcggggctgtgcctgcccgacgagcctggagggtgtgggggaggcaggagaggcgcgcgagccccagccgcccggcttgggtgagcctggagaggagtgggagggatgagcgagtgtcaagtttggagccgtagcccgtaagttgggaactgtcagtcgggagccgcaattccggtaagacagaaggatctgttctttggccggagagttgaagttattccagaaaggcacgtccttgcacggaagacattttcccgtggatttcgggaagattacacaacagttccccacgcgccacgctcggtcactcgcgtactcagatttttgtgtggctccggtgtgggtgctgggctcgtgcggactctggtccgaatcaaccccgaggtccttattcgccgcgctcagctggcggagaacctgccccaccagccgggggaaacttggctcccgcggcgtctgccaggtttgcggctctaggcgagctctagatagggtaatacctccacattgcacccactttcttccattacagaagagaaaaagttgtataagtgtgcgcgcgtgcgtgttttaatgggcacctctggtggtagttatggaggtaattcccggtgctgcaaaatttgcattatgcacaagaagcacagagggtagagcaccgtctaggggtacaattagttgttgttgttgttgttgtttttttccttttctttccttgcagcagatatctctggcttgtccttgaaaaagggccggcgtggcactcccatccacagttcttttcgccagctctcacctcttcttacttctcccattaggaatttttctgttatctgctgcgggttaggtaaggctgccctctcaccccccagaggttctgttggagattgcaattcttgacatgtgtcgagggggtggaagtggcgggtgaaaagattgtatacgtcttcagttgagaatcttgaaaatgctttatgtaatgacacactaagtgtcacattttcaataaacgtctagatctgggaagggtaccaacgcattcagaagcaagtagaaagacccgagcgcattacactgtgtggaaaagagcaggggtttgggacttggcctggcagaaaggtttgtgtagtctctagggcagctgcccaaggaggaggaaaggagtgcagcgcaggtttctttcttgcaagcaggttagtttataggcagagcacctgggatcaccgcagcgggctgttgaaatgcaaatatggaagactggcaacagaagttttaaagtaattgcttgacttatacatgctttctgctgtgtgaaattaataagcatgggcggggaaccaattctttgttacagtagcatctgctcacatgaatggcagtagtgagatctgggtggagaaccccgctaccttccggttcaggaaaagagcctaaaccttcctatttaaacaagatctctggagacagatcaggttaatgaccaacaatccaaaggtggggggtgggggggtggggtataggacggtactatcaagtaaacttagattcggtaggattgatgatccttgcacccttgcttgctttgcaaaacaaacggtgagctctgtaatctcctttctcactttgattaaatggctgtgtaaatcggattacatggaataattccattgaaaactagaaagaggtcgaactatcctgaaactccttggtggcagtgaatcagtactgctgaccagggacgttggagacaggcaagtattttagaaatgtgacctgctcaggctgagtaaaagtgcaagccctttgggggaacttgctgatgctgaagggctggaggcaaaggagggcagtgcccttggtgaatgaaggcattcattgcctgggatctaatgaccttcaaggtttcctttaaggatacttctagcaattccacattcttgccactgaagaaggagaccctggaaataacatgaaatcaatgaagtaatcagtggaaatgggggagggtgcataggtcctcattcatattgttagattttctaatccaaaagttacaaagaaattttctagtgcaactctgtatgaagggaaagtagcataaggtaatctggcattaagagatgagatcaattgttccagtgaatctaatgttatacttgaaagaatggaatagctattaatattcagtagttgaaatagtcatttataaagatggaatcaatttcaagttctgtaataaagcaaacagttgtgtacccttccattacccaagatataaaatgagaaattaatatacttgaattatgcagctctccaagaatcacagggataccaggctataagacacattctagccttatagtcaagctaaataaatgtggaaattccaccaacaaccacttggggtgtgaaaaaacgattctttcatttatttagcacatttgatggaccagcagatgggcaataattacacggcaggagtcgtgaggagcaatttgaacggttaagttttaatcacatgtctacagaaatgaaagtggtttgcatttttcagatttctgagtgttttatccttattgtgtggttttacggtttctgaagagaattgtgtctctggcttagaacatctatattcagcatataataacaattggacatcttaatttgcaagaccaattagaaaaatgctattagtttaacagggctgatgccatgtttattgatgttgtacttacattttagttttgagatggtttgtgagttttcacaactgctgttgggtttagaaatatgaagataggaaaatttcatctggcaaatggtgtagagaagaccactttaggcacgcattagttctcagaagcaaatagaatgattattagcttttgtttttccaaagaagataaccccctctcctttttttttgtctgtgtgaagtttgtcttctgggtaatgatgcaagtttataaaaaattttaacatttatgaaaagagcattttttaatcttgtccttagaaatcactccatttggaatgtgtgctttgaacaatcctaatttatgtagcttttaattgatacattctgccaaaactttgaaacacaactgctaaatcgattacgtttaacataaaacaaggaaaataaccatatggaaatctgaagggctgagccaaaccaattaaaattgccaaattttatttatatctaactgctgatttggagagagcaaattgtgagtcacatttattctataatgataggtggttgaaatctttccatcaccatcaataatgttaaaaagaataaattcttccccaagtagctagtctgaatatgagaggttcttgcgtggtctggcaagccccacttcatgagcccttccccatccacgtccagggagcacctaaaaatactgaagagatcttaaactttagctcttcagaacgaattctaattcctctcttaccactggtgagaaaaatgactttaggcacgtggtttaatgtcttgggatttccatttgtaatctgtacaatgattatcaaatagttataaagatttgtaaggattaaatgagattttatgtatcccagcacagtggcttgctgtggttacagcctaaatttattatccctagaagaaagttgcctctcggctctcttaaaagccagagataaaactagcttttgcaggtaaatgatgcttaaccatcaaagcatagagaccaagttttcataatctggatctgtggattcaactttataggctgatatgtgtttgtactcatcaaatcaagaatgtgtgaaaagaaaggctatccatggcatgggagatgctaaattctttaaatttttttctttaaaagtgaaaatgagagagtgaaaatagtaaaaggaaatatcactatctctgattcactttcatatttcagcattctcgctttctgagcccctctaatctgaaatctgaggatttatgttatttctttttagaagggactgggtcagcttcttgtccttgatgttcttgaacttgcttttctgagtgaggacaaggattcacgtctgcaagtttctttattgtctttaccaggcaacatgcagtgacatttttttttccccattacgcaattttgggagagtttttttttttttccttgattaccttaacgttcccttttgtaaattagggtaaggcacttggatataaatctgtcaggaatgatcttttatctttgttttctagtacatgaatcatgagcagctgcaggagactgtcttttcagtgttagtcacctgtgtagttggaacaatttagaaaacaaattgaagaaacaccaggatgcttttctgatatatgctgctttcaggattattttgtttggactttgtctcaaagaaaccattgactgtagccttactgatttatagatgcagtgagatgcttttgccttttcacttaattatgggcatgctaaaactgtttactgggggtgggagagaactgtcattatctatctctacctatttccttctgtccagaaaaatggaggtgatggggggaagggtgattttcttataattaggcctcagggacctttttctaaaatcacaatgtgtgtcaggaaggacaggaagactgtcctttatataactctctttgtcttttgactacattttcctatttttctaggttgctgcattgacttggttattagggggtggagttcttttttagcacagatactatgttatatgactttgggaaggtatttgaatctctctggacctcagtttcctctactgtcaaatgaaaaagtaggactaggtgatttctcagtgtcttacacttttaaaattctctaaggttctagtaaaatagatatttgaaccagttggcgtttaagcttccattggttctgaggttcgtgtagtcattgctttggtgtgagtagaaatcataaccattgtctattatgtggttatggagtataaccatataacttatacatatggaaaataaatccagtggggcaaaatgaaggagatttcactttaaactgttctacttttagccttttcagctactacttgatactttttctataaagaatggtgtttacacttcctattttagcagtatccctcactaaaggggatctttcctttctctcttccaatctttaaattctcttaagtgaagaagaatcttaaggcaaagtcagacagccagagaggtcctcttacataactaatgtatgcctgcctccccatattagcttgtcatttctgcccctgcggtctctaatatctgtgtgcctggagtagaaatgtatagaaagagctttcgtggagggtatcagaggtgtgggtcctccacttggctcaggctccagggccagtcactgagcctctgtagtcttgggcgagtctcagacaagtcttgggcaagtcactgagtcttagtcttaatcttagtcttagtcgtatcgtgccctagagttaatcctgagaagagagtgaagaggaggggtctgcagctggagacgcagaggctgagaaaggagggagcagctcttctgcctccgggagagactgttcctgaggatggttccttgccgtctgcgtctctccatgtcctgggtttttgcaggtctaggaccgctctgaacacctcttactcaccacttttccttagcttctcttgccgactgacagaactggaacctgggactagcctggtagccagcagctggatttccttggcagccagaagccactttgctcatgactgacatgagactattcaaagatcaactggaccccccctcttccaggcaaaagactacaaactctacagaaaatagagctgtgacagtgacaacaatgtaccatttgctctcatcatcagcaaaatctggcgagcttcctactaaaaccatgttcagaattgaggcagtgatccagatacttgaacggcagcagtggctttcagttatctggatgtaagaattcagcacttgactttgcaggtgtaagctgttgccttggggcttggagtgcagctgattagaatgtagtctctaaggggggcagttagggtgccttttctgtgttcctggcacacagacagcagctcagaaatctgacagttgccttgcaagtaatgcctttgctctccagggtgaccatgcaaaagggcgtacaagacgagagcaagagcaaagctcagtcactgctcatttgcaaaagcaagccccagcctccttcacctttgcagaaagggtgtccccgctgtctaatgtaccctgactgtacactatgccaccactggagaccgggaaagaaagagcgttacctggagggagccgttgtttgtcttacatacacatactctgttgccctttcaggagcagaagttcatcttttgtgtaaaagccctgtgagtgcttagcacttttgcctctttgtcaccttgacatgaaatctctgaagccaaggacctttccttttatgtgtctttaccaaaagtccaggactgaattacatctggtaattggcctgtttcttctaaatgccagtgtttgagtggtagtaaaccaagttgcctctaaaaattacggcttaatagtggtaatctattgtcacagactctgttttgctgagttttcgactgtttactcggggtccctttctgaagccttcctagatgccttatgaaaacacgcatctcttgatttccaagaagagtgtagcagagaaagtaggttgtgttacaaaggccttgcccctctcctggaatgtgttgtccttataagaaagaaaagaaagatagtgctaagtcgtgtccaactctttcgatcccatgaactgttgcttgccattctcctctgtctatggcatcctctaggcaagaatattggagtggggggacttatagatggctgttaaaattgacttcactgcagaactttagaagggaggagggaggaagggtagagatgtttcatataagatggtttctaatgtgatccagaaaagccaaggattgcaaaacaaaccctagcagttgcacatcagtatttacggttctgtgtaaacctacagtttaacacttctgaaatagtcactgcattagggatttccatttttgatgatcgacttaaacctctgtgattgctttagcttggacctctggcaattttagaaagctgctaccttcagccagccctacccagagatctctgatgtgttctgttaggcagagaatgaactcaggtcattctactgcttgttagatatattatcacacaacaggaactggctctgtgctttctgcctccagatggtccaaagtgggtgctaaaatgctggaatagtaaagaagtcagaaaacattcatgaaaaatccaaaagaagttattagcataatgtttttaatactggatgaaattaattctatgtagaaaagcatagaagtacaaagtaggatttatataatccttccattgttatgcaacaaattgtaacaatattgttttttctaattcttaacccctgcccaggaaagtattttaaaactttaggacacatgtgtttataatgtactgtagccataatggtactctatgtctgaacagtactaggaaatagtgaactataaaaaatagtcccccatttgaaactcggatcttttatattcttaaacaattccatagacttctaacccccaagttgatttgaccatttattgtttgcatttctgtataaatgtcacacataaatgatttggcttgaaggaatgatatttattacagtttgtgtcaagcattcgacatttaaatgtgtagccattttaaatagctttcatgattattttgtaaaatcagatcaccctgataataagattatgccaaaatagcacttagtagaaaacagttccaagatgaatgaattcaaagaccttttcttcttaagtcccatttcacagatgaggaaaccaagataaagtcttttccttgttaactcaaagggttttctggtcatgatctacaccccgagattcagttggcactaccgcagtccattagtgcagcttattcagaacctcaaacatacacattctgctcataagaacattgagtcaaaaacaaatgcagtcagatattaaaaacagctgcctgtaatagaatttggcaacaaaaattttgtggagtgattcacactagaggctcagtgagaataaattgaatgttgtggaatgaataaatgcctgatatcaggttgttaagggctaataacctgttttagaagcctttttctttcttttttttttcaacagtaggcaaattttaactactgtcctggctatgtcatacacagaaatgtctggttaatgattggaaaggctactttggtccccatttacagcattaattttcagtgaatatgcactatttactaagcaaaactggcaggcatgtgagaatacgaaaaacactggactgaagcaaacacagtagtggtcctgccacttactagcagtgtgctcttcagtaagtatttctctctgagctttactttcccagtctctaaaatgggtgcagaaataactacctgtgggtagtattgatgttgtgattaagtgagataggctgtgtaagggcacaggggcttgctcctagtaaataaccagtcccttcttagcaagaagagtgaatcactgaacctttccacaaatccacatgcattatttgcatttcctgactttgggtatagggcttgcaggaataagtgaattaaaataatagagcttgggatagttggggaatttgggattgataatgtacacactgttagtttttaaatggataaccaacaaggacctcctgtgtagcacagggaactcaacttacttaatattatgtaacaacctaaatgggaaaagaactgaaaaagaatagatacacgtgtttgtataactgaatcactttgtacacctgaaactaatacaacattgttaatcaactattactccaacagaaaagttaaaaaaaaaaaaaagagctttataccttaactgccttctttatacacaatctaccttctttagcactcttagcagattaaacagaatttccctccaactttatatcctctacctcatttttccctttgctacgacagtaacaggcatacaaaatgggccaaaaaacaagctgcttaacaaaaggaagaataaggaaataaaaagactagctaataagttaatacccattgattactcaccatacctgaggcaccaggccaccaactgcacaggaatttctcctttgattctagccaaaaaaaaaaaaaaatcttacgaagcagatatcattattgatatcatgttttcaacaaataaggaaattaaagttcagagagattaagaacacttgcccaagattataagtggggcaaaatgcacataagtagaagagtttggatttgaagccaagcctgtttaattctacaaactagattccactgaaccacgtcaatggaatgcacctatgtttaaatatacatataatctgtaaggcttgagacttaaaaaaaaatgtgtgtgtgaagatgatggttttttaatcttataaggggaaggctgagcaggcaaagcagagctcctggggtgagtgaagcattgcttctgactcagctctcaggaccacccaggagtgtaaatggcagtgaagagcagtaacactcccacagtctgggagcccagcgtggtcctcagtctccctagccatcagatgcttgcctccgctgacccattgtgagggaggccccttgttaactggaaaaatgccattttattttatggaattaagaatcactgccaagttcttggtgtctgtcaagtagaatggtacttttgttggcagaggagaaggttgttaaatatttgaaaattgttgcaaaataacttcttcggagaagaaagctgtttcaaggattaccttaatcaatttgctctgactgtcttttcatgctgtttctgaagacaattttcagtgactgcgatcatttttggaaaactactgaataatgtctttttgctaaagctaccagctgttaaagttgtgacctttgctttgtaattccctatcagtccaactgcatggatagtaaaaattcattttctgcattgatgttgtgatttttttgcaacaaatgactgttggaccatccttggtggcagcatcactttgtaacttaccagtttagtggaaatgaaagtgttctttaaaagatcctggaatcattcgaacataggtgaaagaaacagcagaacagaggtgtgatgagctaaacagaactaaacagacagcagttagatggcctgctttggttggctgatcctctgagccttggtttccccatctgccaaaagggagagcagtacatttctcaaaggtggttgtgaaaattatgagaaataatccataaaaagtccttagtccagtgtcagcacctagggaatcctaagtagatattcacagtaatcattagcattaagcaaatggtaaacttacgtttatactgaacagatagcttccctggtggctcagtgaagaatctgcctgccaatgcaggaagtgtatgttcgatccctgggtcaggaagatcccctggagaagggaatggcaacccactccagtattcttgcctgaagaattcattgacagaggagcctggcgggctacagtccatggagtagcaaagaattggacatgacttagtgactaaaccaccagcacagccaagcttatcgatagcaatgaagccttatgttttaaagtgactttcactgcacaatctccattgtcagaatgaaacagaaagttgaagcaatttatccaaatacttcaggcctggaattcactttagtcctaaataattgttttcattccctactctaaccaaaaaactgaaaaagagctaaatgtgtatacttataatcacaagatagtttacctagagcaaagttacttctttctgtcgtgtgctcaagatcacagtgctaatacgtggcggagctggcctaggaatcaggtggtctggaaccagagcctgcattcctcagccctgtgctctacctggaattgggggtacagaccatgagtccttcccctgaattggtgagtgatctcctttccctctctgggaggaggagtcgttttctgcatcaacagaaatatagccacttgttgagggagaaaggaaagagtatggcttttgtgtcaaaagcacctaggttttacctctagctctttattctagctttcaaagggatcttaggcaaattagttaacttggcttagccttctcttaaactgaatttcctctcttgtaatgtggaataatacttcgcagctttttaacctaaaaatagtgttgtatatctgctttgtgattgtcactcacagaattgtactattataaaaaagtgcgtttcagactgaacacatgttttccttctatactattaagcactaaattgtgactatgtaagtgtttgattcattggcctcctcagacactcaaaggagcatggactttggagttagaatgaggcttaagtccttaatcttgttattcaccaagacccactttctttctctgggcttcagtgttcctatctgtataatggggtagtaagggtaataaaatatagttggaagaatacaaagattacatgagataatgtatggcaactggctgacccagactgatgttcagtgagtggtatctctaatctttagggactggaagactccagccaacagatccgtatggatccgtctgttctgtctcttgctccactcgtgtaatagctacaattatttaaacctgttgtcactgaaaagcagaaaagcaaagagagattatgggaaatgggcttgtgtagccgtgaaccgagactagtaggggtctggatgtgggtcagcctcctgctttgaaaccaaggatgctgatgcttgtcttgactgcatcaccagttgtgtgagacagagataattaatagaccagtgctcctcacactgtgttgtttcattcagaggcctacagtcatgctattattctaagccctgactaatgaataagtccagctttctaaataatgaaaattttgagtttattaatgtctcccaaaatgagcctcacactgcttcatatagtatgtattaatagttttggagacgcatagatatggagtcatctcttcaaattggaataactttgagtcgcttaattcttttaacattctgacttcctcatttgtaagatgacatttatagtaatgtttaactcatcaggtggttttgaggattaaaggagccaatacatgaggaggactgttccataccagataaccaggaaacctaggtaaatgctagcaaatttcaagcaaaattcatttttgcgttcagttggttgctttttttttttttttttggttttgtctgcatgcattgaatttgcatgggtgtaggatcaacagtttggggacatttgcattataaattcaggttttattttcttgtgggtgatggtgttttagagtttaagggcttgattgtcaaggttaatcttcaagtaagtgttgtatcaatcaagaccagacgcaagttacttttatcagtccattatttcaggtaaacaagcattcccttcttggacagaacattaaactgttatgttccttttgatggagtgctgacttgcggaagacagaaaacggctcctatttcctgacattgcataatctgaagactgtttctagaggtttcttgattgaatctttgactctcatgccttcaacaattaagttatcaatccaaagaagcgtgaaataactttgggctcaattcacagtaggctttaacataacaacttgagtcaaaactcaagtgaaactcaaaagtgaaaagatctcttttagatgttgaaaaagggggaaaaaaaaaaggtatgtccattctttgaaggcccaaaggagaatggggctgaatcattgatatgtgtgttataagttgtttaagaggagagttagattataaaggggctttttgcatctttccttgaaaattgtgtcctggcacatgaggggaatacagccgagtcaaaacaagcacgtgactgactgcacaagaatctgcgtcctaaattcaactctatggtgttgatatagagtttgtccctctgatggcatcgattttgtaactcaacaaaatgaagagtgaattctgtaatgttaaagattctctgtaatgtacacagtccagattattaaagaagtctgatcatgtggctgccctggttaaaatcctccactgactttatattacctgcaggataaagtccaaaccctcaacacactgtacaggattctctgcgatttggctgttgcttatctccactgctcccttagtggtagatttcgtgccagtgtcacctaaccaacgtgcagtgaaacagtgatatactccacgctgcacttggtcttgaaagcccgaatagcccctctttatcctccaactgatctacctgaaatggttcctcttagaagccctccctgaagtctgttgcccttcttccctgcctccactccccctgtattgagtgatcttaccctatgcttctatagcattaaatatatatgtatatataaaacaatataacaaaattttcttatttgcctgtctacctgcctaaattggttcatgttgatatccttggctagtggtacaccaccaaaatcttattaaggtttttggaaccaaactatgagtgaatgaatcacatcagttgtttcttttactgaatctttgactatagcattctaagcataggtcagactgcttatcagtttaatgcctgctgacctcggttgatgcatggggtggtaccatggagggcgatttggaaggtaggaggaacctcaatcatgcattgatgtcatacctaggaaatgcatataaccatgcatgcagtaccacttggcacaaacatatgttgtttaaacacacttctgtttggagagagaagtgggccacttggggttgtagaagaaggtagaaactgtggattaaaaaaggagttgggtgggtcaagttactggccatctttaaggaaataacacactaggttgaatagcaggttgagatggtgctggctaattcaagatttatagggtctaagagccagaagagaaggaaatggcaacccactccagtgttcttgcctggagaattccagggatagaggagcctagtgggctgccgtctatggggtcgcacagagtcggacacgactgaagcgacttagcagcagtagcagcaagagccagaaaggattttagtagatgatactgctgctgataagggtgaagaaaatgccgattctgattctcatttggtgtaccaggtcctgacccaagtgtgtcacatacttttatgtgcactagtttctccacttatgagtctggtcatgtgattccttccatttacagaataggaataggtagggggtataagttgctcagcatcttacaactagttagtcttaaaaccagtctgtttggtgttagtattgctgacattttctctttttgcttaggtaagatgtttttcttgatacatgataatgaataagactgtcgtaaatagaataaatgaaattctttccagcttcagttcagttcagttcagtcactcagtcgtgtctgactctttgcgatcccatgaatcgcagcacgccaggcctccctgtccatcaccaactctcggagttcactcaaactcacgtccatcgagtcggtgatgccatccagccatctcatcctctgtcgtccccttctcctcctgcccccaatccctcccagcatcagagtctttttccaatgagtcaactcttcgcatgaggtggccaaagtactggagtttcagctttagcatcattccctccaaagaaatcccagggctgatctccttcagaatggactggttggatctccttgcagtccaagggactctcaagagtcttgcttacccacattcaagaagcttcctttcatattttccttccacagtttgtgttggttaatggttagccagtgcaacagacaagggaaggatattgtaaaggattatacactaatgtgtataatctctatcaagaaagtgatgaaagaaatatgagacaatagacagtatgagaactttagatggttcaacctaagtgatatttatggatttaagattgatgtggttaaagaatttagcaaaaatgacgtttcagtactcaggatcaaagatgtatttaagtgtgcaggaagaaagttggagaaggttttaacatgaagtgacattttcaaattttatctgtgattagaagccaccatcttagtgacccaaggcaatgataccacttataacacagagttcttaaagacaaaactattttgatgccaagttttcaaaagttctgaagttgttaaagttatgcaaccttatagcgtgccctaattttactttttttttttcctaatcaggtaagctgcttggtttggggtgtagaactgaaaagttagcatttctgaaacctgtaaaaactttttaaattttggattatactacattataaggagcaaaatctacctcctgtctccatttacaaacaaaagctccaaaaagtaccatacacgagaaggggagatgacacacaaaaattaaacaaagttgacatgcagatttggcacttgaatcatacggcagctgaagcatatctttgaaatttcatttagttggctacacagccctatcttcatttcctgaggaattggattcccgttcttccctgtctagtgagagaatctcttagctctccaagcactctacatgtttatatgtatccctccatccacttttgattcctcagcaaaacagctgctttgaaaaaagcccaaagaacagtcttacaatggatactcactcatcttctttcctgacccaaggagaaattcctttctttcttttttttttttttcctctaggatttttttagagttaaggcttgcgggtttaaagtacattttccatattcttcttttgtcttattatacaaggaaacttaattgatcaatattatggagaatgctaagcacaactctatggatatcttggtgaaaaatcgcagtaaaagagcttgctgtgtagtcatgcttattagcgtgaaaatgtctattttggaggggagtggtggtgagggcagtgccatctgagtccacgcctgtgtagtctggcatgcaacttttagtcaaactaggaatgggtctgatgacataaaaaaagtcatttagttctgtgaggtttctttttttttggctgcttcagtagggatgacagatagagtcaaccagtgctttgggaaaagataagattagcatttaaaagcttaacgtatgtcatcacttctgaacgtgcctgctccctagtgaaatcatattccctgcatgtgtttcccagtgcagagccaccatgaataattttttatgaatgactgctttagaaattttgatggattgcagctccctggggaaacagggagaaatttatagatgcatcttatactgaattctaaataagagtgtataattgtacttacttccactgaacttactataggaaagtgtctgcattccaggtcttttttttttttttttcctaatgcctttgttgagtcaataaaagaaagttactgcacaggatactcatctagttcctttagaaagggaattgggattttataggcaggtcagtactttgggttattacctcattttggccaaatctgccagtaaaaacagtttatttagcatttagcagagcactgtgctagaggctagagctacagtagtgaagaaaacacatcattcctgcttttcatggggcttatagggtagccttggttttatatccttattttccattttcatggggcttgagaagtatttaaaggtacaaagaaaatggtttaaaattcaaactgaaaggcatttagctgatgttgcattttggataattaagaaaatgttgcaacattcatatgtgtcatcattagtctttggcagttactggattcggaaggaagacagcggtttatgtccaatggatgagcaacactgtttcatttatccttcattcattgattaattttatccttcattcattatggatttattgtatacatgttaatgagaagctcctctgtatttagcactgctctactcaccctgaacaaaacagcgagagaaagtacctgccttatggggctcaaactcaagagcaggagacaggtaacaagcatgctaagtcacttcagtcgtgtccaactttgtgtcaccccatgaactgtagcccgccaggctcctttgtccatggggattccccaggcaagagtactggggtgcgttgccatttccttctccagggggtaacaagcctgcctggtgggtaatgtcagtttcatggtgaataaggacacctcctgctaaggagtgaatcacacactatcctggcttcacctgtacctcatttcacatacctgagtttattctctatgcaaacaatttaaagcgtgctcccaccagatctgtactatataaaagagaattagatggtaggagtgcttaagtagttcaaggagctgctgctgctactgctaagtcgcttcagttgtgtccgactctgtgcgaccccatagatggcagcccaccaggctccccctccctgggattctccaggcaagaacactggagtgggttgccatttccttctccaatgcatgaaagtgaaaagtgaaagtgaagtcgctcagtcgtgcttgactcttagcgaccccatggattgcagcctaccacgctcctctgtctgtgggattttccaggcaagagtactggagtggggtaccattgccctctctgagttcaagtagctagagataagactgatgaacaacaatagcagtatcctcatcctcaccccattttcccacttgtcagaaggaacagggataagaataaatgggccatcaagacagttttctcataatttttgatgaaaagtgcttcagtggaaataaaactgtgatctgagagtgctggagctgcttcaggcaggtcacctgggaaggtttttcccagaaggtgatatctgaactgaatcctgaatgatcagaaagatttgcctcattcacagcccaagagggagaaagcttgtaagggtggtacaacagcttagggcagaaatatatccccggtgtttaaggaccagaaaggaggcgagtggagctggagtatggtgaggggagaggcatggtgagactgagcatggagcaggacaagtctgtgttaaatggggccttggagaccttgatagggatgtgcattttatcataaatgtaatggaaaggcattctgaggttgtaagcaggtggtggtgatttgcaatgcctgaagaccacagtctcgtgagtagcaggcatggaagcaaaggaggctatttagaaggtccttggagtcttccaggcaggagtgatggagctgggcacaactggtactgctccgagatgagatggaaggaagtgagtgtttcgagacttatttggctggtagaactaacggaacttgacagagttaatgtggcactcggggaatgggaaggatcaagtttggtgctcagggttgtagcttgagccgccaggcttcaggtctggaaatgacattactggggatgcttgttcttggtgtggttgaaaagacagcactgataaccacagtagtggacatttaggagggtgagctagctgtgagggactccataccaagtgcatgtgtgactttagtcctcaaaaagcttgtgaagtgagttccattattaggtccatgttataggtgaggaaactaaagcagagaaagataactttccaaaggccatgaggcaagtctgtggcacagtagagattaaatctagagcagcctgattgtagaatcactgcttctcagccccccactctgtaactgttctctgtgcctgagtaaacacactctcttttctaaaaccgtcttggattattactgaagctgaagttgacttttgaaactctactcttcaggttaacattcacctattgcccaaacagttccgtctcactattgctccaggtagagatgaccctgtcgatgctgggagagctgatcccggatctaagctcagaggtcagtttcacaacctcttttaatcaccttgttgtgctgatctttaatatatgaggaaggtgggaaatgaatgggattgtgacatccactgttactatagtttttagtttaaaagtcagcagttagaaaaccaggagttatgataaaatagctacaggcataccttcttttattgtgcttcactttattgtgcttcctagatattgctttttttttttttttttttaaacaaactgaaggcttatggcatccctgcctggaccatggctttcagcatcacttttccaatagcacttgctcacttcgtgtgtctgtgtcacggctttttgcaatatctcaaactttgtcattattataatacggtgatctgagatcagtgatgtttcatgtgacttctgcgacttactgaaggcccagatgataggcggcattttttaacaatgaagtgttttctaattaagttctatacattgttttagatgttattgtgcacttgataggtgatggcatagtataaatacaacttttgtatttaccagggaaccaacgtattagtgtgacttgcttgctttattgcagtggtctagaactgaccctgcaatccaagatatgccagtgtagctttaacgggcttcccaggtggtgcattggtaaagaatttgcctaccagtacaggagatacgggtccaatccctgggtcgggaggatcccctggagaaggaagtggcaacccaccccagtgttcttgcctgggtaatcccatggcagaggagcctggcgggctacagtctgtgaggtagcaaagagctggatgtgactgggcatgcaccacacgtgcatagctttaacagtcttgccttggtctactgtgtgccagtccctttgtataacagctttatataacacagtcttctttattaatcttttcaaatatccaaagaaatgttatcatcatgagaaaaccaaaaggaacctcagagtttccataatttgttgaagtttacagcatgtaagtggcagaatcaggatttgaatttacatcttactttgctgattttcttcttttctaaacatcatctcatctctttcataagcagtgaacctgcagctgaaatatattgttaccagagggacatgtcctgggcatgtcaaaagtagatactttgctgggcttcaggtggtagaattaccagaggaacgtgttttaggcatgccatagatacatgattgctgggcttcggatggtaggattacattaacagtctcatgaactgccaaccaaaaactgcctttaaaagaaaaaaaattaaatgattcttattttacaatttgaattttgaaatattaatggaaaattcctaaggagaatttagactgacctttgtgagagataaatgctcagtaacttaaatgtttctctcctagcattgcttggggtttagttgcaggcaatacaatctactctagctagtttaaacattaggggatatgttgaagtatatttgatggcttatgaaaccactggaagggctagaagaacaggttgagatttcagaacactcccacacccagaacgcagttaagtccaaggcagcctgtgaagcagctacatacagccggtgctgtccagccagggctgctcctgatggcaggccctccctgcacccgcccccccccccccccaccaaccaccactcagcaaaatacgtgcccagcatccatccagcttctcttctcctggattttctttccatatcaaatcttacagagttgtgcctgactgataaaatctaagtcacatctgcaaccatcgctaactgcaaaggagtccaagacatggaaattttaattttgcagccattacaatacagaagaatatggtcagagagggcaggaatgggaattaagggtcaattgacagtctcctctacactcactatatttaactcttcttttttcaagttcctctaaatcaggagtatctaacgtgtaacccttgaaccaaatgcaacctctcataccttttcagacattttcattttctgtaatgatatagcacccatgagctagtgcagcctaaaatagtacgtcttggacttcagagagtacctaagaatcttgttaaaagtacacatttctgagatggaccctcacaaatttggattctacatggtgcctaggaacctgcattctgaataaatacccccagatgattattctttgatctaaacataagacagcaattctccttgtttcagttggggcacctttcatgaaagtggggggaacatttcaacagtttattcagttcaaccagaggcatttggcatgtccagcacacactgcatgatcagggaagctcatgcagtgacctttgcagatctggcttgtcatctgatgtgatggagaaaatgatcaaggttgtgagtgttctttgagctcatgcctttgacctcctggttttgatgctatttggaacagtcccaacagagtataaagattgagtctatgtgtagtccaaaaacaggtgggggagaaaagaaacttcgtctgagatttcctgagctgcttcctcagattgaatcttcttaaaaatgaaaagggcccatgagaccaagcttgtcacactcccaatagctgataggacaagacatctgagcacatttaattacagccagagtgggggtgaacacaagaagttctaagaggctcaggcattcggcccaaattcagtgcatgaagtcacagagcaactgaagcccatgcttattttccatcccagaattgtttggagttcaaaagattgtacagattttgcagaacttttgattcacaggagatcacagtttcagaagtgagtcacatagatggaagaagataaattatcatttaggttttgtaactgtttttggaaagctacaaaccctcagaatgtatatcatgatgattcaattttaagagcaattaattaacacaatagtgaatcctgccagccctaaagaatcagtgctcgtaaagtgctgaatttttgagtatgtggatttcagaactgtcacgattttttttcttgcaatagtcctatacttcccaatgttgagggcttgttgctcttattaaaaaacaaaaacaaaagaacactgatagcaaaaaagaattggcaacagatgtgtaaacctaggttcaacattgagctagcacccactggttttctagaccagtttggtttgttacatatcctcttcctcttaatattgattagaattaggtcaccagctagcatctctataaaatacatcttttctctctgcattgatgtaacttaagatctatatttatgaatagcaatgacctatctattaccattgtttctaatgaaatctccactgctgcacaaagcttattctattacatgtgcttctattaaaagtaataacaataaaacttgaacacctagcccctagattctagcctgaggtagaagtcctttgtagatattttcatacaggggcaaagtctctgagctaacttggttctcattaaccacaggagagttctctatgctcaggctatttaaggtggaagaaggcttagctactcattttagcccattatcattattattattattattatttttcttgatgtgggccagtttaaaaacttttattgaatttgttacagtattgcttcggttttataatttggctagttggccttgaggtttgtgagatcctagctgcctgaccaggaatcaacctgcactccctgcagtgaaaggtgaagtcttaaccactgggccagcagagaagtcccacccccttcttatagaggtgccttttctcatctaccaagactaaagttaactttctagccattctaggcattcgccactctctgttgtggtaagcccttgaaatttcctcactctcattgaccctgtgtccctcctccatggtctcactccatggaaacagccctcatcaaggtcagctcctctaggtcctcttcccacaaccaaccggttgacgtctttgagtgcttgttttattgatcacacttcccttttgtacttttttcctctgttggccagggtacccccaaagcaatgaataagcatctcatttctgtttgacttctcatcctctcatcttctgtgtggctaattctttcttcttatatgatggtattctccagggttttgggtgagaacttccaattcccagctgccacttccaacgggactagcagcacttctgcctcagtgccccgtggaagtcatttgcgactccctccgttacaccccacactttctttctgtctatttccacatgcccttgaacttgtctctttctctattcccactgccacttgtgagttaagggtctcctcctgtggcctctggatgactccactgaccttttaactgacctcctgctccaggcttattgcttgcccccttccaccccatctatcctttattccgattactgacaaatttttcaaatataaatcagatcttgatactccttgctgaaaatccagcaggagatccccgattgcctttaaaataaaattcaaatcaattagcgaagctgggagggcctctgcctatctttctaccctcgtctattgttgcgtattccttgagactcatttttcattcagtcataaacatgaagatctatgaaaaggcctcttcgcttctgtaggcacctgctactttaatttctctgccacaggtcttcgtcccagctccctttgacctggctaccttcctctcacctgagaaaaagaggtggtctcccagaagctatcactgagcccctcctttactctcccatcccaaggtcaggtttagctgtctctccgggcccttcccctcttagatgctctatcacttagttgtgttcgacaagagcttgagctcctggaggccacgaccatatcttctgtatcattaccttctgtacttatcaggtactccatatggatctgatgatgaataagtagctcttcttagaagtctgaaagcactcaattttgtttttatctgaagggacaacttatcacttcattttttgagctctcccttccctctagctatgcaattttttaaggtacggcaatcataacccgatttacctgcattacttgtctacccagcctagtcataatttgagattgttgtttcacttagaaattgatgcagttaaagagacctatatgctgtccacagtacaggcattgtgaagtgaagtttgctcagtcatgtctttacaaccccatggactatatatagtccatggaattctccaggccacaatactggagtgagtagcctttcccttctccaggggatcttcccaacccagggattgcatccagatttcccacattgcaggcggattctctaccagctgagctatgagggaagccatagtaaataaaacttaattgttcatcagatataacaagtaagttgcttgagcaaactcccggagctggtgaatgacagggaagcatgctgcagtccatggtgttgcaaacagacatgacttagtgactcaacaacaacagaagctttactaactgacccagtgttttccctttccagtgtagagtacgtctgggtttaaacttggtccaggcatacagatggcctacaggcacataaaaagatgcaacatatcgctaattagggaactgtaaaaaaactacaatgaggtatcacctcacactggtcagaatggcaatcatcagaaaatctacaaataataaatgctggagagggtgtggagaaaagggagccctcctacattcttggtggaaatgtaaattggtatatccactatggagaacagtatagaggttctcaaaaaaactacagagttgccatatgatcctacaatcccactcttgggcatatatccaaacaataattcaaaaagatacatgcaccccagtgttcatttcagcactctttataagagccaaggcatggaagcaacctaaatgtccaccagcagatgaatggataaagatgcgatatatgtatacaatggaatatcactcagccatgaaaaagaatgaaataatggcatttgtagcaacgtggatagacctaaagattatcatagttaagtgaagtaggtgagggcttttctggtggctcagcagtaaagaatctgctcttcaatgcaggagacacaagagatgtaggtttgatctccaggtcaggaagatcccctagagaaggaaatggcaacctgctccagtattcttgcctggaaaattccatgaacagaagaccctggcaggctacagtccacagggatgcaaagagttggacacggttgagcatgcatacatgtacattgctgttgctcagtcgtgtctgactctttgtgaccccatggactgtagcctgccaggctcctctgtccatgagagtctccagacaggaatactggagtgggtttcatgcacattgctaagtcgcttcagttgtgtccgactctgtgcaaccccatagacggtagcccatcaggctcccctgtccctgggattctccaggcaagaacactggagtgggttcccatttccttctccaatgcatgaaagtgaaaagtacaagtgaagtcgctcagtcgtgtccgactcttagcgaccccatggactgcagcccaccaggttcctccgtccatgggattttccaggcaagagtactggagtggggtgccattgccttctccacatgcacattactatatataaaataggtaaactcaacctactgtatagcctagggagctatatttaatcataataaactaagaatggaaaagaatatacatgttcaactgaattactttgctgtctacctaaaacattgtaaatcaactatacttcaataaaattaaaagaataaacttggtttcaggggtttactagcagaatggccataaacaatctcactaaatcatgttttactcacctacaaaatggggtaataataatctacctggttggtgagaaagtcatatgaaatatcacagattgcaatgtgtggcccttcgtagaagtcaatatatgtgagtcatttccccttttaaatagtatttacatatagagtaaggatgaactgtcacaaggcgtttctcctcccacccccactttttcctatagattatcttgaagtccttaaattctccttttactttaaagccattgcctgccttttgctattaagcagttcccttcagaatgttcagattttgttataagagcatacttacccatatttcaaaatattctacttcacaaaaagacctgcattgagaaagagagaagagtgaatatctttataggattttattggaccaacttggacttcaagctggtttgagtttcacttaactggcctgttaacatctcctttcctgataatggtaaaaacaaccaatctgctgtttcttttgccccttcaagattactggacaatcactagagaagaattcgaatctgtgtaggatgcttctgtattttctttataatgtcggatggtaaaatcttgttgagcaataaaaaatctgaaggaagaagtcacatagaactaaacggttattcactgactgacaatctgctgttgctttaggtaaagattattttgggaggatatggtttgtatgacctcagaaaatctgaactcaggactcatttctatgcctgtatcttggtaacttgctttcctggctctgggtggctgagccagttggctgtcttccagagcacatttgggctacaagggaactgcctgcttggctagctggcaggcaagattaaagaggagatgaatgttgtttttggcagcagctgctgttttgttcagggcagtcctaataccagtctgtagttctctgcctaaagaaaaaggctccacagacgccctgcttaccttttcgactttgaaaagtctgtaatgtggaccctggcaatgcatattttaaaaccacttctcacatgcatagaaaagtttgtttttttcccaagttttagagaattagaatcttctggtttcccgaacagcatatgttgccctgatgttcttggtctgcatgcatgttaatttctactaaaggaaaggagtctgcaacctgacttctgtgtaataacacatgttcagatcaagtagatcgtttgctttagggggctttgcagctcctttttctggcatgtggctttttattgtaaggaaggctgttttgcttcggaagaattgatgaatgggtgaatagtccactagagtctcttgagattggttctcaacaaaaacgagatttagataacacctttgctttaggggtcttcagcctcatcttcctgtaaattttatcttttcaagttcctgttcagtactctctgccactgttaaaacctgctcccagaaaaagacccactatatcttgtcattaacatttgaatgtgaattttagtccctgttacctccctctattaggactatttctactgtttgttttgcttctaatagtgcctatagatttctcatttttcatcatgtaaataatctgagggctcttttaactatgaaagggttattggaattttgtgtgctgtggggaggacgtgggggacacttctgacgcatgcctctaaatttaaaaaaaagaaaatctagaaagggccgacaataagattagtttaatgtgtctgtgcagtgaaaggttatcatgaaatgaggggttatcatacaatgagcgtgacctagagagaaaagttgtacaatgctaaaacaaagtagccaaagaaaaatgtcatctgcagaagcagagtgtttcggaaaaaacagcaagatgattacccaagccaaaaagacacattgtagagctgaagtcacaaacgagggacattttgcttcagctttctatctccatagggtgtgtgtgtacctgcccacgcgttcaggcacccgcatacccttgttgaagtttccagaagttagagaaagaggaagggagagaaaacaaagataaatattttgttgatgtattgaaacacctcacttcattggaagtcgattgtctgttaacccaagctactctcaacacagctgagaactaagaaatagattcagaaagccatctgacccccaaattagtgtcagaatacctatacactaaagatcaggctctttgttcatgcaggattgattctataaagtcctttcttggactcttatctgtatggttttgaagcagttgtttccctgacttcctagacagtccaaaacctacagggcatacaacaaatcattgcacagcacctgtggtttggaaagttttcatttgattctcaccagcactccatgaacatggaggcaaaaatgattctcattgtagacactgataaacagatactcagaaggattcactggcttgtttgaagtcacacagtgaggggctcagaggtttttctggatctactttttgtcccctgccatcacactacaagttttcaaaagcgtgaactttttttctttcttgtccttggaaacctttgttcaaacaaaatcttacccggaagcatgaacaaatagaacaggaaaaaaaaaaaaaaagctgagttgcttgcttaaagcaagctttgggggcccagaattctggtgaggcagtatattttccttaccaggaacaacttgaacattacgtagtgctccattcattgcttaattcatccagaaagtaaatttattgagctttgatttatttttctattggtgttggaacaaatatgatcacaaatttagtgacgtaaaacaatacagatttatgacattatggtttggagattccaaagtccaaaatgggacttactgggctaaaagcaaggtgagaccctgtgctgtcttgaagtccgtaagggagactctttccttgccttttttcagcttctagaagccaccagcgtttcttgactcctggtctcttacttccatcttaaatgccagcagtggcaagtcaatgccagatcaggcgagcctgatcattgtcacatcttgctgacccttcttccatcattgcatctctttgaccagctagaaaggttctcagttttataaagaccagtatggttaggttggatttagagaatcaaggataatctctcccatctcaaggtcctttgcgtagtcacatctgcaaagtccattttgccatataaggcaatatattcacaaatttcaggaattaggacatggctatcttttttgccattattctgtctactataactactgccccgcctcccatgggacgtgtgttgtatttgccatggagactacaagaggctagatatgggcatattaacagtaaaactatgttgcaaatcattacctgattatatgggagaaataagtagattaagacacaaaccaacaaaactaaaaatacaattgaaaaacagtcattcaaacaagtacagtaatttggagctccttggagaaggacagtcacaactacataaccaaaatgcttttcccccctagctttattgaggttgttcagtcgcccagtcgtgtctgactctgcaatctcatggactgcagcacgccaggcttccctgtccctctccatctctcggagtttgctcaaattcgtgtccattgagttggtgatgccatccaaccatctcatcctctgtcattcccttttcctcctgccttcattcttttccagcatcagggtctttaccaatgagtcagctctttgcatcaggtggccagagtattggagcttcagtgtcagtccttccaatgaatattcagggttgatttcctttaggatgaactggtttgacctccttcctgtccaagggactctcaagagtcttctccaacaccgtagttcaaaagcgtcagttctttggcacacaaccttttttattgtccagctgtcatatccatccatatatgactactgggaaaaccatagctttgactatacagacctctgtgggcaaagtaatgtctctgctttttaatattgctgtctaggtttgtcattgcttttcttccaaggagcaaatgtcttttaatttcatggcttcagtcactgtccacagtgatttttggtgcccaagaaaataaagtctatcactgtttccattgtttccccatctatttgccatgaagtgatgggaccagatgccatgatcttcatgttttgaatgttgagctttaagccagttttttcactcttctctttgaccttcatcaagaggctctttaattcctctttgctttctcccataagagtggtgtcatctgcatattgagattattgatatttctcctggcagtcttgattcaagcttgtgcttcatccagcccagcatttcacatgatgtactctgcatgtaagttaaataagcagggtgacaatatacagccttgatgtactccttgcccagtttgaaaccagtctgttgttcgatgtctggttctaactgttgcttcttgacctgtatacaggtttctcaggaggcaggtaagatggtctggcattcccatctctttaggaattttccacggtttgttgagatctacacagtcacagaaccagagatcaaattgccaacatcctttggatcatagaaaaagctagagaattccagaaaaacatttacttctgcttcattgactacactaaatcctttgactatagatcacagcaaactgtggaaaatttattgagatatgactgacaaataaaattgtatatatttaaggtgtatgatgggatgttttgatatatgaatacattgtgagatggtgactacagtcagactgtctacagttacccatgtgtatgtgtgtgtgtatgtgtgtgtgatgagtacacttgagatctactcttagaaacttcaagtgaacaatgcagtattattagctgtagtcaaagtactgtacactaggccttcagaacttataaatgaaagtttgtaacctttaatcaatatctccccattttcctccaccccctagccacctttctgttctactcttcattactatgagttcaccttttcttttttttttgacaaacgggagatcatatgatatttgtatttccgtgtctggcttatttcatttagtctttcctttatttgatgagaatgaatcatcaaagaaaagcaaagtttaatatttctagtcactgtttaggatatcagggaagtgtgtgtactatatattagaatagtttctgcatagaataatatggaaaaaatacttttccatttaaagaagtaagctcctcatttcaaccctctcccagaaatactgatagggagttatgactactgctgtgcagaatgctcagtacgtttctaccctgactgctcctccatcctaatgtttagttatgcctgagtgaatgattggattttatgaaagatgaatcctcatcagtagcaaagtacatgacccttgaagaacatgagtgtgaactgcatgggtcccacttatatatggatatttttcaatagtaaatactgaggtactacagagtctcagattggttgaatccctggatgctgaggagccggggatagggtgggctgactataaattatacatggatgactgctgcattgctcaagggccaactgtatatgcaacatcaaattacagtttcagtgtaatagctttaacatagagcttcatgaaatatgtttctcagagatacttgttttttatttttttattttattgaagtataattgttttactatgttgtgttaatttccagtgtgcagcaaagtgattcagttacattcatgcattctttttcatgttttttccattatagtttatcccaggatattgaatatagttctctgtgctatagagtaggatcttgtttatccatcctatgtaaaataggttgcacctgctagtcccaaactttcagtccattccttccccatctcccctcacctttggcaaccacaactactatgtctgtgagtctgtttccgtttcttaggcaagtccatttgtgttgtgttttagattccagatatgagtgatatcatatggtgtctggcttcctctgactgacttcacttggtgtgataatctccaggtctactcacatggttgtaaatggcactgttgcagtctactttatggctagtgtgccatttgatacatgtatcacatctttatctgttcatctgttgatgggcatttaggttgtttctatagcttggctattgtaaatagtggtgcaatgaacattggggtgcccgtatcttttcaaatgatagttttctcatgatatatgtccaagagtgggatggtaaaatcatatggaaaatatatctttagttttttttgaagaacctccatactgttttccatagtagctgcaccaatttacattttctcaggaatatttgagtgtattaacagatttaagtttagtcctgcccaaataggccctaataaattgggcaaagtcatctttacagatgtttgtatatagttgatccaaaagaaattgtagccctggtgaaattactttgcaattgttaatagatttcgaatgtcttacaaaacttacaattaatatattaaactctcaaaaacatataaaattataaaattaaaagttctgaaaaatgtaaaatattcagctttgacttggaaacaagcttgtcttcatatgcatggtatttaaataattattgaagtctttgagagatggtgtcagagtcctcaccagtgatgtaacagcttcctgggagtgctatgacagtatgaggtggtgaagaggacaggatttcaaactgcacacacttgagttttcattctgatctcaccacggagtgaaagtgaaagtcactcagtgtccgactctttgtgaccctatggactatacagccaatgggattctccaggccagaatactggagtgggtagcctatcccttctgcagcagatcttcccgacccaggaatcgaaccagggtctcctgcattgcaggcagattctttaccagcttagccctcaccatgtacaagtcaccaaatctctctttattttggtttcttcatcttcaaaattaagatagatagatcttaaattttgtttgtgatcagttggacaaaatgtttggtacccagtaaatatcagtaagggaaagttgtattcactgctgttcagaaagcagcagcgtttgtgcacacattcagacgttctgcctggtggtactgatgaccttcagtatacactctattcaaagccaggccctctatttgagacctgggtctcaccccttcctgtcctcaagaacattgctctaatgtacctttcttctgacctacagtgccagttgcatctccttctggattgtccccataggtatacagacagcctggtatttctaccatcttacaaataagtctccccccattccaacctaattcttcaccaaccacattctcactttgttgttatttctttatttatttatttgctatcctttgaaagacgcctcttttaaaaaaagctatctgtttgcactgtttctaattgctcagccttcactctcaaatctgcccctccctggccttttccaaactgcttcaataaaaatgctcttgttaatgtcaccagtgacttctatgctgctaaattcggtgatcagttctcagtcctcatcttacttgatctgttatgagtatttgatgtagttcatagtttgacctccttaagggacttctgttttttttttttttttaacttgggttcctcctcttcctcctcccctgtctctctctctcaggctcctttgtgtgttctaaatctttttccagacctcttaaggttggagcaccacaggacccagttatttgttcttttttctgtttgtattcactcctttgatagtctcatccactcttttgcttaaaattccatttatgtatcaaaggctgtcgtatttatatatccagcccaaactaccctcctcagtccagattcgaatatcctgacctactttcatcactggggtatcttaaagacatctcagactgaggacattcaaaactttactcctgatatgaccccccaaaccttctctacccctcagtcattcccgtattgataacttgatggcagtactgtccattcagttgctcagaccagaatccttggaatcatccttgactctgagctaaccatctctaagcagtacacggcgacagccctttcttgcttggattatagcagtatccccaaattggtcttcctgtttctacttgttgttaaagcctgagtctgttcttaccacagcaatcagaagtgatctttttaaaatttttggttttttttttttagggaaaaaatttatatttttagagcagtttgtagcaaaattgagaggaaggtacagaggtttccccaatgccccttaccctgacacatgcagggcctcccccgttatcaataatctcccaccagagtggttggtacatctgttacagctgatggacttccattgatacaccttaatcacccagagcccatagtctatgctagggtttactcttgctggtgtattttctgtgagtttagacaaacatataattacatatattcacaattatagtatcatatagagtactttcactgtgctagaaatcttctgtgctctgtgggcttcccaggtggctgagtggtaaaaagaaaatctgcctgctaacgcaagagatagagaaggcactggcgacccactccagtactcttgcctggaaactcccatggacagaggaccctcataggctgcagtccatggggtcgcacagagtcggacgtgactgacgtgacttagcagcagcaatgcaagagacatgaattcgatccctgggttgggaagatctcctggagaagaaaatggcaacccactgcagtatttttgcctggagaatcccatggacagaggagcctggtgggctacagtccatagggtcgcgcagagtcaaacacagctgagcacacatgcatgcatgctctgtctgtgcatgcctcccgctccaacccctggcaacactgatcttttaactgtttgcacagttttgccctttccggaatgacagaggagttggaatcaaatggtgtagagccttttcatattggcttcttcactttgtaatgtgcctttgtttcctctaggtcattttatggcttcatagctcatttctttttagtgctgagtaaaagtccattgcccagatataccacagtttattcatctattcatctgctgaaggacattctgtttgtttccaagttttggcagttttgaataagctgctataaaaatcagtgagcaggtttttgtatggatatatattttcagctccttgggacaggaccaaggagcatgattgctcgatcatatggtaagtgtatgttcagttttgtaagaaataaccaggtttttagtagtattattctatgtcatctgtctcctatgctcaaaatcctgcaacgaatccctcttggttcacagtaaaagtcaaaaatccagaggagtatacaagaccctacatgatctgacctgttctctttgacatcatcattttcattgctccctgctctaatctcacatgcatgcatgtgtgctaagcttcagccatgtccaactctttgcaaccctatggactgtagcccacccgtgggattctccaggcaagaatactgaagtgggttaccatgccctccttcaggggatcttcccaacttagggatagaacccaagtctcttgtctcctgcgttggcagatgggttcttgaccactagcaccacctgagaagccctgctttcttcttgctcttccttaaataaagcaggttccttaaatcaatgagatgcatttcttttataatggtggggggaggtacactttctaaacattgtcagggtagtgacatcccaagtaggttttttctttattctccaagtgtttggtaatgataatatattactttaataataaaatatcttgaaagattcaattgaaaacaacaaaatagaccttagggacttagcagtatcttctctttctctgaatataatactctcctacagacatctgcatggataattcccttagtgccatctaatctttgaaaaacattgccttcgcaatgaggccccaccaaaatagcattctttttgcagtcattcatattgcagtctctggggaaagagaggtggcattaatagctggtactgtggccttttctctagattcagagatgcctggggatttgacctctctaccttcctttctgtatcaagaactcaagtaactgataggcgtatacctaaacttcacccaagagaattctgctgaagttactaggtagcagaacaatcaccaggatgcattttattgttgagactgttactggtgggagtagctataatggagaatgagtggcagctcatggcatgtccctgaaggggctactcgactagcgagatataagcttgagaagtggtcctgcccacccagcattgtggatcattgccaaatgctccagggatatagtgatatgtggacattagagatggttcaggagtcagttatgagttctaccctgctgtgcgtgctgtttgtccccgctcctgtttcccttctcaaagctcagtagtacacttggcgctgggtgaagcctccaaagcctcatgagtgtaactgtcacctggaacccaagaccctgctgctagtagagaacagtaggcattgtaattccagtccctgtactgagatctaatttttctcttttcatggtgcacttttaacatactatataatctgggtatttatcagttttcttggtcatgctatgccttctctcactagaagctaagcttcctgagggcagggatttttgctttttttttttaaactaatgtatccatagcatctagaacagtgcccagcacacagtagcactaggtgcttaataaatatttgctgaatgaatgaatgagtgaacaaatgtttgtgtagtgtttcttcactgccaggcctaagacaaggtaaagagaaatcaatagaatttttgccctaatatttctttttttttttttcattcagtcttactgagatataattgacatataccctatataagttgtacggcgtagtaatttgacttacatcatgcagtgatgaccatattaagattagtgaacatctgtcatctcatatagttacaaaagtaaagaagcagaaatttttttccttgtgataagaactcttgggatttactctcagacaactttcatatataacatagagcagtgctaactatatttatcatgttatacactacatccctagtagttatttatctttcgactgaaagtttgtaccttttgatcacctttattgaattccccctccctcatccctgtgcctttatattccttacagcctagaatatgaataaggttattagggactggccctttatagagatccttagggaggattccaaagtcagatcatgaaagagcgtgttggagaaatctatttcaagggagggttagattttagcgatgacagtatgagagacactttgagtttaagcattgtatttacatacatgaagggaaactcttaggggagatgttatgtgttgggattgtccaaaaagcagaatccccaaacaaatcatttacaccagcggttcccacccttttcggcaccaaggcccagtttcatggaagacaatttttccacaggccagggtagagatggggatagtttggggatgattcaagcatattacatggattgtgcatgttatttctgttatttattactcagcttcacttcagatcatcaggcactagatcccagaggttagggacccctgatgtacacaatttagtctttatttttggcccaagggagaagagcaggatcccaccaagcccaagtagccttaaacaaaattaagcaggattgcttaacattcatagattacaatggtaaaacaatgaagggattttagttttgttcacactccattattatctatgtaggtagtattgtagtcttagaaatttcagtaaatggtcattgtaacttggtccagtataatatctattaaggtggcagatattaattgaaaataataatccagttccatttgatacatggctggttacataataagtaggaaagatttctagccatgtgcagatgggcctttgtgtaattttaagattccgtagatgaatgttaactcataaaagaattctcacattttaaaatatcatcacatctccatgcctatgctcctgttgtttatttttcctggaatgctcatcccttccctgtcaactcttgcaaattcctcctctgtccaccagaatccagttggagtcacattttctctgaggcttttcttggcactgcctttctgccacaagttctctcccttaagattaattgattaattgcttcctcctctgggttcccaaaacatttatcacagggtgtggatattacttatttccctgaatctgcatttcagaggagtcttatcacctttgtttttctggctggctcagtccctgtctcgtacaagttcaataaataggtaccaaatttgaagcgttagactcttttttaaccttgatcactgattcatctagcaaatatttagcaagagctttttatattccaggtgctgttatgtcttgtaaagatactgagggggaaaaaaatagatgccccaatctttggaaatataaaacatagggtgataagaaaaagtaagccatgcataaaagtaactatttaacatggttgaaagagttatttggaaagagaggtagcgtgtgtgtgtgtgtgtgtgtgtgtgtgtgattacttcatgctggtattcaaaaatgtcttctcattgactaaaaaaatatttttccttgttaaatcgctaaaaagctgatagaaaacaatgattcttttgatatcccacaaattagattaaattctctcctaaatatctctccctcactttaactgggtgttccagtaggttattgggttaaagcaatgctcagagttttgctgttacttgctatacaatctacatttaaagtagagaaaaaattttttggtgccttaaggtacaaattttatgcattccctagtttttagaaaatagcttaagtgatagattcttttcatgttgctacaagttcatttctaattgccattggggaattgcccatagaaagcttttgacaaaagttaacgatactgtcattgaaatgaaaaatccaaaccatattttaactgagaattttaagaaatttggttagcatagtttgtgtgtaaggcatttaattgtatttaagccaatagtattaaaagaaaaaaaaaacccacaagatcgattcttttttccacattaaggtagaaaatgttagttgttaatagtttgagtgactatggatatttattgacggtcaccagcatttttttctcttttcatttagacttggattatcacttgcatttatcttcaactgctcctatttaatcctctcgtccacactcaagggatctgccggaaccgtgtgactgatgatgtgaaagacgtaacaaaattggtaaggaatgctttcaattgctctgactcttggactttttgaaaaagatttcctttttttcttgccccagattagagtctttcagcgatcgggagagaagtcactgagttatcctgaagggtttgtagagagcaggtcaggagatccctgcggtcacggagcatcttgttggtcaagctggccgccgcgcctcgcttgaggcactttgtttccttgctggcctcctcttctcctttgcaggcagtgaaggacactggcgaggctctgtctgctggtgtgtgagcactagcttgctctccatgatctcgtaggcaagcttcattttccctccacacgtcttcctgctcttctctaaggagcctaacaaaaggaggtctgagctgctcattctccggtttccaacctctctaagaccccgttacacgcgggtgggtgtttgccccctcagtaaacacagctggagtcgtttgttgcccaaacgttgaccagacacatctcccacatccgtcccctcagcaaaagccgcttttcattagtgcgccttcgtcccggccagcctcaggccagctcctctcaagatgcagaccgcggagagggggcgtgacagcctctgaaatggattcctcccgaccctcaggatctagcggccgttgtacgtgttcattggagctacgttgtgtgcttttgaaatgaacacactttgaaaagccgtgttgtaagttcctgatttaaacgagcccagtggcactcaattatttgaatattgtttcgagagcagagtgatgtgagaataggaacgaagtgagggttgtaggatgtaaaaaagaaaggaaagtatatttgttgagatatgtatctttcctactttgatatgcatttcctggtgtatatgttgttattttgggttcatagccaagcttcaaaacagaagtttaatgctacgatctgagtcttgcttagcttagtctcaatgtagaattaagaatatacgcatacatgcacacacacacacacaccatgcagatttctttggatacctacaaagtccaggcttaaaaatagtctctggtgctgtatctgaaggcgtatcaacatgttttatttgaggggatggtgatcctagcactgtaacatttacctcctatatgcccagctgggtttaaggatgggctgggaaagtacttttttcaaaacataggtcatgatctttttcctcaaattgctcattagtttgtgagccaaggaactatactaagaagaaaacatttatattcaaaatttggtatgggtcaaaggccctcatgaaatgtttgttcgatgaatgaagtacggatgagcctcactgtgcagcaaccaaattatctgtggcgttcatgaaagtcacaggtgtctgggcctcactgtttaaacaggtctgagagctaggcatctacattttaaagatattccgtaaaggagatttaagaaccattgttttagatggtttatgctgtcaaagtttagagaccaaaatattgtgaccttactttaacctcatttcttattatggccagttttatctacgttgtatcagttcagttcagttgctcagtcaggtctgactctttgcaatcccctggactgcagtactccaggcctcccagtccgtcaccaactcctggagcttgctcaaactcacgtccatagagttggtgatatcatccaaacatctcatcctctattgttcccttctcctcctgcgttcaatctttatcagcatcagggtcttttctaaggagtcagttctctgcatcaggtggccaaagtgttggagtttcagtttcaccatcagtccttccaatgaatattcaggactgattttctttaggatggactgatttgatcgccttgcagtccaagagactctcaagagtcctctccaacaccacagttcaaaagcatcagttctttttctttgacactcagctttctttatggtccaactctcacatacatacatgactactggaaaaaccatagctttttctatgttgtatgggtttacatatatgttagattaatatgtctccaaaatagacttaaagtaggtcacagctgggaaattaacaactcttaatggggctatttgtggaaccatggagctacaatgagcagagatcagaatttgtcctaggcatccaatttcaaatatgtgggcaaggaatcacagatggaaggtaatggtgtatctgaccacaggctaagcatgtccaaaattaaaatggcatttaagaaaaattacttgtagtcagtattttttgctgtttgaagaatgttacttaataagcaccacttcctgtgaaatgtcaaaccgatattttcaagtggcataagtaggtattgtaagcaccttccaagattttctgttcttgtctttaaccatctgcttattttcagtctgttacatatcagttgaaaaatgcaagaaactttgagaaagaaatgcctggaaagagatacttattaacagtaaaatattaatataattcctttccccagggggcaaatgtaaaaccattaagctgaaaaaaagtcttttttctcccttccagcaactgactcagaggggaattttttaatttcaagagtcgatctaaatgaaattagtgtgtttactcaagattattgggggaaaagtcaagttaataacaaaaaaggatttagaagatcacttctgattgaataaagacctacttaatgcacagccagtatttcatagagtaggaaattgaaagatataaaataatccttggtctcagagtgtttataatctagtttggggctaagccatctctatgaatatttgaaagcagatcactaatacacaataaccacatgaaaatgggtgctatttaaaatattttctggtaaagtatgggatccgacttgtactaattttttggttagaatggattttagcatctgacagacatgctctttggccttagataagaaactatctttctaaagctcagttcttcccaattttgtggtgtagatggaataagagaatgtgtgtgtgtgtatatatatatatatacaggaatcacagatggaaggtaatggtgtatctgaccacacacacacacacatatatataaccacagatattgtcacataatctctctgtgcctcagtttcctcatcattgtaatagattaatagtacaacaggggttagcagtgccaaccttctggcaatggaaaatcgtctcacagcctgtagttggccctctgcacataaggttcctccctagctgtggtttttgcatccacggagtcaacaaaggtggattgtgtagtagtgtaatgctattgaaaaaaaataggagtatgaatagactcacgaaattcaaacacgtgttgttcaaggatctactgtacttaacctcacagagtgattttaaagattaaataaattaaaaggacagtgctaggaacatagcaagtgcttgctaaatattatgttagtaatggtagtatagggcccccttggtggctcagtggtaaagaatctctcaacacaagagacccggatttgattcctgggttgggaagatcccctggaggagaaaatggcaactcactctagtattctcgcctggataatgctatggacggaggagcctggtgagctacagtccacggtcacaaagagttggacacacttagcaacggaggatagaatggtagtgtgatggtcgtgatgtttgtggggtcgtaggatactggagctgaatttagagaatgcagaatttcataaataggaaaactgagatccatgagtggtgaggtccagctcctggtcccagacctgtgctgtcttctaggacagtggttttcaggctggcttaagagactacccagcagctctgctttcatttgtgtttctgggtttctaaataagacttgggtggaacaaagaattgagcttctggaaaaaaatgtttgcaaatcacgtctctaaactggtgttttgtggaatattacttgagaaccatccagttacaatctctgagggtccttaggaaaagtttagccatcagggccctgcctcagaaatactggattgcagctcatggagatgagatgtaggaaacctaatgtgttggattggcgtcccgggcaatagtcatttgcataggtcaggactgctgaggtcataatattatacttacaatatggggctgtttccatatttgaaaagaagtggcgttcccatccttagcctacaactcattgatttcactaattcaaacagggacatgagtgacttttcagttttatggctacagataaccacagcctctctctggagaacagtggagcaaaaaagcatcttgaagtaggtcaggcttactggggtgtttgatatcagctctgctgttatccagctgtgtgactttggacaagtaaatctctgaacctttctgggattcaacttttggttttgaaaatgaggaattaggacataatcagtagttcttaatctagaattcataaactttcaaactctttccaatgaaattccaaattatgcttgctgtgtgccttatgtgtttctggtggtagtttattcgctaagttgtgtccaactcttgccatcccatggactgtgcccgccaggctcctctgtccatgggattatccaggcaagaatactggagtgggttgtcatttccttctccaggggatcttcccagcccaggaattgaacccgggtctcctgcatggctgctgctgctaagtcgattcagtcgtgtccgactctgtgcaaccccatagatggcagcccaccaggctcccccatccctgggattctctaggcaagaacactggagtgggttgccattgccttctccaactcctgcattgcaggcagatgatttaccaactgagctataagggaagccctatgtgtgtttctaagaacatgacaacttttcatctgcttcccagagaagtctgtaaccctccccccaaaaagataagaactaacaaattggataactagggaggcccattttagccttgagattctcttattccatcgtcctacttcttcaggttgtacatgttagaataatccagttatgccttgactaaaggaggttatatcagattagatttacttgcttttcaggcataacgtttgtacattttatctgagaaaaagaaagtgggttgagaatacctttttacccttttgctcatcgtaatttattcaactaaaatcattcctttgccaatgctgccagttccacctttgctgtaggtggcaacttgcactctgcccacaaatcttaagtttgtttgcttggggtgactcccatgtcacagaagcgcatggtttgtgactttattgtcattttctttttaatttcttcttggacattttgtactacacctatagtccccatggtttccatttgaaatccttctggcatgtttactcagcataatagttcatctatttacagaacattttgctttgtttctaaaaaatgttgcaagacttgtgttaaatggcaaactcagacctaaagaaagggtatttgggaagggggtgaatcaaactttaaaaacttgtatctttggggtggttcaactgcagctcttagtgactgtgttgataaaaaaggaatccaaacattgatatagatcaaattagtttttccttctgttctttctactgtttccttcatttttgataatttttcttcatctgggggaatttaattgaatgtgactttgctgctttttgaaaacatttttatctttatctgttgggtaattatttgtcttccttaaaatgtttaaggcaggtttctgttctatcccccatcttgtaaaagtggaaatcactgtcttttcaaggtctgtctatagatcagtagggtaaagtcagaaatttgtggctttcctggtcttgcagtaggcaattattttaaacagattaatacatgactcttacagtttggcataataggagattataaaaatattcttagataacaaatttcgcacttcaagtggacagttttgagtagtgctgaatttttattctcttcaaatacaatgttctttggatagaattaccactgcattaaaatggaggattggagtctctgagtcttcccatttctaagtatatcttctctttaaaagcagaggccccccatagttttgtctgacaattgaagaacaacggtttgatagctggatagtttttaaagttgatttttcatgcaatatttagcattttactttctgctcctgcagtcagtagatttttttcccctctatttaaagctaaattttggacttaaacagtattcaaaggacagagtatattagaaataatatttgtaaaaactgactagctctgttgccaagcatgtcaatcttatcataaagaaaatgttgttctttgtaagataaaccacttaggtacagtatctcctgctccttgacttttttacagcagatattattgtgtgaccatccaagcaccacgcaaagcactgtctgtggattctctgttttattcattgcaaccctaggaggtaatgattttgtccacctgtgtattctttaccgtctgggtcaaagggaagcctgactaatgcaccagtgtattgattaggcagctgaagcctagtgatggttagtaacctgatgattctcacttggaaactgggagatgactagaggtatgaacccataactgcttatctctggaacataagaacccagttcataatttatgatgtcttaacatgtcagtatcaactgcagtttaagaagaatcattctatcctcttgaattgtatttcctaggtagaagtctccttattttataattaggaaattatagattagtactacttaacaggagtcatcatcataaggtgtgttcatgaagcagaccaacatttttaaattaatttttattggagtgtcattgctgtacatgttgagttagtttctgctgtatagcaaagtgaatcagttatacatatatcccctcttttttagatttccttttttagatttaggtcaccacggagcatttagtagagttccctgtgttagacggtagagaccaaatgcttttaatctcttttatttgaaggagacaaggatcatttaaacttacttaggtattcttcactgagaaaagatgacccagaaagtcttgtgagttgtcatgttaatttcttctaaatcactgattgagttattatttaaaaaacaaaaaagcaattgacctggtgagatttttagtcagtattaacaagaaatggcttataaggggaaattaaaaggcagaaagccttgttctgtgttatttctgaagaataaaccaccagtgttacactaagctgtggcatgggagtaaactgggatattactgggatattttaagtacaagcatagaaggctttttttgctctaagaatcagcagtgattcttaaacttctctgtgtcacagagactttgagaactggactctttcctcagaaaggtcaactatgtgcgcactgttttatgtaggctcaagggaatcatgagtgtactatcattgcatttgatccttatcaagatcttgacagaaacaactgagacaagtatctcaccgaggatgtccagaaagccactgatttcacaagactgagagacctcaatgatgtttggatcttgagatcagtgatctagagagggagttaaatgttctgactttgagttctttttctcccaagtccaaatacctacagggcatggtaagcagccaatgactggcttgcaaagactttcttggccaagtttccagtatttccacatgctattatagccacggtaacttacccacatccaaggtaagagaaacccaagtaagacagtaggtgttgcaagagggcatcagagggcagacacattgaaaccataaccacagaaaactagtcaatctgatcacacagaccacagccctgtctaactcagtgaaactaagccatgccctgtggggccacacaagacgggcgggtcatggtggagaggtctgacagaatgtggtccacgggagaagggaatggcaaaccacttcagtattcttgccttgagattcccatgaacagtatgaaaagcctaaatgataggatactgaaagaggaactccccaggtcagtaggtacccaatatgctactggagatcagtggagaaataactctgacagaatgaacggatggagacaaagcaaaaacaatacccagctgtggatgtgactggtgatagaagcaaggtccgagcctgtaaagagcaatattgcataggaacctgggatgttaggtccatgaatcaaggtaaattggaagtggtcaaacaggagatggcaagagtgaaagttgacattctaggaatcagtgaactaaaatggactggaatgggtgaatttaactcagatgaccattatatctaacagtgcaggcaggaatcccttagaagaaatgaagtagccatcatggtcaacaaaagagtccaaaatgaagtacttggatgcaatctcaaaaacaacagaatgatctctgtttgtttacaaggcaaaccattcagtatcacagtaatccaaatctatgccccaaccagtaatgctgaagaagctgaagttgaacggttctatgaagacctataagaccttgtagaactaacacccaaaaaagatgtccttttcatcatagggtactggaatgcaaaagtaggaagtcaagaaacacctggagtaacaaggcaactttggccttggaatacggaatgaagcagggcaaaggctaatagagttttgccaagagaacatactggtcatagcaaacaccctcttcccacaacacaagagaagactctacacatggacatcaccagatggtcaacaccgaaatcagattgattatattctctgcagccaaagatggagaagctgtatacagtcagcaaaaacaagactgggagctgactgtggctcagatcatgaactccttattgccaaattcagacttaaattgaagaaagtagggaaaaccactagaccattcagatatgacctaaatcaaatcccttatgattatacagtggaagtgagaaatagatttaagggactagatctgatagatagagtgcctgatgaactatggaatgaggttcgtgacattgtacaggagacaagtcaagaccatccccatggaaaagaaatgcaaaaaagcaaaatggctgtctggggaggccttacaaataactgtaaaaagaagagaagcgaaaagcaaaggagaaaaggaaagatataagtatctgaatgcagagttccaaagaatagcaagaagagataagtaagcctttctcagtgatcaatgcaaagaaatagaggaaaacaacagaatggggaagactagagatctcttcaagaaaattagaaataccaagggaacatttcttgcaaagatgggcttgataaaggacagaaatggtatggacctaacagaagcagaagatattaagaagaggtgcaagaatacacagaagaactgtacaaaaaagatcttcatgaccaagataatcacgatggtgtggtcactcacctagagccagacatcctggaatatgaagtcaagtgggccttaaaaagcatcactacgaacaaagctagtgaaggtgatggacttccagttgagctatttcaaatcctgaaagttgatgctgtgaaagtgttgcactcaatatgccagcaaatttggaaaactcagcagtggccacaggactggaaaaggtcagtcttcattccaattccaaagaagggcaatgccaaagaatgctcaaactactgcacaattgcactcatctcgcatgctagtaaagtaatgctcaaaattctccaagccaggcttcagcaatactcaaactgtgaacttccagatgttcaagctggttttagaaaaggcagaggaaccagagatcaaattgccaacatctgctggatcatggaaaaagcaagagagttccagaaacacatctatttctgctttattgactatgccaaagcctttgactgtgtggatcacaatcaactgtggaaaattctgagacagatgagaataccagaccacctgacctgcttcttgagaaacctttatgcaggtcgggaagcaacagttagaactggacatggaacaacagattggttccaaataggaaaaggagtacgtcaaggctgtatattgtcaccctgcttatttaacttctatgcagagtacatcatgagaaaggctgggctggaggaagcacaacctggaatcaagattgcagtgagaaatatcaataacctcagatatgcagatgacaccacccttatggcagaaagtgaagaggaactaaaaagcctcttgatgaaagtaaaagaggagagtaagagttggcttaaagctcaacattcagaaaacgaagatcatggcatctggttccatcacttcatgggaaatagatggggaaacagtggaaacagtgtcagattttatttttgggggggctccaaaatcactacagatggtgactgcagccatgaaattaaaagacacttactccttggaaggaaagttacgaccaacctagatagcatatccaaaagcagagacattactttgccaactaaggtccgtctagtcaaggctatggtttttcctgtggtcatgtatggatatgagagttggactgtgaagaaatctgagcaccaaagaattgatgcttttgaactgtggtgttggagaagactcttgagagtcccttggactgcaaggagatccaaccagtccattctaaaggagatcagtcctgggtgttcattggaaggactgatgttgaagctgaaactccagtactttggccacctcatgggaagagttgactcactggaaaagactgatgctgggaagggttgggtgcaggaggcaaaggggatgacagaggatgagatggctggatggcatcaccgactcgatggacatgagtttgagtgaactctgggagttggtgatggacagggaggcctggcgtgctgcgattcatcacgtcacaaagagtcagacacgacttcgcgactgaactgaactgattctcttatgcatttccccccagtatcactgagtatgatcaatccttaagatatccaaaaaaatgaaaagatagcaagtgggcctgtctagtaatagagtgaaagtgttagtttctcagttgtgtccgaccctttgcaaccccatggactatagcccgccaagctctctgtccatggaagtctgcaagccagaatggtggagtgtgttgccattgccttcttgaggggatcttccctacccagggactgaacacagatctcccatatcccaggcagattctttaccatctgagccacctgggaagcccatcatatcacaaaatgacttgttttggaagttttgtgcattttctaatctggtacagtattcaaatcctcacactccaaactgtttgtttcattctaataatttgagctttgataaattttccatcaattaggttctatttcattttaatttttagcctgaacttattttactaggacagttaggttttcaaaatctgtagccttggttacatatccacgtaaccttaccagcaggatgcttccttagaatctaaagcacgtctctggtttttcagcttctaatctctgtagaaatatttaatgcgtgttcagtactttcccactggtcttctaaactgccctggtctttcttctctctttgcttcagtgcatacttccaaactgttgctgctgctgctaagtcgcttcagtcgtgtccgactctgtgcgaccctgtaggtggcagcccaccaggttcctccgtccctgggattctccaggcaagagtacttccaaactaaccttgctaaattgactgtcatgttttcttcctgcttaaacacattcagtgtaacaccactgcttacacgaggaagttaaatccaactgaattcttagtaattttctccttcagcttcttcatcttacagatgaggggtagaggttccacaggaaggaagcaatgtgcctaagacaagagtgacttgtagggctctagcggtggaactggttccgctgaaccttactgctttccacttggcctccgtggcccaacattcaggtccctcactgatgtgggtctcctggtatatttcttacctcctaccggctagagcctgaatgatctgtccctggtctacaatgtctttgtctttgcagacgtcccttccttcctatatttagaatgccccctcccttgcaatttttaagtacttgttcacacacaacactaaataagtattttaaacaagttacattatccttgtagtcttaataaatccactagctcagttctgtgattcccattttacctatgtggaaattgaggctaaagaagatttggtaacttgcccaagatcgctgaattagcacgtggcaggacctggatccagcctgagcagtgtgtccccaggacctgtgctgtgagtccttcgtcaaagtaactgccttgaaggaacagcttatcttcctagttccaggccaaaggctccctctactctatcaaatttctgtagtgctcaccatgcataagagaaacagaatttatcacaaggttatctgtgctttttggatgctattcaacatactatgaatgtttataaagtaaaataataattcatgaagtggccataaaaaatatacaacttggcttcctaatttctcttccaaatgtgattggaaatgaaccagtgcattccaagaaagtaataatgtggagactgatcaacagatgactgctgagaccagcacaaatcccagagccgggatttgtgtgctcactcgcactgtgtactcatgtctgtgaccccgagatgccagttaacccctctgagcctccttgtgtcgttcggtaaaatagacccaataatatgtatcttggttgtggcagagactgtgtaccaaaaccttttaaaattttaaagcatttttcaaaaatagtattccttttcagctcccttagaaactaaataccagtaaatcagtttaaggcagaagttattatgatatactgccacctccccacccccaccaagtggtaaggtttctttgacttctttgcagcaatttttacatgtcagttactaataaaacagaattggccaatgtatcttttacattttctctgctctcttggtacatactcagatcataagttttctgaatactaatttggtcagttctatatttattttccgataatgttaactgtgcttaaggaagggggctagattgtcaagcacctgtgttcagaacacccaccattttgtgccatgcttctccatctggaatggctttcacttacctggttggttcgtaacaaaacagaatggtgctgctcattctgattccagcttttatacctgtgaagctgttagctctgctttccaccagggcttccataaaatgatgaggtccatctgcttttcaaatatgggggtgaagatccacaagacaaaagaaatcctggaaacatggtgggaagtttgaccaagagaaagaacattaatgtgaaaagtcaccctgaacttaaagaatgccacctcctgtggcagtgcagatatgttctcagtaagcagtgcagacttgactgttttcttgggggtggcacgaggagggatgttcatgagcctcacaagtgggaaatatctaggacagtgtgcagagagtagatgggtgaccatgtgtagctgagctgagaggtaacagaggcctggctgtcagagacctgagttctagtccagacttaacaggtggtagtcatgtgacctcagtcaagttatttgacctctttgagtcttaagttcttcattcatcaatttagcaatactatgtgaaagtgattctgaggcttggatgcaatcacacaatgtaagcccataacgaacacggtgctagaacatggttaagtatttggtaagtgttaggctggaggctgagatgagtgtgaggtggttccattggacgttggatggtagcacgcataatgggatcacctgctgccttggctcccctctgactgcatatgcctttctctagattcttttctcagcaaattgttctccaattctagaagctattggcaaagccaagacgaaacataagggctgtgttctgggagtcttgtcagagatgaactagtctgaaaatatgtaccaggttctagctcacgatggagaatagtgatgattttagaaatagggtaaagcggaaaatgagtcttccagcaggtagacccactgaagatataatagagcaaaaccacttttttacattgtctataaatgggccatattctacagaaggaaattttaactgtgctagaagggtgagatgtcagagctggtgatatgtagaaaaggagacaagtgaaccgaaaactctgtaacttactagaacttgtgccttggaagtcagtttccagtatagctctcagtaaagaatatggattgtttatgatgcttggcacactcatctaaattcttaaattgactcttagacacaggtactttttctttttttttttaattggaggacaactgctttacaatgttgtgctggtttctgccttacaaaagtgtgaatcagccatatatgtgcttatattcccccttccctgtctcacccccatccccactctgtgataggtcatcacagagcaccaaattgagctccctgttatatggaagtttcccactagctagctattttatacatggtagtgtatataggacatggatacttttatctctactttacagatgagagaaaccaaagtagagtttagattttttctaaattccctggttctaaatcaggtgcttgttcaacttatgccacaatgactgatggaaatgggttagatattttttgaaagtcttttaagagaagctagttaaacagttgaggcatctcaaatgttcagtcccaggcaagtaggttacgttatatcacaaaactgaatctttctaaattaattaactgataaagcatgtgcagcttataagtatcattgttcttttgaaacttaacacttttttttctaggattaacacagaacagtagttctctaacatgagcacacatcagaatcacctggaggacttgtttagtaagatgcagtaggtctggtgtggcccgaggctttgcatttctaacaggttccctggtgcccttgaggcatcacttggagaaccacttacgagaaaaaatacaccgtgttaccgatccttcagaggaataaataggaaaatagtcctgaagggaaattccaagaccacagatggaagctgaaattcaaatcatgtttccaaactcagtagattatagttagccacccataactgaatttggagtgaaaaaagatttgtattattacttcatttctggagagtgcttttgattgcaaagggaaatcaagaatgaaaaatcactatgtatgtaaatgttgaaaatcagtggtaatttaaaagcaaactaggtttgcaggtgtttttctctaaaccactaaaaacaatatgattaactgatgtgtatggattttcttacagatttttttttctcttttggtctctgtaggtggcaaatcttccaaaagactatatgataaccctcaaatatgtccccgggatggacgttttggtatgtaaactgtacatttctgggtttcactgtggtagctgacaaaagaaacggggtcattcatattgagataggaagctatctgccattgaagagtttgctaattgtcagaatttgaagaaggtatttttggaatttgacttatatatttatattttttcctcaggcaactgctaaactttggtttggtttgaacatttcagcatgtgtctcccccctctactcccaaagcacataagatcaccttctttatagctagccactgacttctctttttctttcagccttcctccaagcaaaggctcaggtgtaaaattatgtaaattactttcatacctgaaaaggtcctatataagtctcctatttaatttgagaacacaaaatgttttatctctggatttatttgcagtgtgattgattcttcaaaatttgcaataaaaatgtagctatgattgtaggtacgcttttatgactgtaaccaagaattttcattgattttctaattacgtagtgttagtattaagacatgaagaaatatttcacatatagggactaatgtaatgactgtggacccgtcacataacgtcagatgttaccattttgcaatatttgtttcaactgtattttttaattggagtataattgctttacagtgttgtttctgctgtacaatgaagtgaatcagccatgcgtatacatatatcccttctctctttggacttctctcccacctgcctccaccccacccatctaggtcatcacagagcaccaagctgagcttcttgtgcttttatatataaatagcaggttcccactagctatctgttttacatatggtagtgtatatatgtcaatcctaatctcccaattcatcctaccctttcccctatccctctctttcccctcatgtctgcaagtccaatctctacctctgcctctctattcttgccctggaaataggtttcaaatgtactttttaatagtgaatcatgataaattaaagccccgtatatacctctctcctcttaggaataagtattctgagctggagtttctcattccaatgcatgttttcagggcttgacgtgaggtaccatcccctcggagttgtgttgagtgtaaccccacagtagccctactctttcttatactttgatagcaaactttacatccatatatatatgataccatgttttgcatattttcctattttatgttgataccattataatgcatatatgactttacaacttgctgacattttgcagaatgcttttgacacataatatgttccatgttgattcactttactgtattgtgttcctttgaattaatttaaaaccacttgggttactctctgctctgcaaattgacatctttctataacacccaaaatacttattacacattgacctcttgcaagttgactttgagtcttttctgtggacacatccatcaaaattattacctgttcaaatgtgttaataagcatgtcactaaattgttgttgttcagttgccaaatcatgtccaattctttgcaagcccacggactgtagcacaccaggcttcctgtccctcaccacctcccagagtttgcccaagttcaccattgaattggtgatgccatccaaccatctcatccttggtcaccctcttctccttctgccttcaatctttccaagcatcagtgtcttttctaatgagtcagctctaccatcaagtggtcaaagtattggaacttcgacatcagtccttccaaagagtattcagggttgatttcttttaagattgactggtttgatctccttgcagtccaagggactctacagagtcttcttcagcaccgcagtcaaaagcatcaattctttagcactttgccttcttcattgtccagctctcacatctgtatgtgactactggaaagaccatgtgaaagtgaaaatctcgtggtttgtctgactctttgcaactccagggactgtagcctgacaggcttctctgtccgtgaaatttaccaggccaggatactggagtgggtagctgttcccttctcgaggagatcttctcaacccaggaatcaaaccagggtctcctgcattgcaggtggattctttacgagctgagctaccagggaagccctagacgtcactatatggacctttgtcagcaaagtgatgtctttgctttttaacactctgtcgaggtttgtcatggctttcctgctaagaagcaatcgtcttctaatttcatgactgcagacaccatccacagagcttttagagcccaagaagaggaaatctgtcactgcttccacctcttccctttctatttgccatgaagtgatggggctgatgccattatcttagtttagggtttgttttttttttaatattgagttttaagccagctttttcactctctgcttttaccctcatcaagaggctctttagttcctgttcgctttctgccattagagtggtatcatccacatatctgaggttgttgacatttctcctggcagtcttgattccagcttgtaactcatccagactggcatttcacatgatgtgctctgcgtataagttaaataagcacatcactaagtgcttatgcttaaaaagtctttcaaactttctacggttgtcatttcaagagcattctcttgaaaggcatatttcttttcattagtccttgctaaaatctttactatctactaaattccttagaactccttagaacatgtaccttgttgaaccatgtacctctttgttgacctagcaagcctaggtcaatgtctgtcctaatagtaatgtaaattttatagcagcctgaaccttaattaatctaatcatctgctcactcagcaagtatttgtttagggaaaactagcaacattcagaaaattaagatcatgacgtctggtcccatcacttcatggaaaatagatagggaaacagtggaaacagtgtcagactttatttttttgggctccaaaatcactgcagatggtgattgcaggcatgaaattaaaagacgctttctccttggaaggaaagttatgaccaacctagatagcatattcaaaagcagagacattactttgccaacaaaggtctgtctagtcaaggctatggtttttcctgtggtcatgtatggatgtgagagttggactgtgaagaaagctgagtgctgaagaattgatgcttttgaactgtgttgttggagaagactcttgagagtcccttggactgcaaagagatccaaccagtccattctaaaggagatcagtactgggtattctttggaaggactgatgctaaagtggaaactccagtactttggccacctcatgtgaagagttgactcattggaaaagactctgatgctgggagggattgggggcaagaggagaaagagggtgacagaggatgagatggctggatggcatcaccgactcgatggacgtgagtttgagtgaactccgggagttggtgatggacaggaaggcctggcgtgctgcgattcatggggtctcaaagagtcggacacgactgagcgactgaactgaactgatggagcgagcactttatgagacactttaagaaacaaacaaacatccatcaattaaccttacgttcaaaaactagtaattatgaggttgggtgtagctggcctttttataatgcttttctatttgaaaaatgacttcacatttttatctccttggatggttagaaaaataggcaagcaggatgactactgtgattcttattatacaaatgaaaccctgagctttataaaccagaagcattttgaccaaggttaaacaactagaaagtgatagtcttaaaaagaaatcctaggtcatctgattcttaacccttcatgtgggaatctattaatagcaaggcaaagagttctcagtgaagcatctaaataataaagacataccctgttcctgactatagaagtacttaggctgggactgccaaattcatttaaagaaatcatgcaactctttgaaaaacaatgtgttaaactgaaaatagcaaaatagattcttttgtgctggtgtaatcatagattgtgccgaatcatagatttcagtattggctggtgctaacaacagctaaacttataaaaataaaatggattcattgccacctattttttccgccttgtttctgtaattgagaaaagtccactattatttggtcttggcacaccgtcctggcacaattggaggaactctgttcttggctaccacagttggcaagaaaaacaaacccgaacatagcctttgggtagaaacagggggtcgtatgctttgttttaccttcatttaaaaatgttagtttcttctaagaccagaggagtttcccagtggagaggctcaggcttatttgtcagtggttggagtccaggcagccttatcttttgtctttaaacaatacagggtggagtgggagccagaatgggtagcagaaatattctctggggccaaaccaataaaattctgctggaggccctgggcagaagaaagctctagcattgagtacttttgttttgttttgttttaaaaatcaactaaatactcctgaaaaggggagattacttttctaagtgcctttttagaaaattacccagcagattgtctctcacaaatagccgggtatgatccactgactggtatttaaatctaacgataattaccaattttagtttaaactctttgaaactataatattgtcagactttggatttcctttaaattcttagcctaaaaatcctaaatgtttcttatccttttcatttactagtcatgtcatagaaagaacggaaattgagttgctgaatctgcagtcattctgacctctctaaaatgatacaaactatgagttgcctgtggtattggcataataaagttaatctgcttttagttaaattacatacttaccactttttatctaactttttagttggaatactttcgaatttataggttataagaatattcacccatataccttttaatacagattcaattgtttttaacactttgcttcatttgctttataaattcttgctttctgtatgcacatatctaaaccccttgagtaagctgtatacaaaatgactgtttacccctaaatacttaagtgtgtgtttcctaagtattttctcttacataaccacagttgtccacttgagtaaatttagcagtaactaaaatacttcagtctgttggctgtatttcaatgttaccaaatttttctggcacgtttttcttctggtacaagatctaatctattatcacgatttgcattttaatactatgtatgatcagcagaataatggtcccccaaagatgtctcatgctgtgactatattacctttcatggcaaagagtctttgcagatttaattaaggatctgaggatgggtagggtatcctgggaatatccaggtggacccagtctaataacataaatccttatgagagggagtttaggaaccagagagaaggtgttacaccactggcttggaagatgaaggggccacaagccagggaatgtgggcgatccccgaaagctagaaaagacagggaaggagattcttctgtagagcctctagagagaacaccatgtaatctgtgatcactttgatttcagcctgttgttgttggtcactcagtcctgtctgactctttgcaactccatggactgcagcacgtcaggcctccctgtttttttaccatctcccggagcttgctcaaatccatgtccatgagtcagtgacgccatccaaccgtcttgtcagaatgcgcatcccaaggtgtgatgctacactaaggaatgatgtgtcctctagttatcactcccagaggcaccgtgtccatcttcttcccatggtgctgcttgttttaatctgctagttcaggtgtcccactattgctgtgtatttactcattaacaactaagcagcaatctttgggaagatacttgaagaccatgtgtatttcttcatcaaagtttctcttgtagattgatttttacatgaaccagtctttactgtcatgtcagtttttattttttttaaagtcaaggttaaacaaagaagtcattggcaatacattaggttattctaaaaacatggatcccagccatctctcctttgcagcacccttcctcccttctggacgatttcactttctcaactattcatacccttttttgctggtctgccccctctgggtcttctcacatctccctcaccagtcaagggatttattacctgatatttcaactcttctttaaaagacagtggttcttcaaaacaaatacacctggtcattttatccctcctcttcatatactttgaatggttgcttttaggaaaagaagcttcttacacatggcctccaagactctggtgatctggcgcctttccagattctttttcagtcctacagcctcacatgttccctgctgcccctgttcctttcctgcaagtctttctctgaacctagtgtgctggtcaatccttttctttagataactcctctttcattttcttttttatttcttctatgatttttcttaaaaaaatttttttttttgattgaagtatagttaattatttccaggagatagaggacagggaagcctggtgtgctgcagtccatgggtcgcaaagggtagaacacgacttagtgactgaacaacggtagttgatttataaatgttgtgtcaatctctgctatatagcaaaatgactcagttttatatatatatatatatatatatatatacacacacattctttaatatttttttccattatggctaattgagaatattggatatagttctttgtgctatacaataggaccttgttgtttatccattctacatgtagtaatttgcatctaccaaccccatattccctccccgtttcctggcaaccacaagtctgatcactatgcctgtgagtccgtttctgtttcgtagacaggttcacttgtgccgtattttagattccacttataagtgatgtcatgatacttgcctttctctttctcacttacttcacttggtgtgaagtttcatccatgtagctgcaaacggcactattttgttcttttttatgacttagtagtattccgttgtgtttatgtaccacatcttctttatccattcctctgttgatggagatttaggttgtttccctgttttggctattgtaaatagtactcctatgaacataggggtgcatgtatctttttgaattgtagttttgcccaggtatatgcccaggagtgggattgctaaagatcatacggtagcttgatttttagttttctgaggaacctccatactgttttctgcagaggctgcaccaatttacattcccaccgacagcataggagactttccttcactctgcaccctctctagcacttgttgtttgtctgacaaattcattttcaatttcacttctttaaggaagcctttactctccttgaggaagccataccctcatattagaaacttctaatagtactcctcagaatggtagtgcttttgtttatttgtgcaagtatttagttgtaatcttctatttacctataaactccctgagggcaggagttgtatattttgctcgtccatcctcacagtccaatatgtgactattgttgttcagttgctcaatggtgtctgactctgcaactgcatgaaattcagcacaccaggcttccctgtccatcactatctcctggagtttgctcagactcatttcctttgagtcagtgatgctatccaaccatctaatcctctgttatccccttctcctcatgtcctcaatccttcccagcatcagggtcttttctaatgaatgggcttttagcatcacatggccaaagtattggagcttcagcatcaatccttccaatgaatattcagggttgatttcctttatggttgactgatttgatctccttgctacccatgggactcttaagaatcttctccagtaccacagtttgaaagcatcatttcttcagccttgtttatggttcaactctcacatccttacatgaccactggaaaaaccatagctttgactccacagaactttgtttgcaaagtgatatctctgctttttcatatgctgtctaggtttgtcataacttctcttccaaggagcaagggtcttttaattttgtggctgcagtcaccatctgcagtgatttaggcacccaagaaaacaaaatctgctactgtttccactatttccccatctatttgccatgaagtgatggaaccagataccatgatcttagttttttgaatgttgagttttaagtcatcattgttactctcctctttcaccttcatcagaggctctttagttcctcttagctttccaccgttagactggtatcatctgcatatctgacgttgttgatatttctcctggcaatctggattccaacttttgagtcatcctgccctgcatttcacctctgcatataagttaaataagcagggtgacattacacagtgttgacatacttctttcccaattttgaaccagtcctttgttccatgtttggttctaactgttgtttcttgacctgcattcaggattctcaggaggcaggtaaggtggtctggtattcccatctcttgaagaatttcccacagttttttgtgatccacagagtcaaaggctttagcgcagtcaatgaatcagatgttttttttttaattcccttgctttttctatgttccaagtagatgttggcagtttactgtctggcccgtctaccttttctaaatccagctcatacatgtggaagttcttttaagcataatcttgctagcatgtgaaatgagcacaattgtataatggtttgaacattctttggcattggaatgaaaattgaccttttccagccctgtggccactgctgaatgttccagatttgcagcatcatcttttaggatttgaaatagctcagctagaattccatcacctccactagctttgttcattgtaatgcttcctaagacccacttgactttgcactccaggatgtctggctctaggtgagtgaccacaccatcatagttttatctggttcattaagatcttttttgtacaattcttctgtgtattcttgccacctcttaatttcttctgcttcttttaggtccttaacatttctgtcctttattttgcccatctttgcatgaaatgttcccttgagatctccaactttcttgaagagatttctagttttccctgttctgttgttttcctctatttctttgcattgttcaacttaagaaggctttcttgtatctcctcactattctctggaactctgcattcagttgagtatgtctttccctttctcctttgcctttcatttcttttgtcagctatttgtaaggcttcctcagacagtcgttttgccttcttgcatttctttttcttggagatggttttggtcaccatctcctgtacagtgttaggaacctccatccatagttcttcaggcactctgtctatcagatctaatcccatgaatctatttgtcacttcctctgtaaatgataagggatttgatttagatcatttttgaatgacctagtggttttctctattttcttcaatttaagtctggatgttacaataaggagctcatgatctgagccatagtcagctctaggccttatttttgcagactatatagagcttctccatcttcagctgcaaataacataatccatctgatttcagtatcgatcatctggtggtgtccacgtgtagagtcatctcttgtattgttggaagagggtgtttgctatgaccagtgtatcctcttggcaaaactgttagcatttgccctgcttcttttgtactcagtgtatgataggcgcttatgtgctgaaagtgaagatggaaggaaggagggaagttctctcacacgtaatcccttgtaatttccgtgaggtgccagttgaatagaatctgtaagattatgacgatgcggtgaatgactgtaacttatcacacagtatttgcaccttagggttttacccatcttcttttagatatgtatgcattttgtaaaaaggtttaggtctaagagtaatatcatgctattttgaggaagcttgatttccgtaagccttctgttatgctactactttaaattgagtcatttctttaatcaagaactttctcatagttctcagtgattgaaggctgaaagccagattcctgagtctgatgttcataagcttccataataaccttcctgccccacgccaaccacctcatcttaatgcccattattttgcaacacaaattcgtcacccagtcaggtgagtcccaccctccaagaatcaccttgaagtgaaagtgttagttgctcagtcttgtccgactgtttgtaaccctattagcctgccaggctcctctgtccatggaattctccaggtaagcatactggagtgggttgccattctcttctattctcagttccaagacagcatgatacagcttccctttgctaggaatattctttcctctcccacccactcatccaaattctatccacagaattatgcagtatcctgagactgaatgcatcttagaggtcagcatttccaaggtcagcttaagatccctatttctcataagaccatttcctactgtcccagaccatgctctcttccctgtatcattggccagtaaaaactgacagcacccctaatctgtgcttgtgtgggacaaagtgatgagcaatactgatgaggtatctgttctgtggaccttatctgttactttattatctctgaatttctatagaatttgtctcgaaactaatcattttgggtagttgatcatacattgcttacaaagctatttaaaattgtatgtgttacggatctctcatagtattgttgtgagaaatgattaagatgtgaaaaacccaagatatagtgtacatgcaataattgttctgtgtcctcacgattattttgttgttatattttctctttttactgtatttatctaaagattagggatctacccttttaccctgttgtatttccttaccatttgagcaggtagtagctactcaaaagctgctgctgctgctaagtcacttcagtcatgtccgactctgtgcgaccccagagacagcagcccaccaggctcccccatccctgggattctccaggcaagaacactggagtgggttgccattttcttctccaatgcatgaaagtgaaaagtgaaagtgaagttgctcagtcgtgtccgactcttagcgaccccatggactacagcccaccaagctccttcatccatgggattttccaggcaagagtactggagtggggtgccattcccttctccaactcaaaagctacttaccattaaacatttaactgctggccaaaaaatgtctgatttacaaatcttgagggagcctaccttatttgtttagattcctttggttcttactaacagtaatgaactcaagcttcaccaaaaaaaaaaaaaaaaaggtcccattactgtaaggatactgaagaatagcatttcaagtcaaggggagggatgcagccaggcctcatgaagggactcgaaccaggactggaaagcctccaggttttcctttccgcttctctgcatctctgcctggtactgtttcaccagtgtagatttttttgtgtgttttcagtcacctgatagcgtaatagctgccccagagctcccacacttacatattacagtttgaccctgctcagagactggttatcagttcttatcactactaccttttgcggggagggactttccaattgacccatttgtctcaggatgccacgttgtccagtcagctgtggctgctgggcaaggccattgtttgtaattgtggatcccgaggacccacccctgtgatctgaaatgcttcctatagaaatggaagtcagtcaggtagacactgtacttgtctacttctagctcttatataatatttctttcaaaggaataagtataaaatgttaggtaaatgaataaaatgtaacattaaatactattttttaggtggctctttccctggcggctcagcggataaagcatctgcctgcaatgcaggagacccgggttcgatccctgggttgggaagatcccctggagaaggaaatggcaacccactccagtattcttgcctggagaatcccatggacagaggagcctggcgggctatagtccatggggtcgcaaagagtcagacatgactgagcaacctcactttcactttcactttgtatactcaaactacagggcccatcttaataagtaagtgattacattaagatactttcagaacatctagaccattactacctgaaaaaaatagcatagaagccacacgttgttaagttgctcagtcgtgtctgactcttgcgaccccatggactatagcccaccaggctcctttctctgtgggatttccaaagatgaactggagtggattgccatttcctcctctaagggttcttcctgacccaaggatcaaatccgtgtcagctgagatcttggcaggcagattctttaccacagagccacctgggaagcccagaagccacatatgtaatgttaaattgtccagtagctacattaaaaaaaaagaagaacatgaaaaattgtaataaagtttattagtctaatatattcaaaatattatcactgtaccttgtaaaccatataaaattatcaacatattttaatttttaatatttattcagaatccactgtgtatttcatatctatagtacactccagttcaaacactaaattttcatcagaaatatttactcatttagacttttataaaattgacagttgaaaacacagattcacatacctaagcttttccgaagattcttaaaagtgttccagtcaccaaatcgtgtaatgattttctaactttcagcatgttgaattagttaagcaaacttaatattttagttcctcagtcatactggccacattttgagtgatgagtagctgaaggtggctaatggtccctctattggctcacccagactagacagagatattttagagacagagaaagtgatgctctgaatagattaagtgacttgcctaaaatcacaaagtgtgttagcagagttaggactagactcagcccctagttcatcagggctgccctcatctcccgcgttcttcctggtgctattttgtatctggctcagaggccatttataggcctgcctggggaaacaacatgtatttatagtgtttggactgattaccatcttaatcagatggaggtttctactcgccttaattaaagcaagaaaatgcagttagatgtctgcagcgaacactgaagacccaaattaattgtttagagagaggactaaaataaatcatgacaaaacccagctcaaaaaaggacttaagattttggagactctacagcagtaacttgagcacacaatattttacgaagtgtttttgtaggaatgttttaaatctgccttgccaatgttcgagattggcaaggagtgtctgctttctagtcctaagagtaaaaaccagaaggagtaaggaaagtccactaaagtcaattggtggggatggtttagttgctaagttgtgtccaactcttgtgagcccatggtctgtagcccacccaggctcctttgcccatgggatttcccaggcaagaatactaaagtgggttgctattcctttctccaggggatcttcctgatctaaggatccaaccttggtctcctgcattgcaggtggattctttacctgctgagccaccagggaagcccactaatagcaattagcatttgctatttggttgcaacagttctggaagaaatctggttcctataatatagttctggattcactgaaatgagacagagccatttctaattcctaagtactgagtttaaggaccagtgtgtcttgtccggaagtgggaccacatgagtcatggagaacccagcagaagaaagtgctgcagctgcatgtgttttgactgtatttactgatgaaaaaaccaggcaagtgcttgggagtcttggtttctagtatttgttttaaatttgttgtgtaaccttggtaaaccacttcactgctcgagaccttccttgattttcccatttatgaaattggtgggactggaccagatggtcttttagcatttcttccagatctaaaccgttgtgattctagtggcaaagtgctagattttttttgactgaccagcccaggaggtaaatgctggaagcacaagaggaaagaaaggggtgctttgtgcctgtgggcattcatacttctaattctggcaagattgaaggttgacacacattaaagaaagcaaaacagaaacaatcaaactgggcggtaatgctggtaattagattagttggattagaagatggggtagaagactcattgtgaatattcctcagaagcctcatagtttatgagccagggctttgctccctcagaatctctaatggatgttttaccccagctgctttgtggagaattcctcacagtgtacatacctccatgaggcttcctgacgaagcagacacatatctctcaaagaacagttactaaatggaaacgtagtgccaagtacctctgtgaagaaacattagtgtgtgttttttccactttcagattctagttccaaaaggcttctggactgctcttggagactcttcatctaagacagatgcagaatcctgtgtcaaatgttttcagctaataaaccagcacagtttcttaaacgaagcaggggatggagagaagaaggcaggccagatttagcaagtctctcggatgtttttattttggccatggtctcaaatttaccagttctaggtctgcagagatattatatcacacatcctgtgacatccacgtatcatctaatttatatttgtgtgaatgtgtgagttttcattgttgggttttggaaatggtcatattcttaattatgtttagaatgctttcaatcatagttgttttttttttaatcttattaatttggtgcttatggtactttaaaatccttaggaagttcatagtttttacccagatcttctgtggtggtggcatgccagcaggtcaaggacattgattcaatgtcatcgatttagttagcattctagaatgacacatgttatatatcatttatatatacacacacaaacatgaatgaaagcatatgttgctccaataatcctaaatagagctgttataattgatccagaaaatgtaacaggctaccaaaaaagaaggtaagaaattaagagtatgaagttaaggaaaatccagacaggttttcccttttaaagcaaaaaactatatttctttttgtgtgtatatgggtgaataaaacattacattatatgtactttaggaatttgaaacatactctgtacatcacctctttgatgtcctgtctgactctatcaactttactgatctttcagattcttctagtgaaatagagaacattatttatatcttccattcttctaatatatattgtgagttaatagctgtgcaaataaaactatttgtttaaaatggtctctgaaagatgagagacaataatgcctgtttattaaggtaaaggaaaaacttaaatttgtgaattgcacacttaattatctatttcctaatcataataatcttgtaagagttgaaaaacagactttgtatcatctcacaaatgaaatatttaggtcactgtgttttgctgtctacaaatcattgactagatttaattaaaaagaaaatgcaaaactgcttgatgttctagtcaaggctggtttcctttcttgtaggcggacaagttaaaactggctgatatttaatattgtttacctcagttttatctttcctaaattcaataaactttaaaagctaaaatatagctgtttaaacagattagtgaaaagaaatagctttgaattgattatatagtctttcgaagaaaattatgcaagaatgtataataaatgaaatacagttaaaggtgtttagaaatatatttttcagcagtgtagtctcaatgtttatgtcaaataccaatgaatttttcataaccttaaaggggcaggtattaggctaggattcgattatgggatttccatgatttaacagtaagaaattacaggtttagggttgaaaatgtttctgggaaaagttgattgcttggactgttgatgaggtatgtgaaaacaagggtgggtggccatggggcgagtagtcatagctaaataagaacttgaatgaggaatgtaaacatagagttcagttgaagatagagataaacagaagtgacagtaagcaccccagagttctccatttaaaactaagaaacatataaacaagctcctttctgctttaaccacaaaaaagcaacaaacaaacaaaaaaccaaaagaaaaaacaacctgttcatttaacgcaaagaccacagtacgttaattcagaataggggaatttgattttggttcctacacatcagaggatcagagagaaggacaggcgagcttattcataaagtggagcaaggacagagtttgaaaagattagtacatgagctgtacttgccatggaaaaatttgcacaatttcagtgggatgaactaactggtgaaggctattctaccatataaatactagtaaagtggtatttacagaatgtgctgttttccatatcctaggaaatctgccccttgctgatagggataactatctaaagggaattattgctgtctgaatggagggaaacttgggtgagcagtcagcctccaaagaaagactgacagcttgtaaagagacttgttaatgatgcaaatatgaactggcatgtgcttaagataagcactgattttataaaacaaagagttcattctcagcatattttggaaacacttagtctttgagagcttggttggtgagtccaatgaaatggccaattgaactaattcccactaggagtttgtttattctacttatctgaagccagagccaacactccctaaaagttttgaatggcatttaatgcttccagaaattgcaatgtacctatctgtagagaaaccagtttccctttggctgggtcatattaattaaaattgttctatgaaataaatataaaatggctttcttgtataatttagaaaacatgaattacatgacttcctccacagagatattctgctggtaagtagaaaaataaactatagtgggttttattcattttacatggcatcggttaccctctctgacaatgtacatttatcacaatagaaataatttaaaattatgtgagatcttgataagccaagaccattttacctttgtctaatatctcttatttttttcattataacattttaacagttaaaaatataaatcagaacctagacttcaaagttctttataagagaaaagagaatattacaatatacaaagtatgtaaatttccaattattttaagtggtgtcacatttaatttctaaaaatgttatgattcgttctaatatactaagaagttttccctaataatctaaacctttatttatctgcaaatgtataagaggggttggcaaactacactctatagaccagatccagtattttgctgatattacatgtacagccagctgagtttgtctttttacagatgaacatttacagtctacttgataatagagaatgcttttaaccctaagtgaacaaaaatgttgacccaataaagaattccattcttcttattgctaaacctgtgttacaaaagaagctaaattattaattatgcaaaagaagttatatctaattataatcattactttttaaatggtaataagaatgggtaaaaattcattttctcttgtgtaactggacctacacaatattcttgatttttgcctcttggcatacaaagcttgaaaatatttgccatctagccctttccagaaaatgttgggacccctgttatgtagtattttttctcactttttttttttttcacttctatatcagttaagcaattagtttctgagcaacacccatatgccagacactattctaggtctcaggaacaccacaggaaacacaattttataaaaatcctaccctcttgaaacgtacattcaaattatgtacctcatcgcctcaaaactaccttacttccattattccctttctacagaggggcaaaatgaggttcagagaatttatgtagcttgttgggattctctcagccagaactgaacccagttttgcttgattccaaggcttgcgcttctaaccagtgggcagggctggcttcatgagtggggctccacactcggcttcatgctctgctgtcaccatcgtgaaacacttcatcattttttgaacacgttttgaacagtaaatacatttccattttgctattagccccacaaattatgtagctggtcctgccactaaagcaaaagtgcttctctcccagatcatgttctgccagggcttttttttttttttttaaacacccacagaaactcagctatgtagaagctttgaaatcgattaagatcttgagaaaaataagctattattgatcctctgattcatattctagttccccaaaagactggaagttccttgaagaacataggaacctttcccactataactttttaaaaaaatttctctgggttaaattcctttcagaatacagtaagtaagaaataaatgtgcttccatagaattaaattttgcagtatctgaaccttgtcaagggctcagtcttaattttatctccatggaagggcaaaatctttaccatcaacaatttcttctgatctttatgcatttggaaattttgaaacagctgtgagatatgacttaaataaaacctaagaatgaacctgttctgacataaggaaatcatttgtccagtaatcagtgactgtacttaaaacaggtgctttgtcttttcttttaatttcttacagcctagtcattgttggataagcgagatggtggaacaactgtcagtcagcttgactgatcttctggacaagttttcaaatatttctgaaggcttgagtaattattctatcatagacaaacttgtgaaaatagttgatgaccttgtggagtgcatggaagaacactcatttgaggtaactttgtattgggactgctttttattactcatctctgtaacctatagctgattagtggtggcagggctggggacgtgtttgtgagatttttaatttataaatttgtaattaaaaaaattttgaagatgagcacagaaaataaatgtttgtagttatatcacaactgaaatgtatattaagacaattaaatgttgtcacttaatatacaaataaatgtattcacagtacacttatgaaaacaaacctgactttatctcgtggataaggttctcatagccttcctatgaggttgccaatgttcatttacctttaagtggaaagttgcctatagtgaacacttgacctcttatctatagtaataacatcacaacaaagaagtgcattttaatgtctttgggtcatttgatgattagttgtcacttcagagtatgggtatggcagtgctttgggttcaaagcatattaaagaagcaatgtacccactagagatcaagaatgggatgctggaggtcaaaacctggctttgttcagtaatagttttgctcactttctttacacataaaatggggacaaagaagagttgatattacatgattaatgatgaatttttattcatcattatgaaggaatttttatcattcaaatttggcaaagtaaaatgttaacagttttttaaaattttataacactgtgtctatataataaatgacctcttgggacacatgttttggcatagagttcacaagccaaggtttacaggccttcttgaagttcagacctaaggctttaaccatgatactctatagtaacagtcaaatactctgtctccattcaaattccagtcactatctaagacccaacctctacgtgctctccaatcttaaaattctcataattccagtcacctaatcactataattcatcatttctactgttttattttctaatttcccaatcagaatgtatcttataatcaatgacatcttagagttagcatccctttttatcatatcagtatgaatgatgtactaatggcaatgataaggagaggtcacaaaaagtagagtataccagacaaggtgtcatgaagaaaataagatatgccctagggcctgaaagatgaattaattggtcaataaatggcaatttatctagaagagcattccagataccaaaaagtatacatttactaaccatggcactttggctagaacccaagagattcataccaggtggtatctctcagttgtttcagaggttaacatatataaaacactcagagtagtacatagtaagtggtacataggtattaactctaattatcattacctgcttttatttatagatgactatgtttgagaagatccccttgagaagggaaaggctacccactccagtattctgtcctggagaattccatggactgtatagtccatggggtcacaaagacacgactgagcaacttttacttttcatatatttatgaattcctaaaatatagctttgacttgtttggggattttatagaaaatcatactctttttatgcttttgagacttgcttctttcactccacattataagatatccccattgattattaaagctatagttgatttttttttgtttttttttacacactatgagagtgctggttgctcagtcgtgtctgactctttgtgaccccatggactgtagcccaccaggcttctatgaccatggaattctggattcagaatactggaatgggtagccattcccttcttcaggggatcttccaaaaccagggattgaactcaggcctcccacactgcaggcagattctttcccatcagggccaccagggaagccccactttgagagtaaatgtgctatgaaaaatcagggacatcttcttagaaaaggtgactcttcatttgagtttacagagagaatcaaagttgcctagaaagatgaagcagcaaggaaccacaggcaaagacaggagcagaggtgcagagaacgaaaagggtgggacgtatggggatatttgtgattccatatgctcagatgccaagtgagtgtggaagatggttgtagaggaggtgaacaagggcacagaggccaattagcatggacttaaatccctactggcaaatcaggaagggaaattatatatgtgtatatagggagactgtaaatgcttaaagtaaactcattgaggaaattccccagtgggttaatggttaagatcctgtgcgttcactgccaagggcccaggttcaatgcctagtcaggtgactaaaatgccgcaacctgtgctgctgttgctgctgccaagtcgcttcagtcgtgtccgactctgtgagaccccatagacggcagcccaccaggctcccccgtccctgggattctccagacaagaacactggagtgggttgccgtttccttctccagtgcatgaaagtgaaaagtgaaagtgaagtcactcagtcgtgcccgactgttagcgacctcatggactgcagcctaccaggctcctccgtccatgggattttccagacaagagaactggagtggggtgccattgccttctcctgtgcagtgcagccaaataatgaaaacaaaaaataaattcattgatgtagaatgtaccttctctgaggacatagcgttctgtgtatatctctaaattcacagcatattataattgtctccccaacaagagtgtgagctctccaccgaaaaagactctctcttgttcaggttttttttttttaatataaatttatttattttaattggaggctaattacttacttgttcaagtttataacacagtacctggcacagaagcgttctatcacagagaatgattttttaattgcatgaatggagaatgaagcaacgcctgagttctaatcccatatctgcctcttactcaagacatgcttttaacaaatcagtctccttctctaaatctgaatttcctcatccatttttcttaactgtatcccagggagagacgctctatgcaaaataacaaaacagagagtggagaatactgagaaatcttcaggctatattctgctcttagaagcaaaatgcacatttccagaacaaaccaatagggacttccctggtggtccagtggttaagatttcgcctcccaatctagggcatgccagttcaatccctggttagggagctgagatcccacatgcctctcagtcaaaaaatgtaaaacaggaaaaatattgcaacaaattcaataaaaactttaaaaatggtccacattaaaaaaaaaacaaaaacttgaaaacaaaaaagtccaggagtgagaaaatcagtttgactttgttttttttttttttaatttaaatttatttattttaattggatgctcattgctttacaatattgtattggttttgccatatatcaacatgaatccaccacgggtgtacacgtgttccccatcctgaaccccccttcccacctccctccccttaccatcactctgggtcatctcagtgcaccagccccgagcatcctgtatcctgcatcaaacctagactggtgattcgtttcttatataatattatacatgttttaatgccattctcccaaatcatcccaccctctccctctcccagagagtccaaaagactttttctactgttcataaacagttcattgattcaatatgccactgtttattaaaccactctcctgttgattggtgtaagaatttataaacactgctggcaagaactttcttaatatgcctcctggtacatcttgcaagagtttccttaaagcagttacctaggagtggaatttctgggtcacaggatgggcgcatgtccaaccttactaatatcaaagtgccaatttatgtcattccactggtatataagagacctgctctgctccaggtccttgacactatttatcatcattagccttcttaattagtgcatatttggagcatgtgtgtatatatattttaatgagaagtaatgattttaatgaacatctttaaagagaacagtctataatttgttaggattatttcattgttttgacgttgctttcaccttactcactctcaccaccaccctcttccttttatccagaattgagcaccagactgaactgcatagaatcatttgtcctatagtgccagtttgaattatgagttttaaaacagttgtctagagacttccctggtgacccagtgggttaagactctgggcttccactgcagggggcagaggtttgatccctggttggggaactagattctgcatgctctgtggagaggcaaaaaaagactttaaaaatctaattcaaatttaactcaatggatatgttcctaaaatattaacaatgttacttaaaaaaaaaaaacaaaaaacagttgtctaacagtgtccgtttcacttgagtctgtcaaggacatatttgtggtctattattttgacattaattaaatctgcagactatttgaaaaacctaatcttcttcttcttcttctagaatgtaaaaaaatcatctaagagcccagaacccaggcagtttactcctgagaaattctttggaatttttaataaatccatcgatgccttcaaggacttggaggtagtggcttctaaaatgagtgaatgtgtgatttcctcaacatcaagtcctgaaaaaggtaagacatacaagcattcctaatataaatgtaaaaagtaagagtgaatcatatgtgtaggtaagaatctacctctgactcaaatatatatgtagctagaaaaagacatgtgtgtgtgtgtatgtctaatataaaagcaaatatcagtggcatgaaaaaaaaaaaaacagttatatacttgttggtgttcaagcccaaacaacacttaaccatcttcaaagtacagaattgcgcatgagtaaatgatctatgagatagtcactcattttcacctgatatttattagtaatatacaattatattcttcttcactttcagtcttcttaatgtccccttctcaaatcttttccctaagggtctaactctgagttatgaactctcatcttcaccacttaccctgtattgaaacttcctccccgctatcatccctgtgatacgaaattttaatttcattacttattttgaaaaagtgaccaatttccaaccatttgcattagttacatttattagcatgtgtaggcagtgaatctttgttctgtaaggtgactttggtgaattccttaataagaatagcaggacccggtatagaataaataggatctgaataatcaagatttgggaagcaggcctggaaagtactctaatattgcacttcaccttttgaggactctttaatttatgtaaatcgccatgcaacactgacgcattattgctttctatttagattccagagtcagtgtcacaaaaccatttatgttaccccctgttgcagccagctcccttaggaatgacagcagtagcagtaatagtaagtacatatatctgatttaatgcatgcatggctccaattagcttctgttaggagtattgcatgagctttaaaggaaatttctacagtcattactattaattctgttctcttactattcttcctgttatgattttcctgaaaattaaataattaggtttgcacaattggatttccctaaagctggagataatgtttaattggggtaataaattttctgccaagatagttttcaataaggcatgaaattacttttagatgatttaagcttttttcattgttgacttgaaatatattttgcatggaatttgcctgacaaaaaatggaattttaaaatggaaaatacaagtgctggctgtgtaaaattccaaggatatcttctgttttgttgtatataacactatttattactgtatgtttagaaatttgattttttttattttactataaaattatatgttgggggacaatatgcttctttctctgaaatttctatccttgttcgagaagaagaatccagtttcctagaagtcaaatgtccttttttctttcaaatgtaatcccatggacagaggagcctggagagctacagtccatggggtcgcaagagtcggacacaactgacagactaaacttacctacctaggcaaaagtcactagaagggtcattggatttgctaaatattctgaccctctagtctcatggatgctgtaggaggaaaacattcatcctgtgatcttagctgagaaggtcatctcttaaaagttagtaatgggacactctcatatattcaagagcatcaaagacctatccttaaaaaagagtaacaatttaatacaaatccacaatagcaatgcttcaattcagaaattaaaaggaaaacctctaaaatcaatctgttttggacgtttgccaccaaaacctgacctgaattgtgacgaggctatttgtaatctttaccctctaaaagtgggtatgtctttcactaaggcatgcctttcactaagaaatattaatgtgtttgactatagggtgctactcatactcactgaggatattatataatatacaatatttataggacagaaatattctaagatctaaaattctgaatacccattggattcgaaaaatttgaagatactatatatgttaaggtctttcttactaagaattttattaatcttttcaaagaagcagtttttgacttttaaaattgttagtacttcattgatttataatcttacctttcataatttccctacgtctgccttgggtttaatttgttcaactttttctaacttcttaagttctcaaggtagaaaaattagatcattgactctaaaccattcttcttttctaaaataagcacttaaacgtataaatgtccttataagcagctttagctgaattccacatattttgatatattgtgttcctattatcatttctttaaaaataattttccttatgatttcttttgttcatgggaatataaaagtgggtggtttgttgtctaaaactatgtgatttttctagatatcttattaatggtttctaaattaactccattattgtcagagaacatacagtgtagtcttgtgaaatttattgagacattttgtgaatattaaagtttcaggtgtagcatcctgaaatttgatacaagtggttgataaagttcagatcttctgtccttgttacattttttgtcaaatttttaattgtttactaagaggggagcattaaaaatcttttcttttgattgtggatttgattatttcttgttttggtatggtttctgctttacctacttagcagctctaactaagtacttatatatttattattgttatacctttcctaattgacttttacttcttgctgaaatattccttattaactctgctagagctcttgtcttaaagcatattttgtttgaccttggtagagccagcctttcttatatttactggtttcatatatattgtttttcttcttgtctttgttttgaaagtatatctctgatgggatgcagttgggccctgctattttatctagtcccttattttcattaattaggctgtttcacccgttttgtatttaatacggttatcggtgtggttagatgtgggtctaccatttcgttactggcgccacatgcttgctggtcctctgttcctcctttcccaccctcttttgtgttcattgattgattgacttttagtgctccattttaattactctgttgtcttcaacagcacctcttgacatcattttgtggttgctttaggaattaccatatacatcttaacttgtaacattctatttaatgttgtagcacttcagtaacagtgtaagaaccttgcatcagaagactttcacttgcctataacctcttttgtgctgttgacatatgtatttatgcaggttacaaacctcacaatacagtcttaaaattattgcttaaaaccatcttttaaagagaaggaaaaaaattcttctacatttacccacatatttattatttcttgttactcctcatttcctcttgtaaatccaagtttctgtctagcgttaattcctttctggctgaagagcttcctttagcgtttcttgtagtgcaggtctgttgccaacaaattctttttcttttaatagaaaaatgactttgtcttcagtaatgcaggtgttttatactaggtacggaattctgggttaacagaatttttttccttgagtcctttaaagatgtcactccattgtcttcctgcttctgttgtttctgacaaaaaggcagccagcatttatatgatgttgtcccttatatgtactgagtcattttccccctctgcctttcaaaatttacttctgttttaggagtttaaataagatgcatttaggagtggttttcttgtttgtcaagcttcttggatatgttaagtttaaggatcacacatacgtacaatcacacacataatccacatatattattgataaaatcagtctcacagatcatggacattttgttcattttttttccaacctccctttaatcttcaagatgaatgatttcaacgtattttcaagttccctgacttttctgtcgtctgctaaattttttcttccagtaagttttcctttttctattaatattttttattaagactttatttttagagcagtttaaggtttacagcaaaattgaggggcataggcagaggttttccgcatactccctaccacacatgcatagcctctctcattatcagcatcccccactagagtggtgatttgtacagtggaggaatcttcatggacacctcatatcacccaaagtccacagtttacatagggctcactcttgtgctatccattctaagggtttgaatccagtgcatttttctcatttctaaatttgtactttgtgttctagaattttcatttgattctttttatattttatatttttctgctgagattttccatctgcatattcactatgacaatatttctattttggctcttggatgtagttacaatagcttctctaaagttcttgttttcaaatttcaatatgtaggccatcccagcatggtttctattaactgattttgtttttcttcctgattgtgagtcacatcttcctttagatggctaatttttgaccatatgctggatattttaggtattatgttgttgaatatctggattttgtagcattccttcagtgactgttttgttctgataggaagttagttcagttcctagcagatcagctttctcttccttcctaggcattttttttttttttaagctttcttagagggtggagggagagtagcgttatttctaaagcatgaggtcactgagctatttcttgaatgcctagaaaatctctccattcttgcttgtcagaacttctttgtctctgaattgactgctatggtctttaagtcatagcttcttggacactgtttattgccagattttgtgaagtttctcattgtgcatgtacagcttattattcaaccaatgattgagtctcctccagacacttatagcacttcttttctacacagttcctctccccaaaataaccctgccttacaaacctcacaaacagccctgcctccagctaaggcagcagccctaagcttcattctctgatttcctattgcagtgagactactaagtcaaaaggtgtcacccagccagcaaatcaggacagttgtgggtcttatcacttgcattttccctctcccagggattacactctcgcattgcctttcggccaaggtctgaaatagttgcctagtataatttgtttagtatgataagtatttacgttgggaaggttaaattgctatcatcaggattgaatgcaaaatcttttctacttacaagacaactgaatataaaacacctgtttggtcctatacctttgagactttgggtagtttttaaatggcaatatgaatgaccagacttgttttttgtttcccttttgctccctttcttctttttttgtaaaaaaaaaaaaaaaaagtggctcttgcatgatcagcagcttttggccaggtgttctcactcatgaaaatggcacttatagatacccatggataggaccaggtattatggagtatacagtctcataagagaagcagacacaaatacaaatatttatattttatgttatttatactgtatttaacagaagtatgtaaatgtctttagttgtagcataaggaaaggaaggcgttttggggagtacggtcagggaaatttgaagaaaccatgctgttttcagggataagaccccaaatgttgtcatgctggtcagaggaccgtggcataagatggagcagcccagagatgtaagtgccctctctgtagcttataagggagaatcatgggataaggtaaaagtgttaaagttatccaaagggagttgtgctttcaaagtaatggtaatattctttgtaccaacctaaagtgtgttttaaaaatgtttaagtttgcgatccttacagacagtatatttaaatgatagagagaagatccttactttgacattaccttacacatcttctagaaagaccactgcccagctctagcccttgcttggctagctgtgtgatcttgggcaagtgttttaatcgctctggactcctcaatcaaatggaggttgataatctttccttcataagttttctatgagttttaaatgagttagcacgtgtgtacttcacaccgtgcctgatgtatagtacatgttcatcaagaattattagaacaattagaggagcgaggctgggtcagtaagtggtgagcctgtggtgagctctgaatcaagggagagtactgagttgcatgttttctaaggaccgagaagagagacatattcctgggcatggtgcccataaggagactccctctacaaagaaattcagcagaactgtagcacaggtttttgtggtctgtgtttgtacagatgtctggcattattagtcaaaccacacaagtcagttcccaccaattttgaacaccggacagttttcataataatgagaacagctaataagaactcaggaattcaggattactcaaatcctgtccagatgagcttccccacccccataaacttagaggcatttttatataaaagcaatgctttggacccaatagccttcatgtatgcttcccaggtggcactagtggaaaataatgccccttccaatgcaggagacagacagtttcgatccctgggttgggaaagtccccctggagtaggaaatggcaatccactctagtattcttgcctggagaattccatggacagaggagcctggtgggctacagtccatggggtcgcaagggtcagacacaattgaagtgacttagcacacatgcacacccttcatttggctcttgaggcacataattcagttctcattgacccctgatagatagcagctgtagcaagtattgggaatcatgccttggaggtgtaagcaaagccttttctaataaagtagattttctctcctggaagagggatggcaggatcactgaagagaactcaaggcctagctgtgaagccatttacattaagagaagaaataaggaagggacacctgtagaaggtgaagtcagctccggtggatctgaccacctcctatctccttttctgtctcatacaggaggactggtgctaggtgttagtcaaattccagaactttgttcaaggccagagtcctaggggtaggactttggttaacaagtcacagtgttctgggagagaggtgtacttcctttagtctctcctccagcttggctttatttgcaacacctcccctgggggctgtcctcctagctgagaaagatttagagtggggaatcccagagcacctcactctgtaataagttccttcggcttactgctggtgggtatggtctttcctctggtctgagtaatagcaattcaagatttggcctttggatagaacaggaagagcagatatctagctgccttgactctggggcatctggctgctcaaacataggtaacggagttctccgtagcaccatccccactagttttccactggagtctggggacaaaatattcatagcttcctttgttctctatgtctggatgtgtcacttggccaaatcatgatcatatgccagcaatcaaaatagacagtgtgggccatagtgggctggccatcaatgggaattcgaacatgtcactggaatacaaacacaaatacccaaattattatttaccgatagtgatacaaacatttctaaaatggtcagaattgcctgtaactccaaacacatttcctcatagaaatcacttttataaatagtagctcatgtaatcttatataacccttaaaatcattgtattattgtaataatagtgttacttcagttatgccaaatcccattttataactcaggcttattttggtgatagaattcatgttgagctttaagatgcctaaaacatatttcccatggggttggctaaaatatctgtcagtctggtcttaggaagtgattcatagttacatgaatggaagagtccacttcttcactcaatctcctttcagtataaggggtaccatgcctcactatgtttcctctacgctgcccaaacacacacccaaactttctattatgagaacctctttggaaacctaagaatcgtagaattaatgagtttcctgttccaagtttacaaatggtagggaaatgggcaattcctattctcactacagcagataagatttgtttcttgcatctcaggttaaatctgtgagttaacttttccctcttaaatgctgatatacatccagtggcttgattcttttagatcatgtactttaggtagttaatattaaataggtgactgtaggctgacacagtaacccaagtatcactgcaaaatatcatagcccaaatcagtcacttttactgaattggcttacattttgatcatatgatggctgaaagtatataatttataactgtattacatcttccaaagagaactgaaagtttaactcttacgagttgacacacatgtgtccatgttctcaaacaaggaagttgtttcttgtaaggagacagagaggaaaaatctgtcaaaatgttaagttttgtgatgggagcaagagtcccttagaggagttttgttgtttaattcctgaatcattctgcttctcaaggaagatcaaagcaggatgcagggaggtgtcccaagttgatttcctgtgcaggctctctctctcacttagttatatggggagacactggtgtttctaacatagaaagcctgaaaaattgaaacctttagtccatagcacagtgcaaagcactgctcagtatccagtaaatgccaactgacgatgcaatgaagagacaccacaattctaagcttgaggtccctgaaaatacccgaagcataatgtgcagatattaacttaaaatttgaggcaggccagacatagcttgatgcattgagaccttgatcgggatgcagaatgtcatctttaacctttcttggcaagaggtgatgtgtaaaaaaagtgaaaaggtattagaagataaaggcatagaagatggatttgcttgattagacagaaatcattttcaggtagatgttatctgcgttccatatgggtccacattaaccaagtcagacagccttctgtctgtggggtttctttttcaccttatatctttcagaaacgacgggaacttgtattgaaagcggaaaaatcagtatgttaaatactttaaacagatgataggtccagagtatgtttcggaaacagttgggaacaaccacagcattaagagcaaaacctctggcatgggtatgggtatgtggtgttcaccactgtactgtttaaattacagggaaggcctcaaattccactgaagattccagcctacaatgggcagccgtagcattgccagcattcttttctcttgtgatcgggtttgcttttggggccttatactggaaggtaagtgctgttattccttttttttttttttccccttaatcaaaaactttacatgtttatttgctcatactacattacataaatgattaacaaactgcccttttctaagaaaggatcctaccaagaaaacaataagacaggatatgtcttaacttacagcctccacagaatataaaccttagaaaggttcccccattcctccttagttttgaagaccactcctctaactgagaatgcatacttaagaaaatgaaaactggtttattagtctgaactaaatataaaaaggaataaatatatgatgtgcttaaaattagctagaaatgccatttgtatgatatgctattttggatttctactcttatgttctcttctcattgaaacctgtctgaaattttttaatgtgctaaatgattgcaagtcaactttttgaaatgtctttttaatttgattactatttaaatctttcagtttctttactactctttcatctccaacatcctaaaacttttgagtgataataccatgcatttttcataatgtcttactgcaaaagtattttcataggctgcctgctgatgaaaacataaaagtggagactatttacctcttaaataggacatgataattttacaatacataccattgttcttttcccagaagaaacaaccaaatcttacaaggacagttgaaaacagacagattaatgaagaggataatgaaataaggtatttcatttgactaaatatgttcatcggtaaggttgacctcgccactttgcatgccatgcctgtgctcataacatcttttaagaagtgtttcaccctcatgatggcagctcctaaccaattcttccaacttttagctccatttctgatctcccattgtctcttcagtcccacatctccacttacctgtgaaataccttcacagaagtgtcttcctgacccttcttagggtatgctctctctttttctataagcagcagaatcttgctcatcatgttcctggtcatggagcttgggaggcacgtttaccctcctcttttacatactgtaactgagacatgcttagctccttctttagcggcagtcattattttcatcttgtctgagttgctgccacagaaccttcctcggcccttctaacttccacctgtgtccccattcttgacatcccttcctagtcaagatattttcagtgcttttctctttcacacttcatctattagacctcactcttgcttttggagcctttaacttatctcaacttactcagtatttttttaaagccagatacaaaatttaagataccttccacttatgatgggattccctggtagctcagatggtaaagtgtctgcctgcaatgtgggagactcaggttcgatccctgggttgggaagatcccctggagaaggaaatggcagcccactccagtactcttgcctagaaaatcccatggatggaggagcctggtgggctacagtccatggggtcacaaagagtcggacacaactgagcgacttcactcactccacttatgatagttgacttctgatcactattttaccacatactgctcaggaccaatactttgactttacattcaggtttttccatatggcatgttattttctcttatatcatgttgtatgtgtacacactgacatattaagcacatacaagcattttctgtatatgtatcatatgcgtagagaattttttaactatttgaggagactgtgttgaagtcttccctgtagtaatattacgaaagtaaacttcccacccaattttgcaagctttttgctcctgtatttataaaaaagtaaaaactgccctttaaaatgcccagatcatggtatacttcagaatctgtcttaaagcaaataagcatgtttcttggttttcagtatgttgcaagagaaagagagagagtttcaagaagtgtaactgtggcttctatcaacactgttactttcgtacattggtaagttttcagaattcaagctaaaagatataacaggaactacacagcatcctagatgccagaatttattgtcttctatcaagctgatatcagtatgtcagctgaaactgttacattgaattatgcattctcaaattttgaaaggcaagcagtgttattccagattagtggattcatcttgtagaggaattatacagaacattaacagttgagtgtttcctttctttttctttttttttttggccacaccatacggcttgtgggatattaggtcactaaccagagattgaacccacatcctcagcagtgaaggtgcagagtcctaaccactggactgccagggaattcctgagtgcttcttatttttgaggccagaaaataaataagagggatagagcaaagtaggattaaaataaaatagaagaaaaacaaataaaactgatttcaattaggtgtgattact

SEQ ID NO: 114 - DNA, 101920 bp, Hippotragus equinus
  source 1..101920: mol_type = genomic DNA
agcgcgtatctccgccacccgggacggtctccccgtcggccaatcgcagctcagggctcctgaccaagctttgggtgaaagaactaataaatgctcccgagcccagatccccgcactcggtgtcacgacgggaggagactctcaggccggccacgctcccgcccccaccccccctccccggctcgttgccgagctccgagccccctccccagcgctcccagccgcggggccgccggcccagactcgcactaaacttttccgccctgggctcgggatcctggactccggggcctccctgcccaccccctttccccggttccacctcgagcctctttttggactaagagcgagcaaaccccctttcccgggtccctcctttctctccagccttttcggggagggactctccacgctcgggggagttgcctggggtccccagcgcctgtctcgtctatttcgccttcacctggatataatttccaagcgaagctgcccccaggatgaccacactggccggagctgtgcccaggatgatgcggccgggcccggggcagaactacccgcgcagcgggttcccgctggaaggtaagaaagggcctcagcgccgcccagatcgtgggtccgcggccaggctgctccacccagccggggtctccacgggctccttcgacgcgtccaggagcctattcccgggctacccccatatcaggagggaacagtcgggcgagattccctctcgattttctctgggtagacgaagcgtccttttctctgtaactcctgccggagcttggcggccaggcctgctcctgggcgggtatgctttcccctgttgttttggaaatgccttggtggggcaggggtcaaccggcttttgagcaccagcaagcaacttctcagcactttgtgcccccgaaggcatctcaaaactacctcggctgttcctgtattcgctaaactcttgttaattctggaaggattttcttagggggtgagaagttgtggtggcacatgcccgtgcagaatcgtgctggggaatttttagtattaattgattccttaattagggcctcgtttatctccagcttcatctggaagtttccacaacccatttggcggaccgcctttcagttagtctgaaggttctggactccggggaggcaggagaccttgcaagtcctttttcggactttctagacagtttgcgaggttggggcgcctgagccgggatgctgaccttgccggtgcctgggcttggcccttagtctgaaataggatgtattattaataatagccagagcaccagtggagcggaggggcctatgagcagactggactgtcgtctctggcccgaggtgtaacaggtgactcgcgatgacacctgcggcttgctttcagtaccctctttgacctttgcctgcagcactcctagcccaaaacccaaagggttgtcaactcctccaagtttcttagaaagaaaggccccccaattagacagggtttaatgccagccgcagaagtcctgggtgaacttctctctgcagggaggccgttctttcaccagcctctaggtctccccaccccaccccctgcccctgcaaattgtcccctttcttgggtccaaagggaagacagattcactatagcgagtttattttgccatggtggctcctttcacacaagattatgtgcccttgaattgcctaatagtttgaacaagtgtggttgaagcagggtctcaggttgggagcccaaatggagcaatttcagtgctaaggctgtaacataccaattggccagaagagtgtgaaattggggttcatctttcgggctgctctcctctctccccaaatgatcttccacttgtctctcttcttgacttctgttcccagtgtccactcccctcggccagggccgggtcaaccagcttggaggtgtttttatcaacggcaggccactacccaaccacatccgccacaagattgtggagatggcccaccatggcatccggccctgcgtcatctcccgccagctgcgtgtgtcccacggctgcgtctctaagatcctatgcaggtatcaggagaccggctccatccgccctggtgccattggtggcagcaagcccaaggtgagctcgcaggcctggccctggggggctcctgtctggagttagggcagagtgggcagtgggaaaggactgccagctgggactttctgaggtgtttttttccaagtctgggaaggtgtgtgtatgtgtgtgtgttgggggggggggcggtggtggtgaagagaagggtctacagtgctgtttgagctagtacttcttgataaatgctaaggaaaaactctagtctttttgcaaaggagataaagcatttgttttgtatgcctcagaatcctggaattttcatcaacttgttttaataggcagacacccaaagcgtccaagctgtactcacctgttgctggtttcttctccaagtatctctcaagctcccagtgactacactgcccattccaaatttaatccaaggagccactttgggtttttgaatggtttcactcccaactcttctccccaattgcctccagtccaaattgtcttcaaggaatcaaaagctagggtgatttgctttctttgtaatgagcctatgacttggcttttaaaaggcagtttggtgctatcctcaaattattttggttctccttacaaaaggaaagagaatcacactggctatggctgagtgggaggggactgcctacagctgcccttttttctggatgtggggaaaatccaatataattttctggttgccacagggcaaaaccaaaaggaggattctggtaaactgaaaatttccagacaactgcctttccttgcatgccagcccgctttgcaacctctctaagaatctctggaaactctttttcttggggaggggggtggtggaataaagagcctgtctttccaattaatcatatttgctgccactctgatttttaatggacactcaacttttgcgtttcattttgctcttcacttgagctaaaaccttgaattcctttgaaaaggcccaagttacagatctaacctgattttttctgctcttctttcaagacttccttttttagtttcattttcctgttgattcagcataaagggttgcctttctttattcccacggatcagaaagtacaccccttccaagaggtcatacctctttttattttatcccaactgtgagagctgatctggggaggaaagggttgggatggttttccctctgcccttttctaaggtacactgctcagagagttggggtccttttgctaaccaggggaaacttgccatgcggcacaagaaggagcatcccgccaggcccggaggcggtgaggccgccacatctggcccagagaactgggtaccaacgccggtctgccggttctcttaaagcaggtgacaacgcctgacgtggagaagaaaatagaggaatacaaaagagagaaccccggcatgttcagctgggaaattcgagacaaattactgaaggacgcggtctgtgatcgaaacaccgtaccctcaggtaccaggctcatctgcgtcttcccaaggctaggcgtcagtcgctattacgcgggcgggccatctgaaccataatcacccccagtgatcgatctggatgatcgggaggcggtccctcccggggctctgaaatatttacgaactagccgttttatggagggagtgatcagctgcttgtcctgaggttgagagaccgccgcttagggctccccaaagagggtttctgtcgaaggggcagggcaggaaacgcgaggcggaggccaagcgtttattaatattgatgttcccttttaaagagaaacaaatgttttggtaaccctaaccgaagggagatggggccgcgccagtcgaggcttctccgtgcgcgcacgggaggggaggcttcggcaacggccgggagatttttttccgggagagtcccagggaccatccggcgcccccggcggccagggggaggcgaagggagaataggggcgagagcagggcgagcgcgagggcgcacgggtttgtttttaattagaaggaaactccctttccccccgccctgcgagaacgagatatttcagaggatggatttgtttaccagactggaatctggaaaaaataaacggggaagagtgcattttcttttgatttttacaataggaaacgattctgcagttgaaatttaaaccctttatggtcgcaaaagaaaaaagtcgaattgcaggggatggagccgctctccttcttcctgccataccgcgaaccgcggggcgcaatgccttcagcttggggtgggggtgtgccgggtgggctggcgggagaattctctgagactggagatctagagacccgtctgtggagtcaggagggaggcttcctactggggagaaggacccgtatggctggctgttcccagcccctaacccggaggtgtgagctttccaggctgcggtctccgtgatcctagaagacgctcatacaatgggggtggggtgggggtaggttgagtgggagggtgaggcggggtgtagaaggacaaggatgcccaaagatgcaggaggggacggaagcaaactctgcagggcaggccttcttcactcccactccgattaggagctgggagccccttccagcatgatcctgcaaatctcagtcgtttgcgcccccttcttccttccgcccccagtgagttccatcagccgcatcctgaggagtaaattcgggaaaggcgaagaggaggaggccgacctggagaggaaggaggcagaggagagtgagaagaaagcgaaacacagcattgacggcattctgagcgagcgaggtaagcggcggcgctctgagcggcgccctgcgggctagcgcctctcggactccgcgctctgaccttggaggctcgagggctgtgcctccccggctcctgtcaccgtccctcctcactcgtatccactgcacccgggtaagagcattgaagaaaaagacccgagatgcactttcattgaatacaaaaatcttttttctctcttctctgtctcataaatctttgttccgcaccactcacagtctctcggaatctagaactacaaattgcggtctggctgaggggctatcctcttgcccgcaggcttgcaagactgcatctgagcagtttggggcctggggggcagtctttgagcctcttgaggttaaaggaactttttgcgcccttaggaaaggcccagagtctccaaagagcttccttggttgaggaggtgggtaggcaggggagaggaagagagactcaaaactcctgaaggcagtaggttctcaaagttgcgtcacactgattgccttataaatgtatatgtgtacgtcggtggtttttcctttgttttaaattggtcttcaagtgcggtagggtttgaactgtgtgtgcctgggaagaaaaacaagcttaagatctagttacaagcaaggggctctgggttctcgggttcacagtgtgggtgcactttctcttcccaggggtgtcttctccttggctgtgatctgtcagcctcaagagaaaaacctcccctgtggagccttacatgtaggcttggggtgatcttcagagccccacagaaaaagtcaaccccgtgggagttgaactgggaagggatcctggcacaaggagagtctccgcagttctgcctctcagcactttttgcctgggggatggttgcacctctttcgaggcccaaagggtcgggagttgcccggtgttcccacccatgcatggccttcccttgctgggggctgagactcctgaggctgagtggacttttgagttgacctagaagggcaggcggctctccaggtgggcttggagtggtcaatcacctactggatctgagccctccaccagtggtgtcctgggtaggactgtggttcggggaactgttgcttttttaactttcattgctcaactccagctcaggccactggccctccggagccggcaagctttacaaatcaataccaaatctgtacacaacttcgaagagacacagacttagatgttacaaatccaaaccacagtttgtagggctaaactgatgcctagatgctctggcacacacaggcaatcaagacataaaaacccagggcaggttgagtgaagaagacacataccctgtggcttccctcctttgaagcagaggtctcacacagactcagtgtaagcccttgtttttgaaggggtgcctttctgccctggtctctgagaggatgcctggcttttagtcctggtctagatgctgtattggagatgctggggagggaagaaggcgagaagccagccaaccccaaacccaacaggcccctacaggcactgaacccagaaggaggcttgggaaggagggtggaggtggccaggctttgctacttgttgctagaggcgcctgcgccgcagctccatcgccgcaccggcaaccgagggcccaggagacaaaacgccccaaatgagctggtcaaacatttgtacaacttttccagcttttacaaagaaggccttctctacacaatctacacttggagatgaacttgggagacaaagccgggagagtccattgaaactcacactttagctcggcccagacaaagctcccgctcgcagcagcttgatgtgaacaaaggaaggcaacctttttataattcaaggagaaaagaagagaaaacagccccacaaagggccgagaatagacattatgggcttgcaatgagggatgaattattcaatgagccccaagaactgctgcgccaggaagttttatggactctccagccgtggaaaaagtggccatttcacctacaaaatgtttctagtctttcgggctgtctagctggggctgctgccattcaagggcaattgctaccatttttaaaagcggagtattctccccagcggggctgaaccgttgaaaacacacacaaacacacaacgcggaggctgaagtctaatttaatttggagttgtcaagcaagaggcagtgtcagtctcttcagcgcctctagctccttttccagatgagccctggagggcaagaggggcccagagaaaggacagaggggaatggagttggaagggaagtttaaagatctcaaaaaggaaaaaaaaaaaaaaaaaaagattcccggtcgtttgggcagcaaaagtctcaggctgcctggcttggaaaatagaatgaatgttgataaaggggtctgagctcccaggcgggcctaaagaaggccgtttgggcgtcctgagcagggcggtccgcgctttctgaaggttccagattccttttcggcctgccggctgttgctgactggctcttctcgggtgcatctttctacttgtcagagactaggacatagggtgagaggcaccctgaaagaggtcagaacagctttcgtttttctccccagggtctcgttctagatggccccattcactttcccaactttgccttgtgcgtcgccccatccaagaagaccgtggctgaccgacccggtgcgcgcaggcccgtgcgccctggcacggaacagactgcgcgcccctccttggatctacacttccagctgttttgccagggtggaaggagagggttgggcggccaggaatcccccacccttcccaggaccttcttcactccccttccttcccctccccattcggcaccgagagccggcagggcgcagccggagaaacccagccccggtcgcggcaacggggggctgtgggcaaggcccgcgccgcggccactcaatgggtgcctctgttcctcccccggcgcggcggagcgggcccgcgggcgccgccacaatgggcacggcccccactcttgcgccctgagccaaagcgccgcgccgcgccgccccctcccctgcgctccggccggctcgaagcttagctcgccgggctgcagccgactcaattgcctcctttatgtccttctcactttcatctagacacaacccgcctccccctccttcttctcctcttttttccccttccttgcctgaggctcacattagtgaaatttctgcaacctccccccattttttccccctcttattttaaagaaagcccttaacacaaaagcggtgactaatcaatagaaactgctccttcatcagctcctccccccagcctcctcctcctcctccaccagcggcagggtgacgcttttcctgtttgtgagttttgggaaacatttttgctttgtgccgtaatggaattagaggacagatgaggactgtaaatggacacgcgactgcaagactctcgcttaaatatttagatgcaaagttacaattactgacttgttgcagcagctttgaagtggcagctcgggggtgcagggggaaagaggccagattgccaaattgatgttttgattggggctggagatacactttcataggaccctaaccctttttaagaatcaccagctagcgtgggaggtttgcaacagtttcaaagtttgagccaagagacccaagcgtaggtcggttggagcttaccctccttttatatagatccctttcaatttggcatttatgaaaagcagttggttgtttttttttttttttttggatttgagaaagtaaaagtgacaaaagctttgcgcgagtttgcaaacttgtgagcttttctaaaattaacgaagacgacgtcatcttttcagctgggcatacgataaaacaaacacgtactgacgttttaaaggttctggaacgatttcgtttcctgtgggatcatgaacattttatcattaacgggagcactgttgaaatcgagggggaactgaaggcagtttcgtgtctgccccctctctaccccaccccaccagttagcagggaaggacttttgggcgcgaggcaaagggcgggggtcaggcgggggcgggtggggagggggaaaatctttcccacagattaaaatcatgagctataagatcttaagtttgtggcatcggaacctttattaaagtggacagccaggtctccatttgtcagaatcacgaatttgaccccaatgtcgtgtcttgtcttggggggggggtaaatttaatgttttctgaagcgcctaaaatactcaacaaggaaatatcgcccatttaaaaatctatgggaaataccagaacttgaattaaattgaaacagcacgctgtgttcttttcgaggaggtaacggtaacgattttcccgttggaccgatttgaaaggaagcaaccgagatcagattgtagctttctttttcgctggttggttttgtctggttgactgctgtcggcttactttatagctttattgaaaacatgcagattttctaattaatgcttgaaattgtatgtttattttgaagtttgatttgctgggtgatagcaccggaacggggacgttggtgcttcaagtgcgtaataattactgaagggtcatttaagagtccccagggctatgcaataaaacccatccgcgcggcgaggtggaaccagcaagtgcgcctgggttcaaggggtggaatatacggaaattcatcaggtgaatagcagtgttgccaccgaactcaggttcaacgttcacgagtatatgtatttttgagaacaacaacaaaaatccttcgtaaccacgaggttaaatgttaacgtacatagatagtcaatgaatgttaaaagcttcaacaacagcaacaaacaaatggtgagagtttcgccaggcttgaggcagagaaggttctgtttggtggggtcctaccccaggtaatttatttaggcgggtaaatgaagattaaagaaccattaagaatgtacatatataactaacaagacagtaaaaggcaattaagcagtcagtttaatgccttatctcactggctgctctggggttgttttacaacaaggaattaaaatctgaaaaggaagttttcagcagctctggccaaatattgattaagtagctgtttgttgataccattgttacgcattaaaaggccaggatcgcggcctctcagtggccatcttccattgtgaaggattcttaaccactgagatcaaagcgggatcatttcaacttatctgtcttggaaaatcccccttttcctctgaaacctctaaggaggattgactgaattctctttaagaaataggaaccgaaaccagttacatgtcctaggtttgtagagaagagattcatggggtgtttttaattatcctatggtgatttcttgtttaaaactgaagctaagatggtgaatttatcatcaaatagattctccttggccgggaggtggtgggaggcatggaagctaagatcctagtgtccactaaatttctaaatatggaagttttactgaagttgctttccaagctggaatgatgtaaaggcaagatgtcagagttttatgtaaaactaggtggggaataattaaatacacaggaaactgggagttagattaactgcatttccctacatatgtttccacaatttttctgtttatgaatggttagatgagtcccatgtatatttttaaacctcctacaatgtaggagcagatatgtttgtttgtgtgtgtagtttgtgcatcgttagagtttatttataagtcggtcactatgaattatgctggcagtaaactatacccagttgcacacacacacagaaaggtttatttgtcctgtggattacactttctagagtcatcagaatttgaggtaacagcacagcttcccaattcatactcagcactgctgttgaatgctaggaaaaatatttccctgaataattttatgacttttttggactgttgatttttcgatgaactgctagactttttttttttttttttggtttaagaattcaatatatttggaaagatttttcttttattatgagagctaaaattcctgcaaaggctcttttggaaataccatctctgtgcttaatttgcaaattccaacaaatcactctaactgaggttgtgaaatttatgccagattcggctttgaatattcaactgagcatcatggatctgcctgtgggggggattttctgaagccttctctgttcacttctctactaaataattgtgcttagagacttatttttatttcatttgattttattttactatgtcattcacccttgagcaagatgaatcttgacatacagagtcagaatcattatgagtattttctaacattttctattataattcccaattaattaataatctgtgctcaaatgtcctctgaaatagtcccaatcattgcacattgggacaactgcctgaaatagattaagctggaagtgtgagtcagtgcagattgattatgactgccttgtcctgggtccagatgcagtgctagagaattctttgctgcatttttcaggtatatgtgtatttcatgtttcacatacatgtggagtaaaagtgactgtcccctcttggatatcaggctatgtgttcatatactgccagggggacacagagtcttactctgagtggggcctgacctcagtaccaaggcagaattactgacttgacagtgggcttatgttaattatatctcaataaggttagaaaaaatatttgatgttattgttgaaatagaaaagtgctggctaccttagctggagaattgtgattgaagaaagtgaaagagaatttcagaagttgctattctcttggaagatacacactaaagtggggacagaggaccgttctctactctgttgggaaaggtttcctcaccccattcgtcccagtcttgggtggagagtggcacagttcagctttcagctttatgttgtggtattgggccaaatgctgaactccaatagtgttgaagttttgctggaatggggtcgtctctttcctaagaaagcatcctctcacattgtctgtgatggaattatgccctcaaatgaacagaatatactttccagtttgtatctggaacatgcagttatcaaaatgcccattaggattataaaatctttatttaaaacagatgagttagaagtttcaccattgtcaaagggaattatgaaaaccatggaaaatagttgttgaagacagttgaggaataaaaggctttatgaatttttatcgtcaaagtcagtttttcttcctttctgataaagaccaaggagactgacgtaatttctgccatggcaatggccacttccctttaaagaagtaattgcatcttaataaaggataatggtgtaaaatttagaatttgatttggtgtacatttgtcctagaaaaaaattcctgaggaagagttttaccttagatgttgtatataacaaagttcgtaacatttaaattttagctgcaggattttaagtttaaaaaaaaaacaacccaaacaacaaagaaccccttctctctgtgatgaagcaactcaatcaaaacaggtagactgagtttttactgcagtggctgggaaatgaatcttccttcataaaacaaattggaactcatgacaggcaatagcaaaccggccgtgtttatctccttcaacccacttagtgatttcttgattcttatgtacttttatttggccagctttactgtatctacagtattatattaatataaacttttgattctaggaaccaattccccactcattctggatctgattccattagatctgttttaaaatagctgatcaaaatgctttgtgacaagagtgggagattcttcttggccgactaacataggtttgggggagaggaaataccagactttcagcattaaaaattttcaggatcatattggaattcaaatagtacagctaaggaggcttaagtggaaatttaaaaagattttataatcagatggtaggcatatttctggaaacaacttcataatttggtgtgcttggccttatgtcattagatggaaacaataagtatgttaggatagaatagctaagaaagcaaagttaatggctttgtgcaatttaccttatggaattggtttttgtatactttcacagtcaatgcttacatggtcatgtacaaatttacatttttaacagagagcctggcttgtgatttttacaagtacacagataaagtagaagtacagccaccatacttatatctttttttttggcaagccctagtataagcatcaacttacccagtcaacaggcacttaggcattgtctgggggtattagcatagtttttgtttcttttatagggtttatcttttttttttttttgaaaaaaaaatcttattttatatagacccatagaatctattttcaaacacatattaaaaaattcttccagtattcaaatatactattatgattaagaaaatcttggccacagggtgtgtgtcttccaattaccatggttaagcttaacctgaactaaagaaaattaattggtccaattcattttattataaaaaaaaaaaggcaacaggttccttctttgtgaatccccacttggctggtttcctaactgaggttcactaatacaattgagtgtttcttgtctgacttaaacacaccccaaagtcctttatcatgtctttgcttgcctttaagagcatagcacccaaggtaaaagtagtctatcttacatcactaattttgctcgaaaattgagaccaagcacattttgggtgtgatcccttgaacttcagttttgacagctggtaagatgggggcatattatactgtaccaatttccctgagtggtatgagaatgaaacgagaaggtgcaagttatacctatctcataggaaaactcaaaaccttgtagagggaaaaacctctgaacttacagaaagtgactagtctgctggcagatgggctctgcccaagggcagataaaagcttaattccggcttaggagcaacaatgaagaccaacacacatacatgcacacacgcacgccacaaactccactttcactgagttagaaaaaattgagtttataagaaactctttaatagaatagtctgtattgatttaatagatatggaaaatagcaaaattcaaaaaccatttgctgggatgtcaaacatctttcttaactacttttttctcctgatctgaaagtttatttttctctcttagactaacttggttgttgaaaactcttccaagtcaaactttgttttctttgtgtatttgcacaagtcttccctcactccccttactaactgacaaataagttgctttttgaaaatggatctcatctatgtctatacgttcttactcctgaaatcttggcgcaatcctttgtttgtgtttgtataattcctcatcgtgtcccttcttcagcctgcttccttgttctaaaatgtttttatggctccgcatatgggatggtgtgcattcttaaagctttctgcatgattcttcttaatctccctcctttaaaatttgagttcagaaatattaaggaaattttccaaaatagcatttgttaagctggggcgggggtgggggtggggtggtgggatacatttcagtgacctcgctattcagttttactctgtctagtccccaaagctggggacttctatgtgaccggggtgctatgtgagggtgaaaagaaagtagcctggtttgtaagactggggttaggggcgcggctggagagctcctgccctgtggttcccccgctggagcagcttgccaatgcagccactggagagaaggaaggttgttttcttatccccgcatgcactgagctgacctgtctctgaaataggtcaggctggggcaccgccagtttatgcagctgtcacggcttaggcgtctcagcaggcagcccggctccttggccagtcggcccccagtgaactgataaaaaattcgctggtgagccctgggccttccttctggactgtgctggccccctgaaggcttttagaggcaagaggactccaggattatgggggccaacgctcagcctcaaaagggaagcgatcttttattccaaggattgccctcttgtccatctgaacactcaagtgaaatacatgctttgtcagatggcattttaatttttaattgtttattttttggctgcaccacgtgacatgtgggatctttgttccccgaccagggatcgaacccccgtcccctgtatcagaagcatgaaatcttaaccactggattaccagggaagtccccagatttttaaaccatatttatttttgactgagtaaacctttcactctgtacataattcaaaagatagaaatgggtgtacagggacaagtttcctctcacccaagtcactcagtaacttgattgtctttctagagaggctgtataaacaagcaattgtatttctttctctcttaaaaatattctttcctcctttgtttgcacaaatggtagcccactgtagaaacttttctgcgctttgctttccccctgccccaccttcgaatatatctctgccatcactccacatcagaggctgagggtctcctcagcctgtttgtatagctgcatagtattccatcctgttggcaaatgatttatttaccagcatttagagtgtttccaattccacagcaccatttggcacatgtgtgagtttatttgtaaaataattgctccatggtagggacaaagggtacgacattagtgattttgatagctttagtggaatttgggttctgcattgagaacaaatggtgaaggaatgtttagtcaacatggagtgtgtgcaggtttggctgtggccacttgtatgagaaaaaagagacgcttccttctaccactgtatgtaggtaggaacataggtttcgaaatttctgcttggaaattcctccagtattttggtatttctccaaatggaacattctctaaatccaaggaaaggtttttttccttgacttattagtgcctctttttattctatttttatctactgtttatttcactctgcctccatcgaaactagtacacatatgttaagcactttttttttttctatactggaaaaactattggtagtttttagaacaattcagagacaacttattctgattgtttagttatatgagaaattgtctctcagggttaccaaattagatttgaactggtaagacagcaggttatgaataataaagcagtcttctatttctcatttttgaaaaagtgctggcctgattctctagggttttcttgagtttggtaaaggctagtttttaattttatgaacttttaagggggtatgtatccattcccttctaggcacaaaagactttttatatttttgcacataccttgcctccctcaaatcatttcagcccattttcccttaaatctgatgctcaggaattcagtttttgatgctgctgagtacctggcttacctaagctggaagttcgaatctgcagaatgagccagaaagtactgtgttccaactgcatgagaaaaacaaccctctccaaagcccccaaagaaagctggagatgtgaatgccaataaatattttaaggtcaatatttcaagtcattccttcttaggactgagcctttcagaaacaggagaacaagttaaatgttaaggatttatttttgaaaatcaaaatcttgattcggtttttaaaaataacagaaaaacaaacacaggtcttctttcttgactgttcctgcagccagccccacagcatgtagcagtgttctactagacaggaggcaggaaagtgggttttcctaacgctagagcttttgtttgtgcttcgatagaaatggctatctgggtgccttggttgtcttcctgcttcccctccaactggcttatggaactccaaaggagtcagttggggatgtaaacaggcctggcatttagagcatctgcaaagagctgagaagaatcaaaagcagcttttttcccctctcccagctctgtgcataatttggattgaatcaggcccataatttgtgacatctgattactacctgcaaaagtatgcaggcctccatgtaggaaggagaatattgggaaggttaatcccaaggaggaaaattgttgacctgtttgtcagcttgctatgacgctctcaacagaaatttagaccatataaaatcagtggcttttgggtccatgtcagcagagtaaccatacttcagattccccacatatcctcacgttgttctgatcacagaggtaaagaaagtagcaggctgaggcgttctctggggaattggcttactattagggaacagggagttcgttgggagagctgccccctctgaattttagatttataactttttaaaaagagacccatgaattcacctggagaaacttcaactttccattgcaagattcccaggtgactgggatctcagtgcctggaattactggatatattttggaaacttttagaacttattacatcctcttagactatttctaaagggtaatgatagcccatgtcaggaggttgagcagataaatggggtctctcccagtgcatcctgggaacttgcagtcctgcctacacagtgcatccgggtctcctcgatgcatccggggaacctgcaagacgccagggccgaataggatttgggaagctaaccaggatggaaactgtccaggttgtagatttgccctaactttattcctacaggacgcatctggggctcgtgtgcacgcaacacgtatttatcaggggcctgtaggaaagcaaattgtgtagtctcttaccagaagccaatgtctgcttgtggtgactggctagccctgccaagctcggaaatcgcgctgaagttttgtctgaaagaagagaagaaggactgcggacttagcatcggatcagaatctgtgaagaacctggctggctaagagtgcaggggtgaggcgtgatgcctggttgggggaatttgtcccattctacagggaatcagttccaggtagagggcccagatggtaactcaagccctggcttattttggatttagctcctgggcttttgtctgaactttttgagccttaacctctgccttcatcctgcctgtggaaagtgggttttcttgggtcgtcatgagcataaagctctttgggggctgggaaggctgcctcattttgttttcttcagaggttcaataagtggatgtggaaacaaatcgtgttcaggtcaagtactcattccctggcacacctttgtgtcatgtggtttgtctttttagaaaaattgaaaccaacagccactgcacaagcttttattcccagtggagtcctagcagataccttgggcagataaggagaggaacaatttccttattacaaaatacaaatgacagagagagccgaatttggtcttcattttgctggttggcgaactttcatcattttattgaattactgtaatttaatgttactcgtttaaaagtaacgatttttcccctgaaatgaatccttttaatttatttttaaaattgaaagctcaaattaaattcatttgggaagataattactatctttcacattgacatttctggttcttggaaaatccttttggaaaaactttagaagatggtcactcagaccatggtttaataagaagtgatgttactggaacaagtttggtttttttaaaagatcatttatttggctgcaccatttcttagttgtggcatatggactctagttccttgaccagggatcaaacctggatcccctgcattgggaattcagagtcttagccactggaccaccagggaagtcccaagtttgggttttttacaggaatgtttgataatctccttgccctcaatcatctgttcccaaactccttgaaaatgtttttttcacttgcccttcacaaagggctttataggctgaccttgggtaacaagggggaggtcagtcttagctgctgttccctctcctttcctgtctccctgccatcctgcttctttctgcctggtttactctccccttgtgtaccctgattccacgcacacacctaccattgcttccactgagctttattttacctcattcacatgaagactcaactgttacccttcctaaggatgtttgcagtttctaaaaggcccctgggagctggtttcctggcatagaggaatgaactcccagtggcagaattccaggtacccatgtaggacagctttttgatggaggcaaggggcaggtttctgatgcccctcaggtcacaccccagcagatagcagcttcactgtggatgggcaggattagttctgctccaaggaagctctttgctggtgagtgtggctttccagggcatggtaccccactgagtactcacggggcggcagggccaggtggggctcaagagcattctcccctgcaggtggatttccgatacatccaggatgccagggaagggccttggcttgtgtcctttgggctttccggcaaaaagcagggccagaggaaggacatgcagcgtctgttctggcttggagccagggagggcactttggagcccatcctgcctctgtgctcacaatcctccaaggaagcagatatctgatttgggtatccgtgcttccagtggtgcctggatagttgtcagtggtcagaagaagtgaggttctcctcctcaaaatagatagggcccaaggggcatttatgatggatccactggctaggagagcttctggaaagtattctgaagcacttccaggagtcttccagaatgcaagagcttcctaaagtctcagtgctggcattctggagagctcagaaacatgtggctttggaggatgtaagccactagggtcccagagggacccctggcatttggtccacctgtgatatgtggggttcagaaacagcctgctgggtttgttgactctgatgatcttggcttactgctgggcccccaaagttgacacttagacttgattaatgttttgcaagtattaacaacagtgcatacgagcacctaggaacagcccccatctctccttggccctctcaagtgaagaatgagagaggagtcctgggcagaggtgggtttactgcagagctgatgaaccttcaattccagagcccctcacctgcgggtgtcccttccaggggctctctgaattataaaagcttcgggtcccatgaaactgcatctactcttgtccttgttcagtttagtgtgggaaaggtagaggcggcctgtacgtacagtataggcctggcacagctgtgtttgagagcaaagcaatgataataataattatgatactcagttaccctccacttgtatctttgactttaaaagtttccaggatgcttccttgtttcttatgccctatcttatttacttatggagccaaagtctgtgtctagcaatccaaaggtgctgagaattcacccatatggcccttctactgcacagtattctcagtccttgcatggagacccttacagggatcatagaccaccagctccatcaatctggaggaacctccatccactcactgcgtacaggtcggtgggtatgactgtaattctgggggtgggggtgggggctcggtgccctcagctgttaaggtgtatttggcaatttttagacatttcttgtaggtctttacaactaggtaaaggtgatggtctttcccagcctggcaggttgtggcagctgcggtcacatgaagctcttgatagactttgggaaggcccagacagctgtttcaggaaacagtggggcctcaggcagtcagggaatccacgcaagaatggagagggctgtggcccctcagtgtcttggacggtgagcagctcctgcctgttgtttgcctcaggggaaggatagtggcagtggggccttgctgtactgttgagcaggtggacaccctggcttttccccatccatgtggggaaatgcttgctttcttggtcctcctttcatagctgcagcttccagatgaggctggaaaggcctgggggtattggttagagaactttgctttaagttagagttgcttaagcaggacggtaactttccttctttcacatcatctgtgcctggacattttccctgacacccagagaggggcacagatttctggcagccgacaaggtcaaagctagaaactgcctgggcttgaggagagaatcaagacaatggtgcgttcacttcatcgaattcggctgtcatttcttaaacttaaattagcttcctcacttgtagttctcagaaactcagtcggataaacaagatttgtttttttgattctgagttataataccggagaaggcaatggcaccccactccagtactcttgcctggaaaatcccatggatggagcagcctagtgggctgtcgtctatggggttgcacagagtcagacacgactggaagtgacttagcagcagcagcagcagttcgcatctaaaaacttttatcatttttttgagaactttgctatgaagcgttttagaaacttggagaggatgtaagaagtatttttttgttacattgaaaacagttcaaagcaagatgtcctagcctaacaagggaagatttcaataaaattttccccctcactttttaacttttatgtttgtggaggataattatttcaaaagtcaacacatactacttatcaactttttaatatatattctgaaaatagacaatggttcattcaaatgctacagcctttaattacaaagaccaaatgataaaattaacaatgtaaaatgtgttgtgaaaagtcattttttatttgaggaattttaagagtatataaaatagccaatctaatatttgcatttataacttttcttatgtatctgaaatatgtggctctaattttgttgtagttttatcttaagcaaatagattttgtaagcgaataccactacaacgtatataccaatctttaaaaatagaagcagaacattataaaattagaatatcaggaagagaaactgtacccctttatacattcagaataataagtactattgtttaccatatgaaagagcttgtttctgtttttcttagtgattatcctgtactcagatcaaatgttttgcaattttgaactttgaatcacaaattaaaatttttatttgataggagagaaagtcactacttgacctatagattaaagaagaaatctgatctcagctacttttagtcaacattagaatttttgttgagtaactccataccaatcaaaacaattaaaattattgactcccttttctgtatccataagcaaacttctgacttatactgccacgtgaattgagttccatcagctttgaagaagtcgaatttgtgagagttatggcattcatttgtttaacatagcttgaatagccagataactataacttttaaaacggcaggcatttataatgccaagtttggggtggtgagcagtattcgatctgagtatttgatttcttgtacttatttttttttcatgttttcttagggaagtgctagttgagaatcgaagaagacttgttattctatttaactatataaaaacattaaaacattttagggaatgcaaaaatacatatgcttcaggttaaaatattgagacatcttggatattttaataacatttccactctagcaaaagcagactttttaaaactttatacatgaggttacatttgcttattaaagtaatttgaacactttggaaggacactcaactttctagtggtaagactttttactgttttccatgctactatttatttatagatagagaaccattatgatcacttttgtaattgttcagaaggacaattcttaaaagtcaatgtgaatgcaaatgtatacgaatgaaagaaaacgaaatcaacaaatgctaaaactaaacagtaagatgacattctataaagtaaatataactgccaaataataatatatacattacatatttatattaataatacttataaagactgttgtacaattccgttggaatgttcgagaggaaaaatatccctttaggatttggagaaattgaaactgttgctgtttgcgaggaaagggacccacggaggaaaaaaacgttctagggaagtaaaaggaatatttaaacttcttcttcagaggctaaggattttgtatctttatatacagaaagaagattccttcctgaagttgatttctcacattaagattaaaaagataatttccctagaaagtgaaaaacaaaaccccaccaaactccaaattcacttgtaggatggataacagtttagatttgcttttactcgaatgacgggagttttttaatgaaggaaagtgaactgaggaacaaattcaagaaattatagcaccaacttttttatattgtggttgattttttttttttttactctattatagtcccaagagctgtcaaattacctaaagagaacaatgagtttctcaagagaaaacaaaaaggaaaaagaaaaagaaattacccagagatgctgcaacttacaaaacagtcactcctgctaggcttcctatagctttaaatgcaattgactattgattctatcagacctagttgacttaaaagctaggatggatcaggagctgatttttggcattccttcattttcccactcttttgttcacttgacacgcagcttttatacactggctttgcaggaaccactggcatgatctctgaacaatctgtcggaggaggaaagggctcctccaaccagcagccagagttttaattaaatactgtgcatcccgtctatctcaacagctgaagaaatcgctgttggcataaaggtacccatgaacttatgttctctggggttaatacggcaaggagccttcttggtggtttaaaaaaaacaaacaaaaaaacagaactccaagctaccctcaatcatgtgattattattttttaacttaagaggactttctgaagcaacagtgcctatctgtggagctcaactcagtatcacgttgaaagggacatgcaggttggagaaattattttgtttattaattcaggttacatgtcctgccaggctggctggaagagaagggaaagtgaggtgtaacttttaagcacacactgatttgttcttattacataacaaaagtctatttctttatcatgttatcattcagttaataaaaattagctacaataacagcatcaacttaaaaacccctcaaagtccaggggattttctttcacaatgaacatgaatactgttcagaaatacaaacagtcaaaggataactttaggtctgaaagagaaacctggcaagggtaattgaataagcctgggtcccttgactgtgtcatggtgagggcagtcaacatgtcataattaggtttattgagggccattccaacaatctgcttctattcttcctgccttattgtccacagctaggcaaatagccaagggacaaaaggaatcaagtgctgacaaaacatgaaagaggaaaaagatttagctgcttttatcaaagaaactgagaaggactttgtgtaaataaaataagtgactggccatcctgcatttaggcaatgccgttttcattagaattaattcttgacatattggaagagttccaagggaaggatttctacttctgacaagtttaatttgtaaattaaaaacagttggttaaacatgagcctccatcaacaaaacttaaccaaagccatacacggcaaagggctaagcaggtgaaaaagagaattactttgaaaacaaagtcttccccaaaattatgcaaattcttattacttcataacaaatgtttcccattgaagactacagcaggatgtctgctcagggaggtttgtttagatcacattttcttcccctttaagcctctttagttgacataacacttattccttgcttgggcaccgtgctgcttcttgggagaagtggcagcaagaaccgaagaggtagactgacattttaaaagaagtcaagctaataccacttttgtaagtctccacatttcaggaccgcctactctgctttttcttcaaggtgagagagtcttgcaagtgtgctttcaatgcctaatggggataaacagtggagactggaatgcggtttttcctaaactactaacagtcatcatccgctctcaggtcaacattgtgtgcctagaaggttgcatgcaaaaccagcagtgctgttagttgagacttggtgacgcagagaaagtggaatactttgggagagagatgtagcttgcatctggacaaggctttaagtctagaaagcccctttaataaaacagctatttgtgaagttgcaatacctttcctgttgcattttttcagcttgcaaattaagcttcagataagggtcttttccgtgaacctgaatttcagaagctgcaaaagagtaggtggctggaaaagagaactctattgtgaacgatttgtctcttggggatacaaattttacttaagtactaagtgccccttagttttattgagagtaacagagacgataagaaatctatgactggggtagcttcagtgactaagctgtttcgatttaaaaacttcacattgctttacttcacctgacatattagagacttacattactgtattccttggcacttgaaatgagagtgaaaaaaatttttttttctcatgtcaaagaattatttcattccatccgatagtggatatgaaagagttaaagctctggaggaatgcaagacttcatcgtgatcatcagtacctttatcatcagtatcagtaccatgtttgaatggagcctctcagtggttgtatttgtatgactgtagcatcctgaggaagtattgaaatacatggtccaaacaattttcttgtggctcatgaagctggatctgcagtgtcttgaagtttattccacttgtggattttggtaaaaaaaaaaaaaaaacacacacaaaaaaccaaaaacccacacagttggactgctgatctagttctgtaccagatgtaaccatggtttttatgaaggattttcttttgttgttgttgttaaaagattttgctttaggtcccagttcagtctctatagctagctgagtgatgaagggaaactcagtagccattctgagttggattcctctgaagtgaggcggacagtaggatgctctgctgtctccaagaattgttatgatgtgttagtggccctgaatacatttcaagttctgggcaagtataaagaattacttgtttataatctacccatcgcttttgtgttcagcaaaacaagatttggtgtcccgtttgccttaatgtgctttcttagagtacagtttaataagaattaagtgggtcttcctgtggtcagtccagaataccctgaaataattctatatccaggacatgtgggacctggttgctgggatgatactgctttattgcagagcggcacactggtgtatctagtggaaaagtggtatgggagaagctgctttaaaggcttggatttgtgcaaaataagtctttttgatttccatattgttccgatgcccgttggctcatgtcacaaaattggaaggcccagcaggccaggaaggagtctttctggaaggagttggagatttatgcagattggctgcctctctgacatttatttgctgtccttttctcactctgttttggcaactctgaaccagatggacaagcccatggaaatgaaggccagtgaagagaagatgcttttgatttcttcaaagataagggagaacactttctttctctctttcttttaacatagccatggcaatttttttttttttgtgtgcacagatcaaaactggcaaatcacttttggagactgattggaacatttgaacaaggactttccttgttacgtcactgagagtaacataaactctgtttaccaaggcatccatggaagagaaatgtccaggcaatggtccaaatgttatgtctaccagaagccagccatgtactttgtagctgggcaccaagaatgttgtctgagtttcagctgggatgataattcaccaggactgaaatccttccttaatcaccaagctctccaaaaggcgagtgatgacgaggggaagcatagcttactgtttcactctgtaatcatttatgatttgagctgtattttaccttacagtgacctctggttctgttagtggatcattctagacttgctgctacagtattatagggaccaccatgaagacaatggccactaaatggtgatttatcggagagagttggaaaatatgaccttcatgcataaaaagatacacagaggtattttcctattttagatgcaaacgacagtctctgtactgaaagtgttcatgaagaatcaattatttaagcacagatactcactttgaaagtaattatgtcttgagcactgggacgtattttgaaagataaaaatacatacattttaaagtcatacacttgtccctctgtgttacccatggtgcaaaatttcagactgaaaatatttcatctcaggcatgtgactgaacctcgtccttggaatttcagtgttgaaatatgggattaaaaatggtgaatggatttgctaattaggtgcagctttttttctttttaagggaagtacgggagggggatgtgcaactcctgattttcatcttattatttattgtatgttgtcgctgtctgtagactttttcttttatttgtttactcttgtttgtttgaactaatcactacttaagaaacagtcctctcaggacggacagcctcctcttcctgaagcctgtagcttcggtgaccgttcaggcataaaaacgtgcttatctgcaaatgaatggtagctctttgcttcattaaagcccctttctcttttggcactcgcattgtgaccctttgatattaattcaaagggcaattaaagaatgcggcccatctttgaagtaaggcattcagggcaggggtagggatgaacctgggcctctgatggactgtgtgtattcaacaggccttttcaagacagtttgaagtgagtcaaagaaaatgggcaggagaaggtcaaagagaaaaaaagggctaaagaaacagtctgtatttgttcggagtattagccaagcaaactgcaaatagcaacaaaatgaaacagttaatagagcagccagacagagccatgtcaatcacttaacttgaacagcgttaggcgatcggagctccctccactgtgttacctaattatcttgggaaaggcagtaactggaagtaatggtattgtatttctttctgcttactgcccagaaaaggtgataaatactcactgctccataattatgcaacatatatacataaaggagtaggagggggtgggaggaggtggaagggggctgcatgggggaggaggtcgcattgaagttgtgttcctagtcaaaggaccaaatatggcacaaatatggcattttcaaacattagcatgctggagaatcacttaactcatttcatctggagctggctgaaatatgcatgatttctcctttcacaacccttaaagacaaacacgttgagccatccaagaaaagttctttcgcgggggcgggggggagacagaaaacaaccaaaaaacttaacctgcaaaagctgtgctcaaattatatgaaggattgggctgagcgttaccgctgcctccgtggaaactgagtgaagccgccactgggaccctagctcttcccaccatgcctgactgttgagacactttcttgcaagaaaagtccagaataagcccctaaccttagtagacggtcgaggggaggaggcagaatgggtttctgttcctagggttaggaaggatatttttggattccacttttatggggtcattgtaaagaacaaaagagcatcaaccacacgcttctttgaatggtgtgaacaaacttgattttagaaagatttccaactccgtcaggggtgtctgggtaagagagggggaaaccccaagcccccgttggaatgtctgcagataggtcgaactgatctccgaattgtaaaacgcggccgccttttaaaggggccgctgaggactgtattcggatccttcctaacgggctgttgcggattgctgtttgatgttggctttgtgcataatgggttttgtttggagggacagtaatagatctaaagggtctgttatgcagctttttgacatattgttccagaatgtgtctattaatataaaagtttctgcctttgtaaaaagtccattactgaactaagtactcaattgcttggcattttaacacaccagtcctggcacttgaaaactgccttcttaaaatctgatttgaaggtcacccagggtgaattgtaaacagagctaggagaacaacttgtatggtcagttttttaatatattaataacttcagctattcagtagtgtcaacacaaattctctcttgccctgtgtaatgctacataggatggaacaatgtttgggagcctaaggggtatttctacttggaaacaaagttcaaatggagagctgtagctgcttaaaaaaaactggaattcagtgaatttacaaatttccttaggtgacctgcttgcagattcttcaccctctggcccaccagcaaagccagaagaggaaactcaggcaatagaaatagaataatctaggacattttcaccaataaaaaattgtggaaacttttccacttagagaaattttttttagacagattgggaaaaattgttttattttagttttaaaattactcaatttagagctcaattttatgtttttcaggatgatttaaaaaatcacagtatctggaaatattaggaaatgtccatcatcttgaatgctaaaaactgatataactttcagatcaaaatcagctcaaagtgggaagaaagactgggagcatctttgttattctttgtctttttcctaatcctgggtgatttgtagattttcacaaacttttacccttctagctcttttccccacgcaaatccccagttttgctgccagaagtgatggctggggaatagtggtgaagaagaacatttgggttcccttttgtctcctgtgttaagcttgcccacccttcctgaactcagaatccggtgcagtctctaggagactggttctgaagacaagacacatttaaacatttttttatttttaattggaggacaatcgatttacaatattgtgttggcttctgccatacaacactgtgaatctaccataagtatacatatatcccctccctcttgaacctccccccaagcccccaccccatcccacccctctgggttgtcacagagcacttggattgagctccctgtgttatacaacaacttcctattagctatgtgttttacatatggtaatgtatacctagctgtccattgacagatgaatggataaagaagttatggtacatatatacagtgagatattacttagccataaaaaggaacacatttgagtcagttctagtgaggtagatgaacctagaacctgttacatagagtgaagtaagtcagaaaaacaaatttcatgtattaatgcatatatatggaatctagaaaaatggtactgctgaacctgtttccaggacaggaacagaaacatggagacagacatagagaacagacttttgacatagcgagatggaaggagagggtaggaggaattgagagaagatacattttatcatttgctcttatacctgtggagaatttgaattgaaatggatgagtctagcttacagagcatcagttgcagttactgcacttatcgcctctgctacattcaggttcaattccacatcctttcataggtctgtaatgcaaagaactccattctgtcatcccctcggctgcttcctagagatacatgaggaattcctagtatctgtatgatcttttggatctcgtggttttaatgatttcccccaaatcagaatttatccctatccttggatcaacagtcagttctccaggggccagacaggtaatgagaaagcagcaatataaatggattcctattttctgtctaaggatacagaggtgggagagtaacaccgcttgtaaaggcagagctgggcttggaccagctggtctaggttcgctggactccagaactgccactgtgtaactggcttgtggcttctgggaaggcaggtgacaataagaaagtactgagaagggggtctgttttcagggagcatgcctagcaactctggcagctggtaagtctatgaagtgcggccagtaataatatttgccttacaaaattgtgataaaaattatatgagaaaaaaaattatatgagagactacacagggatacaagtgcccctcaataagtgtcaagtactgtctttgttaatcttatttgtgggatgtggctcagaggtgagttcccaggaagcaaataaagcttcaagtatagggcttttaggtccatgagtccctgagggtgctagagtcctgggtggggacaggaaatcaggatgactttttgtgtaaggattcctactaaactgccttgagaggtaaacataacaggtaactccagtaataacttactgaaatttttctcccattcaaaataaatactcactttgtacctggcttttgtagttgtaaatttatattcttaagaaggtcccaccaaacctggatcagctactgggtatggccgtactattgggctggcccttggagagttatcctctccaggcaccagtgagccaggttatggcatgagtgggaaaactttactgatgggttagttaagagtttgatttattcagaggcattaactgagaattctatctgttccatcagattctatgtacatgcactaagatgtcaaaaccaccgtcctactctggaattgtttgaagtatggttagcttaatgttctagttcccagtatcctgagagagatggagcaaaaatcttgctgtcgggatgaagactccataggaggctaactcaaaacaactgggaaagtatagaacctagggaattagaagtcattttaaagcaagagtaacagatcctgtgtgaataaggagataacagcacttgttcagaaaccaatttagacactattttatgagaaatatacaacaatcagcaccaatcaactacactttaaaagtccagggcaccaaggaaatgtggggaaggttcatctggccatctccaggttcagagatgcttcctggaagagaagatgtgagagctgagcattagaggatgaccaggagttgatcagcacaagaactagaggaaaggcgttacaggcagagggaacagcatggacgacaaaggcatggagcagtcagacccacagagtacctggggactgggaagcagctgaaggcaacaaggggtcctgttgccagacccactcagtcttaaaaggcaaaataagcaccccctttcatctttccactgttgaaagtgaacaagtgatactctgtaacacaacctcattctcaaaaggctagatagattgctttctccctacccacagcttttctgagatttaattcacatataacatggtgtgagtgtaagatgttctgtgtgttgatttgatacacttgtatattgcaaagtgactaccagaacatacacttgtaactgcatgttagctagctaatacctgcatcacatcacataatgagtatttcttcttttgctgtgagaacattgaagatctactgtcttagcaaagatgggcttgataaaggacagaaatggtatggaattaacagaagcagaagatattaagaaaaggtggcaagaatacacagaagaactgtacaaaaaagagcttcatgacccagataatcatgatggtgtgatcactcacctagagccagacatcctggaatgtgaagtcaagtgggccttagaaagcatcactacaaacaaagctagtggaggtgatggaattccagttgagctatttcaaatcctgaaagatgatgctgtgaaagtgctgcactcaatatgccagcaaatttggaaaactcagcagtggccacaggactggaaaaggtcagttttcattccaatcccaaagaaaggcagtgccaaagaatgctcagactaccacacaatggccctcatcttacacgctagtaaagtaatggtcaaaattctccaagccaggcttcagtaatacgtgaaccgtgaacttccaaatgttcaagctggttttagaaaaggcagaggaaccagagatcaaattgccaacatccactggatcatcaaaacagcaagagagttccagaaaaacatctatttctgctttattgactatgccaaagcctttgactgtgtggatcacaataaactgtggaaaattctgagagagatgggaataccagaccacctgacctgcctcttgagaaacctatatgcaggtcaggaagcaccagttacaactggacagggaacaacagactggtttcaaataggaaaaggagtacgtcaaggctgtatattgtcaccccgcttatttaacttctatgcagagtacatcatgagaaacgctggctggaagaggcataagctggaatcaagattgccgggagaaatatcaatcacctcagatatgcagatgacaccacccttatggcagaaagcgaagaagaactaaaaagcctcttgaggaaagtgaaagaggagagtgaaaaagttggcttaaagctcaacattcagaaaactaagattatggcatccggtcccatcacttcatgggaaatagatggggaaagagtggaaacagtgtcagactttatttttttgggctccaaaatcactgcagatggtgactgcagccatgaaattaaaagatgcttactccttggaaggaaagttatgaccaacctagatagcatattgaaaagcagagatattaccttgccagcaaaggtccatctagtcaaggctatggtttttcctctggtcatgtatggatgtgagagttggactgtgaagaaagctgagagccgaagaattgatgcttttgaactgtggtgttggagaagactcttgagagtcccttggactgcaaggagatccaaccagtccattctaaaggagatcagtcctgggtgttcattgaaaggactgacgctaaagctgaaactccagtactttggccacctgatgcgaagagttgactcattggaaaagactctgatgctgggagggattgggggcaggaggagaaggggacgaccgaggatgagatggctggatggcatcactgactcgatggacatgagtttgagtgaactccgggagttggtgatggacagggaggcctggtgtgctgcaattcatggggtcgcaaagagtcggacacgactgagcaactgaactgaactgaactataatcactgtgctgtacattaggtttccagaacttattcttataaatgaaggtttgtaccctttaaccaagatctccctttcccccccacattacagcccctgctaactaccatttgggtgtaggttccacatataaaggagagtctgaacttgtctttctctgtctgacttatttcacttagcatgaatctttcacatgtccatccatatcaaaatatgtctctttaacatttattgttaagtgttgtctgaaaagaaaatggatttcatatacttcagttctttttttttttagtgggacaaaaattttctcattacaactgaccactttgaggagcattttttttttttaatggaaccaaaaaattctcccactctgagtgaccactttgacaagcatttttgggaagaacagagcctgatgtacagaagtgaggtcctgggaatgtaacagcctaactcaaactcttcctttacactttgttcaaagaggtgatctgagtttggagttacaaattctatttttttctagattccttctttctgtgacttaaatttatattttgaaatggtcatatagtaaaatagacttaagtgttttttgcattgaggtgaaattcatacaagccattttaaagtgaacaattcagtggcatttagtacattcacaatgtaatgcaaccaccagttcagcctagttgtaaaacatttcatcaccccgaaaagagaccctgtacccagtaagtagttgctccccatttccttcatcccccagcaactaccagtctgtgttctatctctgtagatttaaatattctgattatttaatgcaaacagaatcatatgaccttttgtgtctgtcttctgtcacttagcatcatgtttcaggggttcattcacactgtagcgtgtgtcagagcttcattcctttttacggctgaataatactccatttgtatgtataaaccactgcttgtgtatctgatcatccactggtgggcctttgggctgtttccaccttttggctattatgaatagtacttctatgaacttgtatatacagacgtttattctttttaaaaattttaacacatgtatatatccatgtaacgaccatcacaatcagtatacagtatagttccttcatcctccaagatcccttcatgctctccctttgaatggacaccctccttccactcccagctcctggcaaccactggtatgttctccagttttgtccttttaagaatattctataaacggaatcatacagtatttaactctttcagactggtttcctttactcagtataattattctgagattcatccaagccatttaatgtgtcaatatttcatttcttttaaaaaaatggacatatttattttagtttagtttggaattagtatttcgtttgaagtatttattttatttagtttggagttgattaacagtgttgtgttagtttcagatatgatatgtagctaaagtgattcagttatacatatacatgcatgtattctttttcaaattttttcctgtttaggttattacagaatattgagcagagttccctgtgccatacagtaggtcttagtttgttatttttaatatagcagtgtgtacatgtccatcccaaattcctaatttatccctcccctttcccccctaatatgtataggtttgttctgtaagtctgtgaatctgtttctgttttataaataagttcatttatatcatttttaagattctgcatataagcaatatcatataatatttgtctttctctttctctgtctgtctctgactgacttcacttattatgtgtaattgccaggtccatccatggtgctgcaaatggcattatgtcattcttttttaatggctgagtagtaccccatcgtatatatgtaccacatcttctttatccattcacctgtcagtggacattgaggttgctttcatgtcttggctaccgccgtagccaagcactgtaatgaacatgggggtgcatgtatcctttcgaaccatacatatgaatagcatcctactgactggttgtgctagtttgtttatttatttacctgttgaggaacatttagattatgtccagtttttgttcattataaatagagctggcatacatgtttgtgtaaaagttttgttcgaacacagaatttcatttctcttgagcatttgcctgggtgtgggattgctaggttatatattaaatgtatgtttaactttataagaaactgccaaaccattttctgcaatggctataccgttctgcattccaccagcaatggataagaggtctggctgctctgtgttggtgctagccttaatattgtcagtatttaaaattttacctattctgaatagatgtctagagatatctaatcatggtttaattcacatttccctaatgactaatgatactgaacacctttgaatgtgtttacttatcatccatatattctcttgggtgaaatatctgttcgagtgttttgctcattttaaaattatattgttttcttattgttaaattttgagagttcttgttattctggattcaactcctttgtcaaatatgtgatttgctcttgatcttagcttgtttgttcattcttccaacagtgtcttttacagagcagaatactttgatttcagtgaagtccagtttgtcgatttaaaagtttattgttgtgctttttagtatcatgtgtaagaaccttgtgcatagccctggttatgaagattctctcctatataccagattttgcatttaggcctgtggtccattttcagttaatttttgcacgtggttttatgtttagggcaaaggttatttgtttttgcatacggatgtccaaatgtttcaacaccatttattgaaaagattttttttttcctctgttgaattgtgcttgcacttttgtcaaaatcaactggtggtgtttgtgtgggtctctttctgaactctctattctgttccattgatttataaaccagttcctttgccagtaccacaatatcttcatcactatagttttgtagtaattctttaaattcagtgatatgattcctccaaacttttcaaaattgcttttagctattctaatgattttccacatacactttcactataggtaatcttatagctatgaaaattcctcctgggagcaaattaatttttgaaaggcatttgttttggttttgaatagttttggaaaggagagagtgaaaataaaataagtctatttttgtttcacacaaaattaatgaaattattagattggagatttcattctattacaaattcttcctctatgtaaagtgctcagttttagtgaaatggttggctgtaagtcagagaaattgagcagagtcatgtctacatgagagataaactttgaaacaccacatatgtttaacctgctttttgaattggtcacgcaacactcagaatcagtttcagtctcaaggaaagcatacgtaaaacatttaatgtatgttcatgaagaacaggtcaacctgcccttggcttgtgtatcatttatttaatttatacagttttaggcctttgggtcctttcaaaacatttgcaaatgtgcaacattatagggtttccaggcaagtgttcttcccgtgaattaaaaactagaacaccaggaactcaggaagggaagtagaagctaggaagttttgttttctttttctgctttgaaggaagaaagaaattcaccccccgccccattttagaagaggattcttagaaagatgtcacaatcttcttggcaacttttccttagagtctagaacttcattgcaaaattccggtgaactttgattgccatgtccttatgttttatacagaatgatatgtatgccaggtattagtgtgtttgtcctatccattttctaacacttagaataaaatgaacatttaacacttataaagttaatgtgagcattatgaaagtgagctttataattaaggattcaacacactaatacctggcgtacaggtagaaggttggttttttgagggatgctgttaaaatcaattatcttgaaactcttggcagctcattatgtgcacaccaggtctgccaaaatagttcagtttgttctaaattttggaagctttgtgttaaagtctgcttatttcaagttactctttaaaaactgtatattgagatgaatatccaaggttaaattttatcagttaagtaattttagaaattttacattgagaagtgagggatgtggctacttgtgtcattctaatcaaaccaagtctgggtggctcttgctaatggtctcttacattgagagcatcatttttaaattttgtgtttccagaaatactttcttcgttcctcaaccaagaccttattgtgttgaaacatagctacaggtaaatgaacattagttctttgatttcttagttaaagactagataggcatgtagttcagtgaaactaacacagttcagcaaataattataatgctttatttctctgcagttcttttacgtgtagtttttgtttgctacttcatattgtgacgtgctgcagaatggcatggctttccccccctcagagatgaaagtgagcctcagagaagtggttgatctgaagtcattgagctaggagtacgtagcagaatcagcctgaaaacctcattctcctgaggccattttacttttagataaattcctattgtatatctgttagaaaagggagagaatgactccagaatactgcagttcagattctatggcaaaagttatttgatatcttttgagtttttccattaaaactaaaaggacaaaaatgctgaattctgtagcaccagctctggctttgaagtattttaaaaaacataggcatttgtatttttctttctctaaacacaatcagtgttacttcccagtggattttctctgtttggactagtagttataaacccttgtattttgatattcttaatagatgttgattggtataatgctatgcgaggtctttatatttgatatatcacatagtacctgcaaagtgcttatttgttttgtacagtcttttggtcttaaccttttgatctagatataaaacaggcagaagcaatgtaattcctgcctttaatgtaatatgatgacaggaatcagcaatgtccattttagaatgtatcaggaagtggggaatgggcttattcaacaatgatgttgtgttggatacattgtgttggttgctgccctgtgtgtgtgcttgtgcacacgtgtgagtattcatttagaaacagtaagaataggttcttcctttcccaataagccattcttggaaggtagatctcagcagctgtagatgagataaaatatagaataaattaggtttaggaaaatttaaaactttaagattaattttttgaaaaaggaacccattgaggtgcaaatctgcaggaagaatttttctcattctagtttccttgttgaggtcagtctagtggctcacttcacagaatgcctcagggtttgagatttttatagtgtgtataaaatcagtgccatgcactcaatcctagatctgacccaagagactaagacccagggggaaaatatctcagcattaccaataagagaactacttttttttttttttaagaactaaattgcagatccacacttcagaaagatagggtcggtacccagtaaaacagattaaaaagaatcctccatctgccccaaatattctctaattgcaaacaatatgcaagggttaggaatcaagtccaaaggttaaaggttcttgctggcaagtgaaagagggaggaaagaggtatattgatgcatgtcagtttccagattctggggtcaagctattgtacctaaaaggaacaaggcatcttcagaaaaagtgtgattatcaaacaacaggtcaaagtttatctctaggtcaatgaaaagggtggggggagggtcatcattcagattctgaatataagctttgtatttaaatttgtgacaggctattcaatattttacaaaattaacctatttggtttattaaatgtcttttaataatgaaatcagaaaaattgttctcataataaatatgaagtaataataataagcctcacatacattatataatttaatcatcaaaagaatgctatgaggtatatattattattcccactttgtagatgaaataattgaaacacttcttctaaggtcatttatgttaagagtcactcagttgtgtccgactctttgcaaccccatggactgtagcctgccaggttcctctgcctatgggattctccagacaagaatcctggagtgggttgccattcccttctccaggggatcttcccaactcagggattaaactcaggtttcctgcattgcaggcagattctttactgtctgagccaccaggaaagccccaaggtcataggggcatgtaaatatactgttctttccgccactgtagttctccccccaaaactgaatggtgtgatattgatttagtcctaatttgattcatcataaaatacaaatgttcttgagcgcacttggttttaggagggaaaatgtctctcaaatattcctcttccttgaagcggttctttttttcttctcatttctctagaagggtttgctgtccatatcggtccaaagccccttttgccctctgcctggacattgcccggccagttctggtggtgactctgagccgggatcgcacagggatgccggcagtggcggcggctggcagtggtggcggccggcactggcaacagtgcagggaggccccacagacacaaaagcctctggaggcccggcctcccaacgtctgtgctgctcgcagatgctaatggcccttcgcccctcaggagcccttcttgtttggtttagaaaaatatttcaggagggtatttggaccagtgattacaggcaatctgatcagcattcaaaaagatcaaccgagacagttagttgataatgattattttttttcttcactaaaggaaggatgtttttgaaccaatgtctgggaaatagtttcccagtggaagctactgagagcagaagtctccataattagagtggtaaaacctacaatagtaattaaaacaattcacagactaagctggttttaatttttctggtagctgtggaggcggaaagcaattgttctagcaaattactaatgcttaaaacataaaagcctattattaattggctgtttagttgtataagtaaaaagtaaagggaaacagtgtacaccttgaattaccatgacctcatagcatcaatagtcaggcagagagtgtgaggaattagatattatctcaaggtctaaaaatgctgagccctttagtcaacaaacttttttgtgtttccttgttaagagaaagcacatgtagacagatgaagcaaaatatatatctacatgggagttttttttcccccccatttggtagtttttgcgcaccaaaaaaaggagcctgtgttatggtgtacctgtgtgtgtccattctgtgaatattctctagatttaaccagcaggccatacctaatattcaactatcagtagttatttatactgcttccagtttgcctcattaaacaaaactacctcacaattgcagagtccacttctccctttcagattgaactgaagtttagagctgtgtggccacatctgtacctttcaaggtggagtccgtctagggatcgtgcagcatttcataatggagagggaaccagtccatcaaattccacgcctgttttccgaggtggagtcaagttacggtccctgaaacaagttgcctcgttgaagcccaacttaaagagttccatattcatattcactttatgattttttaggaaaaggaaatttaaaagataattcgtttaaacagcgccgttgcatacagtatttaattttgtattcatgagaaaaatgagacttccaggctactagaaaagaaaagttaattccttgcagtagagaaatcaaagcgcagtttccgattctcccgggcggagggcctggaggaggttagggggtctttgtgcccgggggattgtctcagtgggagtagagggggagagggagagatcaggaagtgcctgcctcggtgcgagcccgagggatcaaggagggaccgcagggggctctgagtgttagctgcgcgaggaggtcctgctcggatcaaggcatcttccaggcaacgatgagcaaagtcctccggggctggttgaagggaaagaatggttttctgtgagcagagaaaagtacttcgtggaaactccgaaaacacttaagagcactgcctcctggaatgtgattgattccagcacactcctaatcccagaagaaaaaaaaaaaaagaaagcccaggagctcagaggcttcccagggcagggtcgggctcaaaccatagagaagaagttgctcattctcaaggtgggatctcacagccaccagcaaagagtgcaacagactggccttgttattgctgctcaaggctggaactttccttaagggtacttgtgcgccttgggagaccccacgctccccatcagctctccgcagagttctagggcgctcctgttgggtgctttatgtgtaattagaaattccatcatcacaacaccatgcaaaataggaattattgcccctgttttacacttgagttccctggggtggcagcggggggaggttaaataactgctggcagccacactgctgggaaaatggcagtttcaggatttaactccatgtgcgttttactctgaaacctagcctggtggtctaacttcacagaaactaagagtcatacatagagaacatgagttaatactttaaaaaaaattctcagaactttgactggtacggtaagtgctagataagtgttaatattattataattgatttctgggcttcttgcataagagaatatttctgggaccatcttcaagtgattttgattttgcatatgtggagtggggctcagaaatcatcatttttaacaaacatgtcgggtgattctgatgcttatactggtagatgacgtgcatgatatccccatttaatagcagtgctaagactttatctggagtaggaagaggcaacccactccagtattcttgcctggaaaattccatggacagaggagcctggtgggtcacagtccatggggttgcagagtcagacacaactgagtgactgagcattaaggcttaattacctaatggggcctctccagctaggaggtcctccttctatcttccttgaccatatttaggcagggcaggcacttcctatctcataacctcaagagtaggttcccatcacacaagctaactcattttcagtattaaaatcagatcccatgacttacatgtttgaacaccacacattccctctttcctcagtgaaatttgtgagtttggctattgaacaaaatctctaattctgttaatgttgcaatttgcccaactggctaaattgagaataggaagtttaatagtaaatcttaagtatatgataaatgcatgttgatataaactgagatgtttgacatgcatacactgtaaggtgacatgaaaataatatgaaaaaagatctcagagatctccaagtggtctcagccagccacaatactttcttacatcctaaataaacatggccttgatggagacataagtttgagggcagaccctgagatgggtctcagagatgccttcgtgataaaataatacactgagactatgggaaacccagatttccaaaggtcttctgggatatctaagagaccctgactttcagaccttctgagtaaccatatatgtctgaagtattgacagtacttatggtggggcgatgtatgtcagaagagacaaacatatttcagtacaacaaaattgaaatgtaagatgagaaaagactgacaaaatataaagtgaaaaaagaccgtgacagctacttaccacaccaccacccccaaccaggcaaataatatatccactgaacacaaagtgggattagaagtccaactattatttggtaaaccatctaatatatctgactgaaaacttaaactccaataaaaaaaattgcaattgacatttcctggaggttggatgtcagattcttaaaaatttgatatttgcttaaactctgagctttgttctgttcacttttctgcatgtactgctttgcatagacctggacctagagtaggcactaaataaacatttggtgaataaataaatgaggaattagagaaaaaatttgtgatgaggttatttaaaatttcagtctctttttactggaaaggaaaacatatgtccaaacgtgtgtatgggtagattatgtcctattgtctggactctggttatatctttgccaacttgttttattgctctttctggtggtgcatcatttagggttatttgtataaataaggccttgattagcattaaaatttggatcctgaatcacagcctagaatgtctttagtgtttgagaaagttagcacactaatgtaaaccaggatacatagtttatacttgaaaatgataacttttattttacgtttctacagtcctctacatttttcaaggtttattcatacttctgtaaatctgtttttttcttgttcatacttctgtaaatctgtggactttttatgactccttaacagatggcatatctaagaatgatacaatttagacaactgtttgtccaactgaaggtctggattgagaatacaatcctagaggtagaatactagttctttcttttatgttatttttaacttccttgtttaccaaataggtaaatttgctgctttggtggtggccacttagataaaaaagatgagagtggtgtgtggggcatcagggcatagtactggggagtcaggcgacaagtatggttctaggtcactgagttcatggcacaaatctaaagtcaaagccaaggtgaacattaagctaaagtaaccatagcagcaagacttgagaccacctgggaaactgttgtccaattaaaagaatttctccattttctatctctttgcaaatggagtaataactttggttttgggtgtaattaattcatgaattaggtttggcactcaactctgtaaagctgagtaacatcacatgagacctgggctttcatggggaaaaaaatctgctgcaactctggcttcattcatgcctggagataggggaatgacagcagtgggagacaggatgagaagccatccacccacagtgcaaagggagtggggcttgaatcaggctatggaaaaatgagagtgtgggctttgtattttgcctacccccgggaaatgagagtggcggtgggtttggatggtaatagggcatgtgaagaagaaatttggcacagaattcataaatatgagcatctgtatgagaaaattattatatcaaacctacttccactccatactacttaagtaactctttctgtgcttcagatttttcacccataaagtgcagaatagtcttcatttgcagattagatgaacaaaagcaagtaaaaatgttttacacagtactaggagcatagtaagtactcataaaatgttggctattgcctagatcaggtactgttgtatagacctttatctaataaaagattgtatagtgaatatttttggttctgtggactactggtctctgtcacaactttgtagcatgtagccatgttctctgtgctgtcacttcagtcatgtctgactctttgtgaccccactgtagccctccaggctcctttgtccatgggagccactttcttctccaagcatgtagccataaaaatacataaatgaatagatgtgggtatgtgctgaagaagagaggcgaaaagaaaaggagaaaaggaaagatataagcatctgaatgcagagttccaaagaatagcaagaagagataagaatgccttcttcagcgatcaatgcaaagaaatagacgaaaagaacagaatgggaaagactagagatctcttcaagaaaattagagataccaagggaacatttcatgcaaagatgggctcgataaaggacagaaatggtatggacctaacagaagcagaagatattaagaagaggtggcaagaatacacagaagaactatacaaaaaagatcttcacgacccagataatcgcaatggtgtgatcaatcatctagagccagacatcctggaatgtgaggtcaagtgggccttagaaaacatcactatgaacaaagctagtggagatgatggaattccagttgagctctttcaaatcctgaaagatgatgctgtgaaagtgctccactcaatatgccagttggaaaactcagcagtggccacaggactggaaaaggtcagttttcattccaatcccaaagaaaggcaatgccaaagaatgctcaaactaccgcacaattgcactcatctcacatgctagtaaagtaatgctcaaaattctccaagccaggcttcagcaatacatgaactgtgaacttcttgatgttcaagctggttttagaaaaggcagaggaaccagagatcaaattgcaacatccactggatcatcgaaaaagcaagagagttcgagaaaaacatctatttctgctttattgactatgccaaagcctttgactgtgtggatcacaataaactgtagaaaattctgagagagatgggaataccagaccacctgatctggctcttgagaaatctatgcaggtcaggaagcaacagttaggactggacatggaacaacagactggttccaaataggaaaaggagtttgtcaaggctgtatattgtcaccctgcttatttaacttctatgcagagtacatcatgagaaacgctgggctggaagaaacacaagctggaatcaagattgccgggagaaatatcaataacctcagatatgcagatgacaccacccttatggcagaaagtgaagaggaactaaaaagcctcttcatgaaagtggagagtgaaaaagttggcttaaagctcaacattcagaaaactaagatcatggcatctggtcccatcacttcatgggaaatagatggggaaacagtggaaacagtggctgactttatttttgggggctccaaaatcactgcagatggtgattgcagccataaaattaaaagatgcttactccttggaagaaaagttatgaccaacctagatagtatattcaaaagcagagacattactttactgactaaggtccatctagtcaaggctatggtttttcctgtggtcatgtatggatgtgagagttggactgtgaagaaggctgagcgccgaagaattgatgcttttgaactgtggtgttggagaagagtcttgagagtcccttggactgcaaggagatctaaccaatccattctgaaggagatcagccctaggatttctttagaaggaatgatgctaaagctgaaactccagaactttggccacctcatgcgaagagttgactcattggaaaagactctgatgctgggagggattgggggcaggaggagaaggggacgacagaggatgagatggctggatggcatcactgactcaatggacgtgagtctgagtgaactcccggagttggtgatggacagggaggcctgacgtgctgcgattcatggggtcggaaagagtcagacacgactgagcgactgaactgaactgaactgatgtgccaataaactttatttatggacactaatatttcatttattttcttggtctccaaagtcactgtagatggtgactgcagccatgaaattaaaagacacttggtccttggaagaaaagctatgacaaacttagacagcatattaaaaagcagagacattactttgcagacaaggtccacatagtcaaagctatggttcttccagtagtcatgtatggatatgagtcggactataaagaagggtgagtgctgaagaattgatgcttttgaactgtggtgttggagaagactcttgagagttccttggactgcaaggagatccaaccagtccatcctaaaggagatcagtcctgggtgttcgttggaaggactgacgttgaagctgaagctctaatacttttggttacctgatggggaaaactgactctttagaaaagaccctgatgctgggaaacattgaagacaggaggagaagggtatgacagagaatgaggtggttggatggcatcactgacttgatggacataagtttgagcaagctttgggagttggtgttggacacggaaggctggtgtgctggagtccatggggtctcaaagtgtcagacatgactgagcaactgaactgaatatttcatttagttttcatgtactgatgttattcgttttataatttttttcaactatttaagagtgtaaacaccatccccaggtcacaggacatacaaggacaggcagtgggtcatgtttagctgacctcttctatagaccttcacatcttcagtttggaagtcttatttgcctagtaagcttccctggtggctcagatggtaaagaatctgcttgtgatgcaggatacctgagtttgatccctgggttgggaagatcccttggaggagagcgtggcaactccctccagtattcttgcttggagaatccctgtggacagagaggagcctggcgggctatagtccatggggttgcacagagttggacatgactggcgaccgagcacagcacagcacagggccacctctgtgcttgtggagatgcccattattagagttctgttggccgcttctggttctgctgcaaagcatgtgatggggtgtcaacagtacttcctcattcactggagactggttatagccaccatgtggaacacttctaagagacaattgaagtgatggactaagtggtcctttaaatgcaaccatgcatttcttgggtagggacatgttccaggttctcaagatatttctttaaggtttgaaaacaaagcaaaatggcattctctatttgccatgagtttctctgcattctctgtggccttataactcagttatcatagtttatagaatgggttttgctcataggtgggggaagtggctgcccctgaagggtgattttactgggattgaggaagaaaccctatgtccccatgaaagactcaaggaagttcacaatcatgaatattggttgacttgtctgtccctgctgttttgggggtaaactgggcttcattgctgttgtttagggatgtttgcactgtattcatggtaagaagtgtggaaagagagtgtctttctttgttcattgcacttaaggactctggtttcatcaggggttcatgagcaaaagtagatttacagtgaagctaacttcagaacccctcttccaaatccttgcaaagggcccccaaactgtgtcctgtggtcttgcaactttgtgaaatgtgcaaaataacctagttttgtgggttatttctaaagaactctgcccttctaagctgtaaaagctttagactccacgaaacatggatctgcttcaggctctgtgtttgcaggctgggactgacttacacttttttggaaggtgagaagaaaaacacctttgttggtagataaggaggattctgggatttgtgagtaaatcttccttaaggcctcagactgaagaaaacgtagaagattttcttagggaaaagggcgtgaaactgagagaggaatgatattgttggtgttctcctgtgttcctcataccaccacctccagaaaaaaagaaaaatcaggatgtttgagaaaaagaagggcaagtgtcttaagctgatcagaaaagaacctcatatactcaacattttaaaatgcttcatatattgtctaatttgatactggctgataatgtttaatgctgcattatttgctataataatgatgatgaaatgctggtaatgatgatgataaaaatacatacgttacatgaatgttaccatttataaaacactttcacatactttctctcattggtaaccactgaggccaagaaagcatctctttatttatggtctttggatgcctccagaattaactgggatcctgtgcaaaattgagatggaatgttctctatgggctttttaattattctctacttgtgtgcatgtgtgcccaggtgttcagttgtgttcaactctctgcgaccccatggactgcagcccactgggctcctgtctcagtggagactactggagtccctggtgagactactggagcgggttgccatttcattctccagggatcttcctgactcagggactgaatccacatctcctgcattacaggcagattattttccactgagccaataggcaagcacctattatttccttattttgtgataaaaaccatgacacctgtcagtttctcttcttttgtgaattcttcagcattgggacagtcaaaataacctttgaactttgacacacaaagctgtttgcttctcttcaagtggcttctaatttttgcttgcaaaactgctcagctggcaagcaaagaacacagttccctcaaaacctactcttagtaaggcagtatttgcattcatcagctttgtctgtaaaaacatactactgacctctgactgtttgaccttttaaatggaaaagcaccactgggacacataattaaatttatacacattcaagggtgtgctcaatcagagaaatgtgtgattgtgaaaaagttgatctggaagtttagtcagtagttcagttaagaagggaaagtgctggcagaatggaaaagatgaagtgctcttgagtgcagagaaaggaggggtgtataggattggaaggttcagggaaggtttgtggaatggggttttgagtcctttgacatgggcagaaagggcattctaggtagaacagatagtgggttaaggtggaaaggtcaagatatggccaatccttcgtccattttggcaagtacatgggattcggggaagtaggtttgtttcagtcgattgaaacctttaaactccactcagtgaactcttcacagatactcatgtacacattcaatttcatgttaatgaatagttttctaatttttaaagctgatttactcaggaatatatgaatcattatttcttataaaaattggttattagtgcttggtatttgaataatcacattacttgagcaaagaaatttgagaatgatactaagaaatagatgatctagaaatcacttaaatgcatttttagagtgaagactggtgattatcttcttagtactgacacttctttggcttcctgagactttgggtccttttaaacactctgaatatcatcttcatttgaaaaacaagaataatttagaatttgaaaatctagatttgagatttaactctgccactaaaatggcagatgatagatggatcatttcatccatttgaagctcagttattattttatatgtaaggtaaagcatggtctgatgatttttaaagtgatttccagcttttaaatttctgtgttcagtagcacattttaatacaaaacaggagcatctctgggcttcccatgtggctctgtggtaaagaatccacctgccaagcaggagatgcaggtttgatccctgggttggaaagattccctggagaaggaaatgccaaactgctctagtatccttatctggaaaatcccatggagagaggagcctggtgggctacagtccttgaggtcataaagagtcagacatgactgggtgattgagcatgcacacaacacacacatgaacgtctctagcaaataattgaaaaaataaacaatattcctgatattttcctcctgtagtttacacgattagttacttggaacatcaccttccggtatcagctggttttcttctgtagccactgtctctccttatgcctgtcttattatacttagacattcacacacggatcctgctctggcttcttttaccaggaagaagaaagcattttaagggcctcctcttacttaattgaataatgattagaaatgaggatttgggaggctggttagtaagaacaaccatctctgatgtctcagactttcttaaaactgtggtttatttgttatgagagtagagagatgtatgagagtggcttctgtgcttgtttgaattaattatatcactgctttatgtgaatgcaatgtgagtacatgtcatttatctcgatcttcatatatagagatgggcagatgcttgtatttgtacattcaaatatatatacaagtatagatgagcaatggagaaggcgatggcaccccactccttgcctggaaagtctcatggacagaggagcctggtaggctgcggtccatggggttgcgaagagtcagacatgactgagcaatttccctttcactttcactttcatgcattggagaagaaaatggcaacccactccagtgttcttgcctggagaatctcagggacgggggagcctggtgggctgctgtctgtggggtcacacagagtcggacacgactgaagtgacttagcagcagtagcagcatagatgagcaaattggaagaaccctatgtaatctcagagctgaattgaaattttcatttatcagcagtactaccaaacagttttgttgttattactaaaacaacagagacaaattcacttgaatacttgctggaggaaagaattttatttactttttaattgtgtagctaatcaagagaaaggttttaaaaacttatattttgttaatagtatacaggggacaaaagaatggaaagaaacaccataaaggagtttgactaattcatctctctctcttgatccatctatccatctatgcctccatgcatccatccatccatttatataatctattccctaatttaaagtcaatagtgattattttgaattctggaactatagttgttttttaatttttatatactgctcaaattttagtttgtaatgtgtttttataatgtaaagacaaaaatatacaacaaaataagaaatgtattttgtccaggaaacactttttaagaataaacttagaattgggtgatgaggagtagggcttcagtccagttcagttcagttcaatcgcttagtcgtgtctgactctttgcgaccccatgaactgcagcatgccaggcctccctgtccattaccaactcctggagttcactcaaactcacatccatcgagtcggtgatgccatccagccatctcatccttggtcgtccccttttcctcctgcccctaatccctcccagcatcagggtcttttccaaatgagtcaactcttcacatgaggtggccagggtactggagtttcacctttagcatcattccttccaaagaacacccaggggtgatctcctttagaatggactggttggatctccttgcagtccaagggactctcaagagtcttcttcaacaccacagttcaaaaacatcaattcttcggacccagctttcttcacagtccaactctcacatccatacatgactactgggaaaaccatagccttgactagacggacctttgttggcaaagtaatgtctctgctttttaatatgctatttaggttcagtttgaactgaattggctacatagtttttagatgttggcattatactgacatgtcaatgggataatttctggttacattattggttggtgtgggtaggaaggatgagtatgactatctttggtccatccaggtcatgcaggatccttaatttattcaaagctgccaaagataaagacacatatttagacccttaacactgaacccctcagatcaggcattcctaactcaacaagacatgtcatcagagccactggagaaaggagtgcctggggtcagccctctaattctaaaatcacttattgtgttattactctttgtaagaaaggggaccctcttctgttctttcctcttctctcctcccctcccttactctgtcctacctagtacttccattctttccctttcagctctgcaagataattcctggaaagagaatgtcgagaggaaatgcagttgcccaaaaattcacctggaagcctgcttttgaaggagttcttcattttatttctcctggagatgggagcctgacctatttcatattggccagggacactaaaatgagcagatagagaattgctcaaagctatacttcattttacctatgttgattcatatcaatagacaaaaatgaagaagagaatttgcctgtggaaattcttccccatggaaaccaaaatgaatgttggcacagagtagaggccaagtgtccttcatttattttaggctgtttgctggatgtttattaagatcagccctcttgcttaagccctgaggtatttgggagcacagaatttatttactgtcatagctaccttaatctttgattccacagcacagatgcatgtctgggccaggaggagcagagtgcactgggttacattttaaatattttaaaaattaatttttaccagagtacagttgcgttactgtgttgtattagtttctactgttatcgcaaaatgaatcggccatacctatacatataggccctctcttccggatttccatcccattcaggtcacttagtgcattaagcagagttccctgtgctatatagtaggttctcattcagagctgaacatccttttaaagcagatacatatatactagctggttgtgggcaggatcttcagaagagaagcagatgggagactggatgatgatcttatatcataaactcaggaaattctacaaacatcttcgaagttttggtgatcatttttctccttcagtcttagaacatagtatttttctcatgctaatttttttttttttaatgctcggtgggggttggataatatgaaggtgaaggtatgcagagggctgcatgtttggaggatctattgggcattgggagctgttgtgtgctttgcaaactcttctttccttaaaactcttctttcctttgaagcaggcatttaaaaaccacatttactaatgaaagaactgaatcagaggcttaagcagctggccccaaatcagagaggaagtggccaggtgggcgtttgaagcagactgacttttctctagaactggaggtcttttaccatagcttttttttttttttcccccactttgtttgctcaaacctttggtatcatctcttctgaactcagtgctgactgttggcttagatgtaaagaaaaatttcataaaccagccatccctatctaactaaggatagtgataaatcattcacattatctacttaatcatcttgactggtttgccagttcctcctggggttttggtgggataggacaccaatctggaaaccaaccttccaaggctgagcatcatacctttgcaggatgaaggagagaaaccccactctcttctttattatccctttcgtcccagcctctggcaaagtactacttgcacagtaggtttctcatgagtgctttctgatggtgaccttgatgttgctactaatgcttttgccagcgagaattaagctcagcctccctcttttgcctccaggaaaagtttcctctttcatttatattcagttattacctcttcctatcttccaacaagcagtaattgacccagataagatttggattttctaaacaagcttcctgcgctcttttcttcattatggaagccggcagaaaacgaaaagcaaagaaacaatcttgaaatgccatatgggaggtgtcacttaaagcatttatgtattaatttgatctctatattaaagatcacaggcgcacagaatctatggctctgttatttagtaaataatgtatctgggtttttcagccttgagagaccacttaatctttctgttgccttggggcatggctgaattaccttccgtatatactgatacaggacttggattcagtggaaagagcactggagtgggagttaggcgatttaagttttactttctgagtttaagcaccatacttgcatccccagtgccaaggacagtatcagccaaatcttaggctttcagtaaatgtttactgaaagatgtgtgatttgaggcaacccctcttgctctctctgagcttcagctgcagaatgaaaggattgtcctaaagtttcttccgaagattctgtaattctgtaagtgttttgttctgtatttcaaatctcttagtcatttatcttcttatacctcctttggtaggtttctggcaccaaaagtgcagcatttaactttcttcttaaacctgcctttcttctcttttccaaacatctccagtcatactaatcctgacaaagtttggttgtttaggttttgtgtgtgtctaggttatcttgtcttaataagagtggcaaaagcgttcttttgttttctgccctctcaaaggctctctgtgtaacttgtcacctcttttatatattcaaccttagtttatttgttgacttttaaatgaccaatgcacattatagcaaaaatattcaatcgtggaaaataaaggcagggtgattctttgtcaattgtgctttatttaaagctctgtaaatatggctaaggtttgggtttcataggcagaattctttcttagtgactgcacgtaacataatttcacatacaccaaccaccatggaaaatatcactcaccttttatggtcatgttttcacaacgaatttatagagttgactgtgaccaggaaggaaaaaatgtgtcgatattggccagtctttttctcagcccacctcattggttgaaccaacgtactccttaaaagacaatgctaataaaaccatatatttgatatataagatctaacatttaggcagcttctcttagttctcatggatcaggtaggttacaggactcttgagatgtcgttttttctcatctataggatggggatgacagtactcatatggggtttcgggaactttgaaagaacatgcatataaagaatgccagaagcagagatgtcagcaaatcagtgaataacagcttttaaaaaatatccttattattattattattgagttggttttgcccagaacgttgaagaaacgatcacaagaaggtctttgagagatccatgttctgcctctagttaaccagtttacacagaaatgatttcagaattaaattgttctacattgcagtggatgaaccacacttggaccaaaaaatgtggtttcaattcagatacaggaacagaaacataacctaaatctcctcataaagagagtgttttgtgacatggtttttctttccctattaaagaaatatttttccataggaggaaaggaaggtgagtatgtttgggagagtaaaggggcttgacacaattatttcttaaactgatatcactggttatattaatagtaagcaacccagaatgagagcatttctaatattttacaattctgaatgaataaggtgtaagtggaagaaagagatgtaattaccatagagaacacaatcttctgtttcattgggtttattttttttttccattcatgacatcttagaaatgcatagttaaccctgagagatgaaaaatgcctattgttctttcgaattgtttgctgtgtccagcttttctttcctgactcaattctgttgaatacttacgagttgtcacatttttagtaagtaataactgtgtcaagctgtgatgacaaaatatcccaacataactgttaataagcattgtcattttaagcatgaaacagtttagccaatgatttatctcttataatgcagcacttggggcagctgtatgatttgtctctttagcaagtcaagtaatttctttaacaaaatgttaagcacagatgggccataagctgtcagttaactattattgtgtctgcatctgcttgctttcaatgcactgttttatgtattcagtcagttacttagctgcggctctgtgaaaagctgaacctactctgattggcaaataaaatgttcatttgtctcttcttcctattgttttgttttggtaacacatgtcagcagctcaattacccagttcattaacagctcccaaaggacacgatggccagcccgtgataagagggcaattgtggcacatatggtcaataatggcctctctcttggcaattgtaaataaaagtcacttggcccttttcctttcaccagaactactgttttcctgttccccttcagtgtgcaaattacctttctttgctccctgcaatccaatcccagtaaagcaaaacctagtttactgttttttgagactcagagacttcagcagacagggagttctggctcttaattttaattatgagtgacttttaagctcttgagggaggaaagttcttatcaagggagactattcttagaaagctgttagctgattaattagttaactaatcagttttcctaattgaatagcaacacattttcttggggcttttatctcttttcctctttgaaatactctggtggctgaaatactctggttaccacagaatttaaagaggcaatttattaataaaaccaaaatgtgccagtagaaatcatttgcaggggcagataggtgtgacttcatctttgttccatgagagagattcatttccttccagaattcttgttccaggtaagtctcaaaataaagggtttaagaagccactgggttcatctgagtcactgtcagagtcccccaaaccagttaaggattccttcttcctttttatacctttggaaggagatgctgaaacagttcctttggagttttgtggctcctttaagcaaaatgttgcttgtgtcaggggaaaagaaagggcagaagcctgtttttacttcaacatatcaaggaatacaaaataatcatttctaaagttcctaaaaataatcactagcagggctgagatggatgagagataaataaacctgtgtttttacaaaagaggccttttaagcgactcatggtcaggtagtggctgtgagaagagcgctccacccccaatacgtttccttagtgtaaagtggatggagacctcacgcgcacatgaaattcagcgttattggaacctcaggatgggtggggagggggtcttgggggccatgcagctcaatgtttcggagacaactaggctgtacagccagcctctgcttcgcagtccttatcttacacaaacacccaatggtgcacgttgtccttttcaagtcactcccgggtccggagcacacgcggcccttctgggctgcccccgcggccggccatattcataaccaatctgtacactcctcccagggcagcggggactccgggagttgttgagtgtcagggtttatttgtgctattttgattagcaccaacctggcaggagcttattttccttctaatgaccccgtgctgtgagaaggcagcttccgagggaagggcttgggtcagaggggaggggaccggcattacgtttctgcagcccccaagtgggggtggggggcgctgctctgcgggaacaagggtaggtgaagggctggagggtcttaattatattgagagtttctaaaagaacctttccgagagagcccagaatatccttcccataaactgtcctgcctttttttttttttttttggtaattgctaaagatttttgggctggctggcacattttgcgggagaaattgtagtggctgtaaaagcaaaacaagacccctacccgcccatctaccccacgaggccgctgatcaggttataaaccaaaccgtctctcctagtttatcaacgaacacagtcagaattacacaaattctagttctgaattaggaattctagaaagttcgagaatttgttaggtcacatacactggctagatcttagataccttaggattttattgtaaaactttggttcttttcagcggagtttttctctcgacgtatatacaattttaaaaattaaataaaatcgccgattactttttagcttgtgaattaatgtggaagagaagcttccaggtgctggagtctctcaactggcttggattaacccctactgtgcatccatttcaacctccccctcctcccgcctctggaaaaaaaaaaaaaaagtacccaacctcccctttctcatccactccggctttctttgtgtctgctgctccctgccaggcaggtgtcagagccctgaatgagggtaaacgctccgctgatggattccacagatggagcgtggaaatcggtagaataggcctcggccacaggccatttctggggatccaacaaaagcctccaaataagtcaacaaaaatcccaaagatcacaaagggaaaatgtcatttgtcatttactctggggctgtgagggaatatcagactcttcctggctttcacccgagtaaacacgagagaggtcattcacatctctcagtgtaaaaaggaccacttcagatcagaaaacagttagttgtcccattgtctcctcctgtgttgaatagtgaaacaaacacacgagaggtacgattggatgccaaataagtgcatccaacttcaagttgacccgttaaagatctcatgggatataccctctgaaataccggttcagtgtcgaacacaaggtgaaaccacctcgtggggctttcaggaaccatttttatttttctcttcttctttcgtcagtgaaacacagatttgaggaccggtgctgacaggtttagctccaaaaggttagtacagataccaggaccgtgtgattcagtctgaggccgtctaagaagaaatgaccaatgaccaaggaagttcaccctcaaaacctgcagggcctcctcccatgcctgtaaatcgcgttgtattatatcaggggcaaacatagagtttaaatggttgtcatgttttgattccttaattattcaaatgaaaggtcttgctgagaagaaagacagtgtgccaaacgcattcttgtgagttattttgtttctccagtttttgcctgtctcccatctctgaattatactggtctggaaaccagtaattatagaaccccacgtgactaaatccctgtaaaattgaggtaagatctcatgtataatagcgttaactaggatgaaatatctcctgaggctacagaagaggtcacaaggggttaacggacaaagacatactctctaattctgtaattccttctttaattaaacttcatggtcggtccactggtggtaagacttttgccttctcctcccagtttgtttctgaaggaagaatttgtaatcctgtggagtatgattgttgcctatgcgtgacctttttaatttttttaagctgaaaatacccgttttcccaaggttgtttttgggagttagtgtgagatcgttgggataacaaatttttgctcctaacacttagaattagcttgacatagaaaaagaagaaatgaacttctttcaaaattaagaataaaacacaaggttgaaatacttaggcacctggtgaaaggtgatattttcccagcaatcacactgaggtttctgctgaataacttgtgaatatcccaacagatttcaaatttttattcctgtcctttttgtcttaaaagaatttgaggttaccttatagctcttgatatcctttcatcagggtgcctttaatatataaaaaaaagaaggctttaatacagatataaactgagtgatcagttcaactgcttgtaatcaataatattttccagcttgatcctcgatcttaggaccaagggtctatgatgattattaatggggactgcaaatggtcagacaattttaatttcttaaattgattcaatatcttggaaaattgattagttttttagtgctttatttgaatatacaaagaactcaatgaatatttgttgaattcaattgatatatcaatttcccaattgaatttaattcaacaaatatttattgaattctttgtatattcaaagtatgggggcttccctggtagctcagatggtaaagaatctgcctgcagtgcagataatttgctttcaatccctgggttgggaagatcccctggagaagggaatggcaacccactccggtattcttgcctgcggaatcccaaggacagaggagcctggcaggctgtatatagtccatggggtcgcgaagagtcaggcatgactgaatgactaagattttcacactttcactttgaaactattgtatttctgtcgatttttgcttgagtctcagttttgaaaatttgagacaaatgaggatagtggtggcaatcagctaaatgatttatattggaattcctgacttcatgtgtttctggtattcctcttcaaaaggactgtgtgttatgcgtgtgtgtgtgtgtgtgtgtgtgtgtgtgtgtgtgtgtgtgtgtgagagagagagagagagagagagagagagagaaaggaactcaacacctatgtagggtgttccaggctacaagggagagttctctgaagtcctataaacctgggtcaagtcctagctcccagctgtgtgacctgaataacctctctgagtctttccatttcctgtgcaatggggtgagtatttactttacaggatgtttgtctagttacataaggaatggagagaaattctcaacctcttggtaagatttgttccaggttcattggtgacattgagttaaactaatgtataaatcagagaatggattgtgaagaggttttggtaatagggtcaaaactttcaaagtctgataacatggattgggataaaatctgagaatttttatgcaatttaaaataataaaatttccacttaaaaaacattatgtattgatacggattttcttatgagaaccattgtggaatttccaactgggggacagtatctctaatgaatgataaaacaaactttgtgaaggcaggtatagaatgtgatagagcaacttaaatatgaacatctcccttcagtattaaggccagacagtagaagtagactgaagaaattatgtttaatctagttgctatatcctggcaatttatgaacatttagataaacatcttgttaatgcagcttgtagtttcaaagtcatagcttaagtattctacacagaaaaaaatatatataatttctttctgtcaagctgtctgaaaaaaagtcttgtttttactttgctgtaatatttagcaaggttagaaacttggtgtctagtatctaatttgttccagttttgaacaaagttaaatatgtaaactagaacttcaatggaatgatttaacttgtgctatcaaaatgggatttaagttttagacttgtttttggtaaaaactgattcaaattcaggacattattgcgaaccatgtcctgtgagactaatacattttaattctgttgagtgatacaaaaaatggtagtatttctgtctttagaaagagctagtatttcctagcttgtagattaatctagggtggttcactgagcattttttaaagcccacatccctctggaattcacagatggggaaaagttagaattagcttgtaagactgtggcttcacagtgtcaaaaatgatcagtttgtttggatagttttccagcagaaaaatcaggcaaattgtttcctcagtgcctttgaaattatgctgtttggagtttttcctagttagatggaacctttcgattgcttttgaataactagtctagaaagaaaagtagtaatttgctaacttgttaaagaaaaatttatttttggtggtgaaggctgtcctattgaactctttgatattctgagtctttttcatcactggctattgatagttcctcacctttttaaaaaaaaatcctctctgaattgataattattcctcagaaaaaaattcaattgcattcaaatgcttgcaacaattttcaagtactttttaaggattcaaaacctccaccctcaaagctcatctaaatggtgggtgattcataagagcagaatttccattttaaagatctaaaatgatggcagagaagtaaattttagttcaaaacttaatttttctcctgtacttctagccattcagcatgtatttattgagcacatattatgtttcagcagtagttctagcaatgaacaaggcaaaggaagggacttgagctcacagagtttatattctgggagggctagaggtgggcaggtattaattgttaagttgaaacagtggtcttgaccctcacaattaactctggctggttcttgtacatctaagcagccatttttctccagaaactagcgatgattttgattaattgacctgacagtgcatggcacatcatatttacttgggaggatttaatagccccagagactcccaaaggaaacatgaaaatttccacatactattatcctaatgggatcagagtaagagaaagtgcaagcaaagatttaaagttctcacaggcagaggagagatttaggtcagttcttaaatgctgtcgagttttttacttgaattcacgttagacaaaaaagtcaaggcaacaaaaactgaaagcatggaaggaatacattttataaaaatttattttcttcttagggggatgagtaatttgtttcttgagtatattatttataattgaaggggcaagtaggggcaagttttggggtaaattgtggtggaaaatattttatatactcgggaattttgcaggggaagcaaatatctagtctggaatattctatagagatggttctcaaagtgtgagtccaggatcagtaaaatcagcatcagtcaccagggaatgtcttagaaatgtgacttctcagagcccattctgtaccaatgaaatcagaggaagggacagccatctgagttttaataagtttatccagtggttctgatgctccagaggtttgagaaccactgccctacaatttggagaaggaaatggcaacccactccagtgttcttgcctggagaatcccagggacggcggagcctggtgagctgccatccatgggactgcacagagtcggacacgactgaagcgacttagcagcagcagcagccctacaattatgcgcaaattattattcttttaatttggtccacatttattaaaggtagacacgtgtaagttgtattggctgctttttaagtttagcacgcaatgtacaacgtattttttagcaagttaatgtttgtcgttcagttgctaagttgagtccgactcttggcgaccccatggactgtggcatgcagtcagcatgttaatactcctgtaaaatattcccatacttaaagaaagtctatttttctttctttcagttaatgcaaaaatatcctaaaataagatttatattaaattaaaccattttatattaaattagataacataattgaaaaaccaagcataatggccaacatacagtagagcattatataattaccttttgcttttatataccagaattggttttctttaatttgtcatatatattattgatttactttcttaatttcacagtatttgaatgtgaataaaatgtagaagtattaaaataaaagaaagcttagaattatatttatcagttcttttgtatgggtactattttggggcagattatagcttattctaaatttgaatgaaatttaaaatttccatggggcagaattaagttttgagctcaagagaaaagaaaactggtattgtaggagatactacattttaagatcgcttctagcgccccttgcatttccccaagtcctccggcctgagggggcaaatgaaataccttgacattgtgtatgtctactcagtcatgtccagctgtttgcaactccatgaactgtagcccaccaggcttctctgtccatgggattttccctctagaatactggagtgggttgccatttccttctccagggaatcttcctgacccagggatcaaatgcatgtctttttcatctcctgcattggcaggtggattctttaccactgtgccacctgggaagctcattagtaatctacaattttctggctggcagcaaacataggccctttccccagaggatcccccagttgtttggggcattttctgagtgcatttggatatgttcaggagcacggtggctccggctcctgcgctgtgctcagagtttatggcctgacagccccctgacggcctctgccactgccctgaggcccaggactctgaaggaggactgctatcgtactgagaaccgctctgtgatgtgtcctcaaactgcagaacctgctgttggccaataggtgctcggttactgttacatgtcacacacaccaaattgcatcacgaatacgaatttatacttaatttcccagctcctgctcctctttcttaggcatctgcatactcagtttggaaggtcttccctgaacatgctcatacacagacaaattcaagctttggtggagggggctgcagcaaggctggcttcagggccatgtgacctattcaatcacccagggccccctgtgcagagaggggccctgtgcttagttttatgctctgttgttgccatcttgaaattcatgattaacttttgaacatcggagaaggcaatggcaccccactccagtactctggcctggaaaatcccatgggcggaggagtctggtaggctgcagtccttggggttgtgaagagtcagacacgactgagcaacttcactttcacttttcactttcatgcactggagaaggaaatggcaacccactccagtgttcttgccaggagaatcccagggacaggggagcctggtgggctgccatctatggggtcacacagagtcagacacgactgatgtgactttagggtcctgtattttcatttttgcactggattcctcaagttagagtactggtatcactctatttttttaaattttttaaaacttggctggtggattgtttactggtttatccactaagtctctcagtcatatccgactttttgcgaccccgtgggcagtataggctgccaggctcctctgtccatggggttctccaggcaagaatactggactgagttgccgttcccttctccaggggatcttcctgatccagggatagaacccatctctgcactacaggcagattctttactgtcagtttatgcctcaaattaggcagccgttctgagcagctgcctatccattcagcagagatccagattctgaatctctgtttagaaacaattcactagactctgcctgtttcttcctgcgtctgttcttgagacttacattaagaatatctaaactccccttaaagcatttcttaatatctggcaatgagatagtaaatttaacatggtttttcttataaggagtggtcagtttagttcagttcagtcactcagttgtgtccgactctttgcgaccccatgaatcgcagcatgccaggcctccctgtccatcaccaactctcggagtccacccaaacacatgtccatcgagtcagagatgccatccagccatctcatcctctggcatccccttctcctcccccttctcctcctgccttcaatctttcccagcatcagggtcttttcaaatgagtcagctcttcgcatgaggtggccaaagtattggagtttcagcttcaacatcagtccttccaatgaacacccaagactgatctcctttagaatggactggttggatctccttgcagtccaaggggctctcaagagtcttctcgaacaccacagttaagaagcatcaattctttggcactcagctttctttgtagtccaactctcacatccatacatgaccactggaaaaaccatagccttgactagacagacctttgttggcaaagtaatgtctctgctttttaatatgctgtctaggttggtcataactttccttccaaggagtaagtgtcttttaatttcatggctgcagtcaccatctgcagtgattttggagcccaaaaaaataaagtctgacactgtatccactgtttccccatctatttgccatgaagtgatgggaccagatgccatgatcttcgttttctgaatgttgaactttaagccaactttttcactctcctctttcatcttcatcaagaggctctttagttcttcttcattttctgccataagagtggtgtcatctgcatatctgaggtgattgatatttctcctggcaatcttgattccagcttgtgcttcctccagcccagcgtttctcatgatgtacttattctgcatagaagttaaataagcagggtgacaatatacagccttgacgtactccttttcctacttggaaccagtctgttgttccatgtccagtcctaactgttgcttcctgacctgcatacagattcctcaggaggcaggtcaggtggtctggtattcccatctctctcagaatttttcacagtttattgtgatccacacagtcaaaggctttggcatagtcaagaaagcagaaatagatgtttttctggaactctctttctcgatgatccagcggatgttggcaattttatttctggttcctctgccttttctaaaaccagcttgaacatctagaagttcatggttcacatattgctaaagcctggcttggagaattttgagcattactttactagcgtgtaagatgagtgcaattgtgtggtagtttgagcattctttggcattgcctttctttgagattggaatgaaaactgaccttttccagtcctgtggccactgctgagttttccaaatttgctggcatattgagtgcagcactttcacagcatcatctttcaggatttgaaagagctcaactggaattccatcacctccactagctttgttcgtagtgatgctttccaaggcccacttgacctcatattccaggatgtctggctctaggtgagtgatcacaccatcattattatctgggtcatgaagatcttttttgtacagtcctctgtgtaatcttgccatctcttcttagtatcttcttcttaggttaggtccctatcatttctgtcctttattgagcccatctttgcataaaatattcccttcatatctctaattttcttgaagagatctctagtctttcccattctgttcttttcctctatttgcattgatctctgaggaaggctttcttatctctccttgctattctttggaactctgcattcagatggatatatctttcgctttcccctttgctttttgcttcccttcttttcacagctatttgtaaggcctcctcagacagccatttttcttttttgtatttctttttcttggggatggtcttgattcctgtctcctgtacaatgtcaataagactggtacagtccacaaatttataggattcttgtgatagtttactgttattgcctttttagatacaaagtcagttttggaatatttatttttaaaaatcactctttgacaaattttctcctggtctaaaagctggtgaaatttatcaggaaccaaattcaatgtgattcatattggacaagaaccaagtatccattaaatgctaaggctgaggggcagaaaaaatggaggcagcctctccttgctttttaagagcttgtaatgcacttagaatgacagatgcagagagcaattatttctgcctgggggagcctggagatggagttgcaaaagagattaaatactatttaatgtactcctgcaaggaggggcttggtgtccatgggttgactttggcagtgtactttagactaggagttgagtcattatatcttggtcatactttttttccccccatgttttggccccagcaagcggctttcaggatctcagttgcctgaccagggatcaaacctggaccctggcagtgacagtccagaatcctaaccattaggctagcagggaactccgtcgacttgtttgttgacacacattggatcacttcttttctcctgtgctttttagcctcggcaccccaatcagatgaaggctctgacatcgactctgaaccagacttgcccctcaagaggaaacagcgccggagccgcaccaccttcacagcagaacagcttgaagaactggagcgggcttttgagagaacccactatcctgatatttacaccagggaggaactggcccagagggcaaagcttacggaggcccgagtacaggtaccaacgtcccaacatcgcgtgctgcgtaaacccagacagggaacaagagcatcttcctctctaaggtgtacttcaaaccaagaaagcaactatgctaggaatggtccttcattgtgaatggtagcctctcacattctaaagttctccctttctgatttctttcctttacattttgccttgtcatgataacaatatcatgatctcttttttctttttatttgcacttgtgtggtccaaccacctcccaccactgctcctccccctcccccggcctctgccccctcacccgcccctgcccccttcctcaaggtatgtctgtgggatacagcaacattttactatgctaaccagtaagtcagaaaatgttctttttcctcttactagttcggtaagtccaattattgatatgatggctatatttggcttttctgtcacattgtttgatatgagtattttgtatgtattgatttaaaactgtgatctatttaattagctttctttctattcttagtatattttgtatttatgaaaatgtccgttcttattttagactttggtcgtcattacgaggagaatgtgttaataatcgtatcagatgtaatacagagaagaatgtcaattcgtgttactcacgcatcatttccgatatccttgttatgtaccagggaatgcatagatttggggggtggtacatggacaacaacgaagttttgagtggttgttgtgtgccaggcactgttctaaatgctttgtgtggattaactcatttacttatcattaagaccctaggttggtactatgaatatccccaatttatagatgaggaaacagactcagagcatttaagaaactacccaaagtcatgtagttagtaagtgatcacggtaattggatcccatatatttcctctctgtagccattcaatcatgaagaagtgcaaagttgcataaggtaaaatccttttctttaagtctagaagcttttcaagtaactgtattattttaagaacatgtaaaattaccttttcaacttagaagtgttctgaaccctggagaaaggctagtttggtgtaatttgtttctattgagtgatcaaataatatttcattatgaatgatgaacagtctccccaaggaagaaaagcactgctggaaagattaaagtgcttcagggtatcctggaattctttactggcccaggagttaaagtcaccttatccggaaatgtcatgttattcccagatacttgactttcatagtcagagtgagactgaggactcagcagcgaactaggcagttgatgtggtctctagattgattgacaccttcccctatgcatctgtctctcccatcacagattgttctggaatagcctcttatagtctgcagagccaagtcagattgcttttctcagcttgactttctatctgatcatcacagtgctggaaagtcaaggaacaccaagaagaatgaggacaaatttctcaaggaactagtgtttaatggggtaataaaaacacacaaataatttgaaagcaaagctgatatgataagtatattagagagagatgaagtgcagtgagagctgagaggaggaaaggtgtgagatcttgttggggtaaaaaagggggactcatgaagaagggagggttcagatggacttctgggtctagatagatattcagtgggcagggcaggtgggagagcattttagtaacacagaataatgagcagaagcacagagggctggacgcacacaagttacatgtcagatgaactttcattttcactctagtcatgttgaagaaacagtgaatagttcagtttggttaaatagagggagtggtagggtggcaggaaggaagctgattggaaatctgtttgctttctttgtattcttcctgtttttgttcagtcactaagtcttgtctgactctttgcaaccccatgaactacagcatgccagttcttcactagctcctggagtttgctcaaaatcacgttcattgaatcagggatgccatccaaccatctcatcctctgtcgcccgcttctcctcttgccttcaatttttcccagcatcagggtcctttcttagtgtttattttttggtacttaggaaatgtgcattcttaacttcagttatcattctgggcagaatatgattctatcagacataacatatagagacgtgtgtcaattcttgttattcactcaccacttcagggatccttgttatgtaccaggcactctgtggactgtaggggtggtccataaaaaatagtgaaattttgagtgcttacatacattttgtggagagcttgggtttcaggcaaggcagctaaacttaatgcagagggcactgaaggtggtggacatgaaatagatcagcagcagtgggaatggaaaggagagaactgctgtgaaaggtggaatgtaggcatctgattgtgtgagctggaggtacatgcagcgaagagtcccagacatgctgggatttatagcacaaatgttttacagctggacctattcaatccctgtatttaatacattgggatatagtgctccttcccagaaatgaccacctctaaccacaaactgggcttccctggtggctcagatggtaaagaatctgcctgctatacaggagacctgaatttgattcctgggttgggaagatcccctggagaaaggaatggtaacccactccagtactcttgcctggagaatcccatggacagaggagcctggcagattacagtacatggtgtctcaaagagtcaatgactaacactttttcagccacaaatcatgatgtatgtatatatcacatattatttatagtaatatatactcatatatcatatttatatagcatatataatgtatgatcataatatattatgtatagtaacatacagtgtacatattataattatataacaacactatatgtattatttatatcaaatgtttgcttttattatagttctgtgatcacccagtttaaatgtgaagttgaggtccattcattcttcctttctttcggcaaacctttattgaatgccctctctatcccagggtctggtccttatctccccaggctggccaagcccacatactgggtctgtccttaagacagactggagatcagttctgaactcaagagtcaaaaaataaactttggatttaaagaaatcaaacaaagagagtgatggaaaactgagaagagtgttccctgtgtctctgtctccttgctgcattcgccaaagacaagtgtgtggggacagaattcatctcaaccgcgcgcagcttgtacagcgccgacactcgcatctggttcaggaaatgtggaggagagtaagaatggctcattaacttccagaggacaagggatcaaaccaataaagagtggttcatatttttctgtacagtgacctcctctccaaagcagggccctcattaacctaacagctgtcctaatgtggctttaacccggtgactctttacattccttatggtttcattagttcccttgagacgcatcatgtcttgcaccacagctatgatctacagcctaacaaattccctacaacacccggcatatggatcttttacttaactcagcaggaaaaagaagggagtagttaatcactgattaaaatgccagaacaaaatcctttagtttttagaaggatctgggaaagcagtagcagcgtcagttcaggttgagtgatagccagagagtgtgttagtttaatttggggcacctgggaaaacccaacaccaaatcaaaaaaaaaaacaaaaaaaaaacaaatgtgtctacattcccctccctccatggaagaaaatttctaagctcttgtggataaagatgagattaaagctttaataacgtagacctttgtcagtatttgaaaaactttgtttgaacaataactatgttatgtttatcagggctgaatctgagtacacaatctaagaattactgtacagcaaaggcctaattcgcttaattcatctccctggtagctgttattatgaaaataatggcaaaaactacagttttgtaaggaatgacttgcaaacacttatgatgtgtaaaagttttagtaaatattccatccaagaactgtactaagcaggcaagtattcttgccacccaggtaatggaagacaggaaaggaagctgcttgtggaaaaaaggatttaactaggagtcagaagatgtgggttttggtctcagctttatccaaagggttttgtcgagcaagtcacttaattttgctctaatcctactgggcttcattttttaaaattttatttttaaaatatgggatttaggtcagatgaccttaggctgggtccatgaatgactaggataatcatgaatggacttcaggagacctgggaaacttgacatttgtacacagatgttctgcttttgcctctgtgtgtgtgcacacaagtgtgaggtagggagagggccgctagctttcctcatattcttacaagttaccaccccttgatcatttcattaattaaaagcccctaagatgcatgatctctcaggaccctttaacactgataatttgggattctcatggaagcccagtgatggtttaaaactatctaacagatctttgtagttcagaagttaagataggtatgaaatatttggccttgaactccacaagggagcaaaaatgtggtcatcctaccattctctgccgcagtttgcttttgtgatgtataaagttctgcatgccctcatgtgtgatattcacggcagcatggcatttcttcttgtcagcctggaccgtcctctccccagcctgctctctacatggtggtcaaggctggatagcagctgtggtaggagggctgggcgagtggagtgagtaagaagttccagggaacaagcagattgtcaggacactgaatttacctacttggaaagtactgtaattgacactttagtatcacctctggtagttaatgaaacattttgtaatcttgttgtaaattctaagggttaacgattacactctcttcccatttttcaaactgtatttgaaataacccatctggaataatgtagattagattgcttttgaggaccacaccaaaaatgtgaaccagtaatttattgagagcaaaattaggcttacaccatgggacaattagcactaatccatgaaacttggaaacaatttggacctaagcctccgttcaagccagactggctttcaattatttgaggtgttatttgggcactttcctgcttgctcaggggcatgaaaggctttggctatagacagaactcagaaaacaaaggctttaattcttggatttctcaatgtgacatttttgcttaataactaacatttactgaacacactttttttttttaacagtattcttttacaagctttgtttgtattgtctcatttaattgtttatgttgtctcatttaatcctgtgaaggggtttttttcctcccatttagtagatgagaaaacagaggcccacagatgttaagcaaaatcttcaaggttacagaggtagtgagggacaggaaaagctgggattcaactcttgcctgcattgctcccatgtgaatgtaaagtatgactgtattttttaaaatactgagtttttatccagcttttattgctgagaacaaattggttgcttattttattcaggaagaggaaaatttataaaaacctattcttttgtgattatcttttcctcctagttattgtgatataatagtgatctttcagtcagtttcaattttgcttcaaaaaatcatcggatgttatgttactccagaatggacctgaaaatcatttccaaaagcatgaagagagacatacaagcatggaaagattcagggagcaggtgaaactgaaccaggctgtagttcatcaaatgaaataaaaacttgctgcaagagaaggttctgatgttgtgtgatattacacagacaattataaacaactgtgcctgatagtagttatccactggtatatgcctcctgccccacttccttactatgtgaaatgtgatgtggaaggccaggtaatgctggggagagtgaaatcacactgaattagagattgtaaagtgacatttaacaggaaagtagcagactctgagatggaaaagactgaaggcaaaaggagaagggggcagcggagtatgagattgttagatagcatcaccaacttaatggacataaatttgagcaaaccctggcagacagtgaaggacagaggagcctggcaggctacagtccatggggtcgcaaagagtcaggcatgacttactgactgaacaacaaccaccacaagctgactttgtaaacttgttctttctgccctactggctaagaaattggtggaacactcatactctcctctagaacctcaaaggccagattgttgctattgttactcttttcaaaacaaagagaagtttctagtcattgtaaaaaccaaatcataaataccttctaccgattttgggacttcctggtggctcaggcggtaaagaatcttcctgcaatgccagagacctaggttcgatccctggattgggacgatcccctggagaagggaatggtaacccactccagtattcttgcctggagaatcccatggacagagcaccctggtgttctatagtccatgggattgcaaagagtcagacatgactgagcgactcacactttcactctccacccattttaagtgatttttttttcagtcttatgcacttacacgtgcaggctacagtccatggggtctcaaagagtcagacatgacttactgactgaataacaaccaccacaagctgactttgtaaacttgttctttctgccctactggctaagaaatgggtggaatactcatactctcctctagaacctcaaaggcgacagtccatggggtttgtctgttaggaactaggtgatagaatattggaagagttaggtagaacttctgagtgccaggggaatgtctttcagtcgcagatgggggtaataacagcaccccagaatcattgtgcttggcttgggtatttaaaatgaaggtgatttcaagggcacctttttcctattaaaaatagatgtgtgttttatgactttcaaagcctaaagaaggcaaggaccatttcccagtttgcaacttcagtgtatttttacttcagttctgcttctggcagtttcagctgcttcttggagatgcagaggctgccaggggcaagatgatagaaaactctagttaactgagttaaccagagacaggcagctcagtccacaagaagccctggtctctcagaaatagccctctggatttatttagccagaatttaaacaacatttaaattccttcctttgggaaactcttaaacctcctgttaaaggtttgtttttcagtaaagatttactttccaactattccttgtcttttacggtagttataatatatactgtatggtaaatataagaacttataaatccacctcctggtgggtttattccatgtcatcaatgtttacttgtatcattgtggaaaaatgaaacaaaaccaaactaccttgtacacctagccttttgggttttatcttttgaagggatttgtagaaagtcatgatgttccttctaatttattatctgaatgaagacattttttattttaaaaattgggttatggaggagttaccatgaacataaatcaaaagtaggttgggattgatggagtaaccaggcagagcccacccactggataaatcaaatttggtttacttatctaaaggttacagcaggaagttggcacagagagattggagacatgctctgataatgtcagaagggcaagcttctgagatcttcataatgaatctcaccagtaggttttgtgacagtaagtctgaatgagtgaagtcacatcataacttttggaaattcagctttcctccctgcctaggcagctgaagatgcatttcacatgggttggtcaagataagtgtgaggacccgtcacttgagccaggtgtgcctcattgatcttgaggttatatactatgaaatatgaccacggtgcgtgggatagtacagtacactcaggcatgaacacaaccctcattccttaccctcagcctcctcaggctaaccagcttgttccaaacacttccctgaaaacagtttttttgccctgatgcctctgggagtcatggtaacagacacttagactttcagtgagaagacacaattgatccagaaccgaaattgaatgccgttcctggttctattatcccaggtggcaatttattaagttaagtaaaactctaattcaattatgtatcaacttgagaaaatattgacttaccttcttttcctgtgggatacttaaggagtattaaatgttagtgttctgaggaagttcaaacagctttccttactagtatcttgcagcatgggtagagaagaccagactccttttcagacagatgcttgagtgaatagcaaaagtttaagcagatgccttggtaaaatgtttattaaactgggctttcttgtttaagaacggagggagggagacattcctctctccactcttttaaaattttgtgacttaaaatttagaattaagttgtttaagtgttaactttgttctgtggggaaatcaagtcatcttttcttaagcatgctggtctcttgtatcatctcttccatctggactgatggctttttgaaatcatatccaaacttaaaatgagttgacattctgtctctcatctaaagttttcccgattctctgcatttccaaaatggaacttctacctctagtgagcaattagtttggtgaccttgaccactctgtgaattccttgaagaaaagacagtaagctccttgagctcagggatcctatcttatctactccttttttcctctgataaaaagataggtgcttacagctgctatggaaagaaataataaaacaaactcattttgtaagggatcttcatagataaaatgcttttttttcttgaagtacctcttcaacattaatttctattaagatcagtataatgtctcacattttggaagagatggtaaaaaatagctccacttttccttctggtcaattttataagactctctaggagctgtgcacataatgtccatagaaatacagacacattgataagactatgaaatacaagggttagtgcagtaggcaaggccaaattaggacacatgtcttggagggggccatagagactcctggatcctccctgaagtgctgtagtacatgatggtgggagggtgccaatggtgatggcacctctgctcagccatccctccccatagtcaccccagagttcatgtgggggctcatgccagacctcagaaagcccttgaagtccctctactgacccctgagatctaactttcctttctcccctgacaatacaagccagaaggtagaggactcttgtgtctgtttgccctttcagtaagggacctttaatctgttttagcatgaaaaattcattaagaatgaactattatttcatcagtgaaattctcaaattttaaattaaatccataggtctggtttagcaaccgccgtgcaagatggaggaagcaggctggggccaatcaactgatggctttcaaccatctcattccggggggattccctcccaccgccatgccgaccttgccaacgtaccagctgtcagagacctcttaccagcccacagctattccacaaggtatggaggaaggcagtcaaggggttaaaatgtaattcccagtcttgttccctgctgcttgctttatacagtgaaatcttctgtgatgtccctgtggctgactgtatgtttgttacattatatcgggctgtcctgaaagtacctgtcacctttcagaaacatagtttgttctatgacatgtctgaatctctctagttaaactgtgttgtaatataatattgtttcaggattttaaaacaaaaccaaacaatgaaccaaaacaatctcccaaaataagcacgcaattggcttttcctttgttaaaacctctacctttgtactccagtctgcaattaactgaagttctgatggctcctcactggggtaggaattgagggtaggtaaactttgataaagtccttctatattacagcatgggctttccaggtggctcagtgctaaagaatctgcctgccacgtaggagacatgggttcgatccctgggttaggaagatcccctggagaaggaagtggcaacccactccagtattcttgcctgggaaatcccatggacagaggagcctggcaggctacagtccacagggttgcaaagagtcagacacagcttagcaacagcagaaaaatgttactgcatagaggtgaattggataaataagaagactaaattattttggattacaaaagatagcattgtgggcatttgaaactatattatcacactaatatttacgtgttttggaagtttatttgataagaaatttaagatgcgattcttacattggttaatctttatgttggttagtaagattcactactaatataggtttgttctcactgttaaggtgatttctgaatttctgttctggttaagtgttccttgaaagtatataagtaaactatgtacttgtacatatgtgcggaagagaggtggctctatttgttaggagtggttctatacttacatatcaagaagtacagtatgaaatttacattgatttgaccagtggatatactgatgggtgggtgactacaaacttttgcactgaaccttctctgccagccttcaaaggagatttatggctgataaccttcttccccccagccgtgtcggaccccagcagcaccgtccacagacctcagccgcttcctccgagcactgtacaccaaagcactcttccttccaacccggacagcagctctgcctactgcctccccagcaccaggcatggattttccagctatacagacagctttgtgcctccatccgggccctccaaccccatgaaccccgccattggcaatggcctttcacctcaggtcagtcccctgtttccagacagacgagttgctgtataccagaaccaaatagtcaattccctgaggcagtcatataatgaattgccaaatttaaaccataatgtattctttatacaagccacatgatttcagttttctggtttcctttctctccacccttcttatgggctgtatcaaaagttagaacttagacttaaaattcaagccacttttatcataatcagggagattttctgtttatacttagttgtcaaggtgtcatctgctccacatgtagtagttctgggttttgggtaagaagttcacacatattttttaaaatggtatttggtcagctgatagcgttgtgagtaagaacgcttaataagaaaacaccacagcttttctataattttcagagagaaggttaacaagttgtgtggagaatgacccatctgatggctgcagaactctgggacaaatgagttataaatgcagaatataggagaattactgctccttgggaatatacagaaatttgaatgttgtaattgtttttctaatttgcattggactatgagcttttcttgagagattatattaataaattgccttgataattgcatgtcagagggttggttaaatttcctacatgtggcatctgtctggggttgacattattagcagttgtttaaatacagatcacttgattttattagagagcacttggcccaggtggcgaggagagctgcccgctaaatttggagaaatgtcacgaaggggttgcaatctataattgcaatcaagaatctcttcagggctgagagtgagagttttaacagctttatcttttcttaaccccctttttcctcttggtggttagaaaaacagagagaagctcagaatgacacaaatgaaaagtgaaaagacaattatactcaattacacactaatcactgactatcaccactgcctaagcaccaagagggcattctaataggcagaaaatgagattttaatggcacaaagggtggccaaaataaggactcatatatctttgccttcttcgttttcttcaacttgtggtttgcgtcttgggagtggagttcctgggctctgcataacggtgataactctgagcagctgaaaagttcaaagctgttgcagttgaaaagaatgaatagcaaaggcaatgaaataaacatttctgcctaaaggcaaaagttcataaatccttttttgtaacagtaaatgtaattaagtttcatagattcctatagcacatcctgggataaaaactaagaggtggctgtaaaccttggctgcaaaatagcaacatgaaaacaatggacgtgcttcctacaggactttaatagacttaatttccaagtactggcctttgtgaatgtggttttgcatgaaaatcatggacttatattaatagattcatgtttaaagggctgtatttagagcatagaagcttctcccacagtttacaaataacatcagaagtagttgtctctgcagtttaaagcgttaagcagcttgaggccacagaaaagatttttatgaacacaattcggttgagagtttgcataaaagtaaacttcaactctgtaaggtgagacccaggattctcttggcatatgtcagtggtcgaatattataacacaggtattatactgtgttatttaagtggaagtactagcacttgactttgaaactgttagtccttgatttcaagaagactggctatgattctagagttggcagtagggcaggaatgattccattatcaagcaatggaaaattcctcgggcaacttctgtgtttctttacaatgctcttatacattatgttaactccttacttattatattgtggatatccagaatattttgcatttctaccatatatttcctcttcaaaccaccagttgtgttagttgctgtagcatctctagtgagttagaagagagatgaataatgtgaagttcctccttatttccttaggcaaaattggagaaaaatagctgagtgaatcaacatcttgccggacgtatatacaaaatagatggaataggagcattaggcgaattgggtattaggacttacttttctatagtctttgagactgaccgcttctcaggaatgcctctatttaagcaaagagggatatgttcactgtttttggttgtttgtctttattaaagatatcgtagggatttccctgggagtccagtggttaagactctgccttctagcgctagggggtgtgagtttgatccctggctgggaaactagatttgccatgacacagggtgtggccagaggtccaaaagggaggggatattgtatccatagagccaattcacttccttttacagcagaaactaacacattgtaatacaattatactccaataaaaaagtttaagaaaatattgtaaagaaaattgaagaaaacagtccacatttaacagctagtttacctgtttatctaaagaaaagggtaaagaatggtgatggctgagtctttttgcttgttatagggaagtgcttattgatatattggatcatataatattaaatatggagaacttccctggtggtgcaatggttaagactttgccttccaatgcaggaggtgccagtttaatccgtggttgctaagatcctacatgcctcagggccaaaaaatcaaaacagaagcaatattgtaacaaattcactaaaaatagtccacattaaaaaaaaaaacaaaaaaagatcttaaaggaactaatcctacaactgccatttctcctcttctttccaactcttgcactttctatctctggctgaaagtctgatacgcagacaaatcaactgaggctcagagaacttgtggccatatcgctagtgagagagctgggactagacagaattcctggctccttgtgtagaacctcattacttacagcacctagttgggtggagagaagacagattaaaaaaaaaaaggtggggactttattcatattttaaaataattttatagaagctagttttctaaacttttggatttgggttaattaacactcttttctaatgcactctttacatgcttttttgctttatgcatttttcttatcaatcttttaacttcccctagtaataaaaagtactttttggttattataggaaatggggaaaaaatttttttttaggatttcctttctctggagtaggaaaaaaattcccctaggcaaccactgctaatatttttgcattttaccttccagctctttttgggtgttatgctttaaaaatacatacataattgagatagtatatatatatatatatatatatatatatatatatactatatcataaaatatgtaagcttccgtctcgccttttccctgcctttgtacttcatcataggtcttttcttatctactaatttaaatgaaattggatctaaagttttttgagtcattatgatcagttcattgtagatctctttagtagatgccattttatttgtgcatcttatttgatttttttcctactggcattgatgttgatgtatcatttgcccttcagacttggaaatcacgcgttagaatgtgtgtgaaccattgtaaaatcagctttctagttaatggaattaatagacatcattatgataagcaaattattccttacggtttgtgtgtgggatttagttgattttcctctggggcctctaacatatctatctgctccctcaaacaaagattcttttaaggcttggcatcagagccatgagtcaaagggtgtttctcagatgcccttactgctttcctcagagaaattctcagctttcggagggatgggtgtgaagcagtgactgaggaaaaggtcactgtccagttggtcagatgagagtagcaacagattgacaaacatgtgtgacattctgaatctcagaatcctgatgaaaacttttagagacattgatcatatcccatctcaagttgcttaaagtgtctgtgcattactgaattcttggcaagtgtattttgttctgagggactccataactgtatccattttatttttggaaaagctgaggccggtgcaacacagtcagagtcactggcagaggtaaaagccaagtctgtcgctcttccaggcttttttggctgtgctgggtcttcattacggcacacaggctttcctagttgcggtgtgtgggcctcgctagtttcagtgcatgggattctccagttgtggcctgcaggcttctcgggttatggcttgcagtgttagttgccctctggtgcaggatcttagttccctgaacagtgatccaacccacgtttcctgcattggatggcagattctttaccactggacagccagagaagtctcttttccagtttcactagttctttaataaaccaaattacacatttaatttgccaaagaggcatgatgtcgtagaaagatttccatgggctccagcactgatattcaccttggttttccagcggggagaatggaaaggcttcacagatgaacgactgggcttcacgctccctccaaagctggatttgttaagatatcttgagattctcagtgttgggtggaaggagaataggataatttccttgaaattttctgctgtctctgaatttctacataaccattctagaagttgaggcttttataacaaatgacaaaacaccccttgagaagaaaaccgttcaactcactataccctgcagtagcgccctcttttgaaaagttgtgtgtttttggtgtggggacatcacagaaagaaaacagggaaatagagaccatgtattttccctccaaacccagctggtatgttcccagcaccttcctgcatgtgcagtggagaaaaaggaatgccgacctggaatatggagccaaggaaatacaaccagatgcttgagacgtgagactaattaacatttggcccatgttcttctaattaactttcctttgcaagaaatactaccctgactgctcccccacctccaaaacacacatagctaaacctctaaaacaaggacaataaaatgaacaaacatatcatttcaacacccccgacccaaatcctacaaaattccacagtttttggtgacagcttctaatgatttcttgagtgaaatacagtatcagtgggttacaggtttctaggaagctttttttgttgttgttatgtagtatgcaaaaatgggccaacttggctgcatttagagttcatcaaccattgcaaatgattcttcaaatgttttgggtttggtaaaacctaaaacacattttgccaagcacttttcctccttaatttttcaaactgtgtattttagggaaaatttgatccatatggttttgattcatttagtcttatatcattgacatttttttttttttcctgtggagccatttgatatccaagaagctttctgagcctttgctgtgttcattttaagcattttcttccttaaaaagaggaagtcctctttgcaacctcagaggctataaattttgagtactctctcagttcagcaatacttaaaaatacatttggtataaatctggattattatgaacacattttatgtttagaacagatggagtgatttttgtttctggttttatgagtgaaaccaatgataaaataagaaaataggcttaaattacaaaaaaagttttgttttagacaacatttaactgttattaataaatccccacggtaagatctatgctcacagacctcactgcaaattttgtccaggtcttgggtaagatgtaattgaataaccagtacacctgtcctatttcatgggtaatctactgaggaaagaaaaaaaattctcataaagatttgtgtaccaggcttcaacatgcttgaatgtttgctcaccactcagcatctcaggaacaaagagtaggtctgcagatctcatcaagtttatggaccatacctctgttaagtctggttgaatcatcacagctttgtggggatgagatgctgtctctgaaacagacccaagaaagagcagatagatctttatactaacgagattgcggttaatggcggaagacacgaggatcaacttttgttcttattcatattttacaaaaggaaccctttaacttcaccacccatccagttgcttttaaagaataatattaaaattgagattattagtgtgtaatgtatgtaaattgcatatttggtgtcagctacgcctgttaggcagcttctccatttcatgcatatatgtattagactgtcgtggttccatttcaaatcagatttcaattgctcagcacagtctcttttgacaaacatttgttaatcctgaaacttattagggagatgcatttaagtgttaatatgtatacaccaaactcaagactgcttttgattttgcttgtcatttcttggatcacagtgttcctaattatctcaaattccttagctgcaaggcaagatgaaggatctgtgtccatcgaaggtgtaagggtttactacagatcagtttgttatgtgaatggggtaccgtccttaagaatgcttgtgatggatactcttctgtttcctatagaaagaatgtccctttcattgtggcatggcaattccttgaccttcttttgtactgttgatgcatgtgaaagcagtaagacttcccctcgtggcagctcctgtttcaggagagctatttttctggacattttgggcacacatccagaagctacttgatgccaggccatttgttctgtccatttcacacacaagtttgcagatcctctgccctcaacttacctttatcatcgtgaaggagcaggcaagcaggtggcctgccaccaactcatttcccaacagaggcacctcttttcttcttccttttttttttttttttttttttacaatttccagagattcatctgtggacagaaaacagtgcttttcattaaagagattggttggctgtcaaacaaagcctggagagagaaagtggcagcctctctgaagcttcagcctctttctgtttcatttctaaagcaattcatgaggtgcagaagccttacatgtttatgaaggctcaaggatgtttatgatcatcagtaagcccatttcagctattccagagtagccgctgaccatttgcaggtttccattttgccacattaggttttcaagatgtcctgcttggtggtgaaaacattgctgctaatccatttgttgaatcaaggcaggctgtaattgacatggtgcctttggtttttctccgaaggctgtggttgctacccttaaagagtatgaggagagcactggtttatatcagttctagccacagcctcttgtgttagttatccagagttgaagaattgtgagagaaactagtccttggccaaaatctccctttttaagggaagaaaggagcagcagcctccagtgactaaatcttaactcatgtcactgaaatgagccacgagaaaacctttcttgctgaattaaatttgtatgtgtgtgtgaattatattgatttaaatagaaattctatcagctactttctcttgtacattgaacaaatcaaatgtaacaaccccatggtttttaggtccatttgaattccgttagccatcagggagaaaaaattgagtgtgattgcttggtttataattaagctactagagtaaaaagtttttctttgtaatcagtaaaacataggaaagccatgctggattctagtgtgaggccaacggcctgaatcaaccctttatatgtggttggaatgcaacgtaaagcttttaatttattactgcgtttgcaaaacggcaatatctacagaaatctgaatacttgcatatttattcaattagaggctgaatgtgtgctttgtactgcagacgcagaagactggattcagtcattagttgtgtactattttttgttgttttttcttttttttttaaaagaatctgtctctgcaaaacagtctgggttccatcagaggcgtatatttttcaatatgtagtataatattttaaaattactcttgacatttagctagagttcagtgaactagagtttctgggattagtgattgcgttgtctccactgatcaatggaaaagatgataaagaccctttgaaacagtgcattttgtagaatcaaagggttgttcctactttgtagggagtatttcttagctgtgagaggactgcaggtattatttaaagaaataaccgtcttttttccccccatgaaatactgacgtcttattttgccctgcttgcattaaaaagtctaattagatatttacagattaaagaaacactctgtatcacttctccgccttttggctaagatgaaatgtaaaaatcctcaaaagaaatgaccctctatatgtacaattccacggaaaaatttctagttcagtgtcatcccttttgtgatgcttctaggcagaattcctttagtctctattgatgctacactagtgtgtttataccttgttaaaacacataccacactgtattacaatatatccatcccccccttggatcatgagcttctagaggcatgatactaggttgtaatcatctttgaatgcctagaaaccaaacagtgtctcataataaaggcttgttcccaaagtgggctctgtggaatggtggtttgaggaaaaaagattttgaatcaaaaatctggtaaatatttcaaattatatccctttatctttcagagtcccagtgcatattagcctactaaaggctctgacaaatcttgcagtataaaaacatgtttaacttggcattctctaatttgactatggatcccttttgttgagtatcagactactaaattttgaggaacattttctaggaagtgctgaatgaaagcagtggagagtagagacccaactcatgatttgtccatttctagaattgttttttatatttttcactagtgaatgtttcttctgttaatgtctgatattatcttctgcttgaatacattgtcatcctctgtaggtgaccttaggggaaaaaggggtaattttagaaaagaagctataaactgcttaataatatcgataggtatgaaaatgagtaaaaacagagaattcctgtttagtgaattgatggccatgtgggtgtaactcattgatctaagcaggaacgccaaagtcaaaagcactatattgcaatacttgacagccagttacaagctgtgtgtcttggggcaagctgcttaaactgcctcatcttctgttccattctcttgttaaacttggaaggtattaaaaaagaatcaccctatagagctatgctgagaaacatagtacttaaaagaactaaatgcattttggtaaagagataatactgtctgttgcaatagagctttcattattgtttacttaaaaaaaaaaatcatgtgggcctctgaccaaaaaacatgcttttgtttgtctctgaggaagaaggcaaatgtggaagctgaataccatcaaaggaaaagcagtttcttggtgactggggtattttcagttattctccttagacattttaaaggcccaaggactcatagtggcgtccattcagattgcagtcattgtaatgagtatacctgggatatgatactgcccccacatgcattgtacaaaaattagttttgtttgagtaattcagatcacctgtggcttcccaggtggtttagtggtaaagaatccgcctgccaacgcaggagacacaggggatgtggattcgatccccgggttgggaagaccccccggaggaggaaatggcagcccactccagtattcttgtcaggaattccatggacagaggagcctggcaggctatagtccatggggtctcaaagagttggacatgactcagtgacagcatgcactataatgaaaacaagaggcaaccatccttcgttgcatggggctaagagtagggatgggacacggttgtcttcttgtttcctattcttattcttgttttgatttattgaaatgtaatactgacattcccaggtggcactagtggtaaagaacctgcctgcaaatgcaggagacccaagagatgtaggttcagtccctggaggggggagaacccctggagaaggaaatggcaatccactccagtattcttgccttgagactcccatgaacagaggaccctggtgggctacagtccatagggttgcaaagaattggacacgactgaagtgacttagtaagcaagcagtagtgacatgaactcatttttaaaaaatcagtggttctgcttctgtgatactagataacctcaaaggcaggagagtctgatgaactatacttctctctcaccaacaaaggagaaagttagctaaaacaacaggtacaatggaaaggttttagaaagtaaaggacaatcttaagtaattctgagttaactgactggggagtactctttatcactaaattacaaagattctattttgtcaggatctgtaggagcagagttcatttctgtagataaaagaactgtctacgtacatgggctctgaatcttgccagctacttcaggttgcctgggcaataggagacatagcccctgcctattataatcaaggacacaaataagtttagaggtgaaaaagcatcaccatgtctttattggtccagtttctctggcattgtgaaggtggggggattaaagtaggtaggattttaacttagcttctaattcttagaagactgcattctcagatgttgtcccatgtgtatacagttgttacaagtttccaagcattttaaatgaaagtttattctgccttaacacaaaaacctgtgaaacaggccagaaaactcttcttgaagggtaagttcattctcagacttttgtgaggctgtgatctgttaaccatttcccatggttaatagaaatagtttccctgatagctacttgttaaatcagtatcacttgatcttttcacttggctcttttctctgtcctgaggccaaatcggaaggtccgtttctgtagtctttaggcatttagtagatggagtcttatgacatgggctttgggcaaccgcaaaaatatttgcctacatcacacatggtctggaagaaagaagaaatttcgttgttgagctgggcaactttttcctcccttagtaggaaatggaatgtctgccttccaagtttgtggggggattggagatgtagtataactgagcatccttctgcttcagagggggcagtgttgaggcccttctttctaaaaggtaatgtggatgctaggttattgtaaggttgtacgagaatctcaaacagaactgggcagttaggattcagtaaggtgtgcgttttatgaatggttattagggtgaatcagccctgcatgtccttgaatgcaggcatagtttataggcaattagaattttaaacgccatttcattgaaggactgtggaatgcccaggtgtagagctttttcctgtctatatttggtttcttaggtctcaaaaggtcaattaatatttagcaaacgtgtccagaagtagtcatgaaattaaaccaagatatatgcttgattttccacagtcatgttttttagacaggtttttgaaacagtgataggtttgagtacttactcttcagagggctactgcggtggtgagaaatttcctgaaagaagagttaacagcaggtaatgtcattcctcccagaaagagttggagactctctgtgctaagtgatgaatgagggtatctgacccacatgtgttttacattagaatggaacattgccctgacatcgttaggagcatttgtcaagattccctggacagagcttctgtaaattacatgctgcaaatgtgtcagggtcagataagaggatatcattaactccctcaagtttactcagggctctgtcagtccatcttaatatgctaacagcccacaattttccttgagccgttttgctgtatttttcattcatagaagaaaaaatatgtatgctatcccctccccccctcaatatcacacatgttcttttctaataaatcatattaattgtagacatggtcacaaagcatattaaatgcaggcatgcgtaaatgaattaaaacatatgagaattttattacagcccatggtgggtctaacatagtcaaatagcaattgtattaaccataagtgttcatttaggtgaaatgaactttttcttaatgggctttattttattgataatagatggacatgatatgattgtccatcattgtctagaaatacactctatatgtatgtgtatatgtatatatgtctcttgcaagccgtttctatgttaattttctgcctgctgctgctgccaagtcgcttcagtcgtgtccgactctgtgcgaccccacagacggcagcccaccaggctcctccgtccctgggattctccaggcaagaacactggagtgggttactatttccttctccaatgcatgaaagtgaaaagtgaaagtgaagtggctcagtcgtgtgtgaccctcagcaaccccatggactgcagcccaccaggctcctccgtccatgggattttccaggcaagagtactggagtggggtgccattgccttctctgaattttctgcctagatttatattttagtcatcagtgtctaaagaagtctctgttgctatccatttgacagtttaggtctattgagaaagagatattctaaagaactaataaagtaaaaatcattctgtaactgatcacagacttggagattaaagcacatgtaacacttaaaagtttagcttatacagtacttacagtgctttttttcaaataaaccttggaaatgtatgtaccatatgaaccacacttgtctggcattcttactttttcatcatgcatgaaacagagctacttaaaaatgttagctaaggattaacattaaagaaaaatttgagttggccaaaaatttcattcgagtttttctgtttgggtctttaaatgtacagaacaacctgaacaaactttttggccaacacaataagtatgtatttggctggatattttacatgtactagttttctttctggttaggcagaggtcagccatgcccttccctaactctgggtgggtgagaaggtcatcatccttaccttaagagaaacttctgccttaaggcaacttccttcttacagctttcaaacagagagggcaaaaaaaatctaattatttagatgctaatcaactgcaggataattcctaaggcatttgaatttgaagacaacattttcagaaaagtctccactgtccaagtttaggtttaggtaatgccttaaaaatatagttgctgaaatttaactatcaggtaacttcagtagcaccagtattgaaaaatacacttgcataaacatttggaatttttgtttggttctggaaataaattatatccagattttagaagtttaaaatcattagatttttaagaaaagtgtagaagctattaaaataaaacctctgtatcatacaaagctgtaactcacagtggttttccaaaatgcaactaaatgtgtattagtaaatgttaagttagaagaacatctgattacttaagagcaaaaaagaaaataaagacatgaaccaggattcctgctaaggaaaaaagaagtgcctagacgtacaccataatatgctaaatcattttagatttctgataagctctaagcacttttaactgatggcaaaatcataacacgtaagccaagacaaatattttccagacacattgttttaaatgtaaatcttaatttggctcacagttttttaaaaaaatcttttatatttaatcttacaataggaaaattaattcaagaaatacggcatgaagcaattgtaaagttagtttttcctgaaccatataatcttccaatcaagatataaacaacctatttggaattctgaaacttgagaatgagtttaaaaggatcttcaaaaaagcttctaataatgggaatgactaaggaaccggcagaagtcccggttgatgattctaaggtttgaatttatttttaaaggttgtccataaaacaatttagaaatgacatctgggaaatatttaccaataaatttaatagattttttttatatgcttcaccttagagttgtactcaactacaagttaaaaaaaaatcctcctcctatctcccttcccaaggagacagacagatatctgtagaaaaggaataattttcttgctcattgctgttcctggacttatctgacatttaataagaatatgactggtgttcagttgacagaactgagtagccctgagtatttttttttcctttgaaattatttgtgaaaaccaggcgattgtgtttcttctatctcaaattaaaaaataaaatcaggcaaaaatggcctgtagtagaaataccttactgatagcttatgaggaaaaaaccccactttgcaaccagtgaagattttattttaggctttgaattacagtttgctgtaggaaaagcatttatgaaaaagatcctgacaatattctttaaaatatgactggaagacattctgtgaccatattgggggagttctaagaagttcgtttcccaactttgtgcagcaaaaagaaatttccatagcttcccttgaaccacatggaatagtaaaattgctttcaaagaaacgtacataaaagtgtaataggacccttccatagagaattgaggttttaaattatgttaggggaaagtaatacattttgtattgatatagttatttttctttcctaacacagatttcctttttgatttttaaataagaagttagtaaaatgatgtatatacatctcacgttttctcagcaagaaacattgaaattaattgtgttagttatcatcattcattagcttccatttcagagcacatgtagggttgtattagtgcttctttctccatccttatacaattcctgagaaagaagtcatggttacaatgtgttactgtctcaatggaaagaaaaactcatgggagacggtctgtctcttgggcttgctcagggaagtcaaagggataatgggtctctggtcttctttatttcctcacattagcctctggaaatattgggctgctgagctaagggcagctgctgatataggagctgtcactagcttcgggtgtgtgacattggtaatagtgacaggaagacctaacaagcgtcctccttgttccattcacacagcagccactcctcctgattggatcaggacccaggatgtcttcaggatactgtgccctggcacctttaaggaactctctttctcttgccctagaatatggccttggagataataccgtatcttctccatccatcagtagataatgtttcaaggtcttcctgtcctaaggtattttctaattcagcaactccaattagttgctacaaaaacagcataagttgaattttgcttctcggaaggactcatttcttctcttttagggtcttcatgtatttccccccatggacaaagttattactgccttcaaaattttataaacaaaaaatatatggcagaggatttaaaaagtttatcacaaaaatgtacatatagctcatgggagagtgggcatgttttgaataaaattttgctcttactcttcaactgtaatggtacatagagtgtaccatttcttccttaaagtgatataccattaacagaatttcaagtagtatcttcatgaagaacactattaaaaatatacttcttttttatccagtaacactgtatatttttcttctctgatttgatatagttacaaagttgcttttcctaagtgctttttgcaaaaaacttagcacagattatttacacagtaaaatatttgtgccctgtgttaaaatcccctttcattaaaaatatcatacttaaaattttattttttattggggtgtagttgattaacaatgttgtgttagtttcagatgtatagcaaaattattcaggtatacctatagctatatttattcttttaaaaattcttttcctatttaggttattacagtgtattgatctttatagcaggtcggtgttgattatatattttaaatatagcagtgtatatatatcaatcccaaactttcagtctatccctccctgcccacacttcccttctagtagctgtaagatcattctctaagtctgtaagtctatttttattttgtaaataagttcactgtatcattttttaagattcttcatatcatttgatacttgtctttctctgacttacttcacttagtatgataatctccaggtctatccatgttgctgcaaatgacattatttcattctttttaacagctgagtaatattcctttgtatatatgtaccacattttctttagctgttcatctgtccatgcacatttaggttgctttcatatcttggctattgtaaacagtgctgcaatgaacactggtgtacatgtatcttcttaaactatggttttctctggatatatgtccaggagtgggactgctgttttttttaaggaatctccatattgttttccatagtggctgtaccagtttacatccccatcaacagtgtaggagggttccccaaaatggtacatttttaatatttttattttccttatccactcttgtctattaggctggcattcaaggaggtgctcctgatttgaaaggattgtgtttggtactgagcaacttctattttaaagactttttcttctaatagacattagtaatttgggctgaaagaaaatatttaataaattagtatatcaactgacctttacaaaatttcccaacaaataccataaaatcacctatgtgagctcaaagaaaggcaaaaaaaaaaaaaaagaaaaagaaaaaacaaccaactagtatagggggaagaacattcaggaaataaatgtcttttgcattatgtttaggtttttttaaatgagaaaatgaagtaatcaacttactgtagatagcattatatgagagcccaagttctggtgactttcatcctcctagagctgggaatcctattgattcttactttactttgtgactctcattttccttaatccccaagaaaacagaactacactctgaaacatataattattttttttgaatataattttagagactttgaaaattttcaagcttaagaaaatttagatcccttggaatgtcttttaaaatttgggaacaactgtgttgcttgccctacactggccccccttcccatcggctcacacatcttacacaagaactcaagtgaagggagacaggaaagggagcacagagacttgggggtgtggggaagggggaggtgagaaggtggtgaacagattctcttttgttttcttaccccatcccccctttttttggtcttttggggctaattgaagatggatcagtttaaagctttgtttcaagaagattttgtttagctatgaggattatgcaaacccttcccaagggggattgtggcctcactggttttggaatctaatttaggcagctttctggaatgcaagattcacccctccctcctgcacctccattcaggattctgtggcctgaattaccttagtgggtaacagaggcctctagtcaaggttgagttccattactgccctttcgtcttgcttttatttgtgcattttcatctccatatgcttcagacttcctaaaatacagagggactaggatgggagtattgtgccgtggtgggcccctgcattgaaatactttgtgagcaggtgaagctctttacccagcagtctatttcttctgcgattgctttttgagccctgccaccaacttgtacgaagttgagaaaaaaatcacttccattcttgggtggcagttttccagctgcaaaattaattgtccacttgcttccatcacagtgtgttgtaagggtcagcgagcctgagtttgtgaaactcgtcaccgtgctaatcagaaagttgttctgttattacagttttgtttttttttaaagtttgcttgctctccagggttatttaaaaagccaaacagacttcttataatatgtttgcatttcaggcttttttttttttttgacacttcttatgaaaatgttagtttggagaagaaatgaaaggattaggtaaatggaggaagttatttgaagactcatctgcctgataagtgctaagaactgttaggggctgagaatataagaatcagtagttcactcctctcagaacactcacaattcaaagtaggtgaccaagtgttaattgcacagtaagaaggatggggaaaacacaagggaatgtcagagaaggagtattttatttctaactactgaaggatggccaacgtaaggagagtaattttcttgagagggaacgctatgaaaaaagacaaagatctcaacatacacaaaaagaatttgatttagattcatgtcacttaaaaacagtataagcaaatgcctgtttaaaatgacacatgacactcccagttataacatggttaaacattattcaaaaggaacagttacaatttctccctccttccatccttctgtccctgtgtccttccttccttgaatttccagcctgatcttatcactaggggcatggtgtccgctctcttccaccctctctccttctttctgaaactgcagcccgatgttatcactgggcatgatgtaatagctctgccactttgaattgaggttaccctcttcgggacggccctctcacagcagatttccaaagaaatcaaacttggccttttccagttatcccttcagctacaggctagggtctggtcctccctgcattctcacttcttccccatctgcctgtttattttaggtaatgggacttctgaccaaccacggcggggtaccccatcaaccccagactgactacgcgctctcgcctctcactgggggcctggaacctaccaccacggtgtcggccagctgcagtcagagactagatcatatgaagagcttggacagtctgccgacttctcagtcttattgtccacccacctatagcaccacgggctacagtatggaccctgtcacgggctatcaatatgggcagtatggacaaagtaagccttggactttctagggagtgattattcctggaagagtgaaacactttaactctttctggagaaaggggagctgccaacatgattaagccttccatcccggtatcaattttgtggcaaagccagctggttgttccagcaagggcttccttgtataattattttcttaactgatgtcaacaacctcttgcgattattaattgctgagacgtgaaagctgattgccactaggtaaaacacaagtgttggcccaaacgaaataacccctggcattagaaacacatgttcttaatgaggtcagctcaaggatcatatggggtataatccccaggacacagagttctgtcaaacttgtctcaggaataaaaatattagtctcgatcctttgataccccggtattaaatatgacattgtcagcctgtagctgattttgccccttgctgtgaattgtcccagcctgacctgaaaagctgcgtgtgtttccttacaggtgcctttcattatctcaagccagatatcgcataagtgaactgtccgcttggagcgtaaactggccctgtttccggtctccacagcctagacatgaagaatcttctcagaaaaaaaattaccctcttgggggggcagtctctacaggagacaaaggagaatgattgattttctttctccagtagttggtttcaaattcttttgaacgtgtcgaacaaaagcagtggagaaaaggaagatccggaacaataaaagacaaatgcaacattttaaggcaatgatttaacatggctacatatcaaatatcccaactctagtgcagatgaccaaggagctaaaacattccatttgtgtgtgtgtgtgtgtgtgtgtgtgtgtgtgatttattttaactggtttgggtaagcagaacattctgaaaatatagtcggagaagaaagtagaacaagtttgacgtccgatgttgacacttcgacaactttaaaactgctcgctccatgaagctggaacggaggcgtctttgacacactggaaat

SEQ ID NO: 115 - DNA, 16647 bp, Hippotragus equinus
  source 1..16647: mol_type = genomic DNA
gggcagggaggggcaggatttgaactcacagctgcctgactcaagagcagcaccacaccagtgcccccgtgtctgttcatcacgtcatcacttgcatcgctctgcacctctgtgcaccaggcatcctggaggaaggtgagaaagcctcagcccacaggtctacaccccgcagggacgatgtcctgctggcaaggtgaccaaggcaggacccagggaaggctccaggccttggccaacaggcaaggtgctctgtggggaggacttggcctgctgggttcaggtcacacgggggacggcgagggggtggagagtagatagagctgcagcttaggtcgagtgcaggggcagggagacagggggtggtggagctctgtgggattgaggactgccctaaggggtgcccaggctcctcatgggggcacctgcaccttcttcttgactcttaagagaaaggaagggagagagaaaaggcccagagtcagaggaaaggactcaggagaatgaatgaacgaatcaatctccatctcatccgcaaggagaagggtgaggaggaagaggagttggggtaagtattttaaaagttccctctcttcattatagcagttagagctcttcacaccctcaaaggccctgcctctctacaaagaaaaaagtggaaagcagtgtttcccaaactcagttgcccacaaaacttgtcttttcaagagaagctgatcaatgcctgaggaacacggagcgccctgaagcaccaccttggaaacgctgggtcaggcattggcctctggttttgaaatagaattcatgggctactgaatctggaaatggccttggagataagctagctgcccccacattctataggtggggaaactgaggcctagagagggtagaaagtggctgaggcaaccctgtgccccacagccctgcggggatttgactgccccacccctgcttggccgtggaggacctcggccatgccagggttccgggtttctctgcaggtctctcatcaaactctgggctcctcaaagccaggtctggcgtccaccaccacctccctaccccagctcctggcctagcgccctgcacagagggtacgttcacaaaagttcaccacagcgtgagaggttcagggagacaccaggaagggctttctggcagctgggcttagatgacaggaacgagcagctctgagggcttctaagaaaagggcagaggccaactgccccgaggcagccctgggcactggccccagcttccttgttcccggagtgggcgggcttgggagggcaaggaggacacaagccccaggagctgccttcctggcccaggtccgtgaccctcagcttggaccaaaaacaagggccagcgagaacccttgtcaagacaggcttggaatgccgtcctcccctccgccacccccacccatgctcaggcttccacctccaggaagccgctccggtccaccccagccttccccatctttttctctcaactcgggtgacacgtccactcagggaagattccctgaagttatgctggggcctggaggagctgagaccaagaggaaggcatgtccctgccctcaggggggccctcccaggaggaggtggagatcggtctggatgccaggctgtgcagtgagggggtgaggcagctacggagccatcaccctctcctccacggggaaaggaatacaggaaaagaattccaagcgaggcgtgtcccaaagagagggcctctgagatgggctgccagcagcgacgagggggagggaaagcacagagccagtgcaaaggcctcggggaggggtggggggtgtaggtggcaggaagctatgcctggggtctggcgtggcagagcagagtggtcagaggctgggctagggggaaactatgggtaccaggccgggcccttccatcattagctgcgtgagctcgggctcatcactgaacgtctttgagcctcagtttccttcccagaaggagaataaggacggcacctgagtagggagagctgttgaggctcccaggacaggggtgtccacggtggggccggcccagggggctctggaagtgtggtcttcactgtcgaggggccaccggcaggggaggcccacccatgaagcacttgtcacaccgctctggtctgactctgggattcaacaggcagattacaaactcctgactctaatctgcggtcgctgctctgtaaacatctgtgcacctgaactgaagtcaacagcacccccacctccctgtctctaaacttattttttctagttatcatttattgagcacttactctgcaccttggacagcaaggagatcaaatcagccaatcctaaaggaaatcaaccctgaatattcattggaaggacggatgctgaagctgaagctccaatactttggtcacctgatgtgaagagctgactcattggaaaagaccctgatggtgggaaagattgaaagcaggagaaggggatgacagaggatgagatacttggatggcatcaccgacttgatggacatgagtttgagcaagctctaggagatggtgatggacagggaagccaggcgttcatgggtcgcaaagagtcggacacaactcagcgactcaacaacaactctgcaccaaacattcagagtgtgtgtattctttttgtttgttttttattttggccgcgcagcgtgacttgtggaatcttagttcctcaaacagggattgaacccaagacttcgacagtgaaatagccacgttctaaccactggcctgccagggaattccttgcatactcttttttttttttaacactttttctattcatttaattttgtatcttaaaagatgatgaatattcataaagctcaactgtaataatcatttcctgatgtatgtaagtcaaatcattatgctatacaccttaaacttatacagtgctgtatgtcaattagatttcagtaaaactggaagaaaaaaaattttttaatgaacatttaacctagtcaaaaagttctgtgcctgtgtattcttatttaattctcccatccacttgggatatagtgatatataaaatgctcaacatcttatacaagcagaaaccaagtgtgagaggttaacagcataatctgcccaaggccatatgacacgagtggcagggtttcctgactccaagaccagtgctctttccactgtacccgaaccctggaagaacatgtctgaccagaggtaagggacctcccaccgcccgcctccctccccaccaaacactctcccagactaagcttctgtctgtgagtattgtacccttgaccctgacctgtgcccctcagcctttccccttcccaagcacagcccctcccccaccacaccccacagctccccaaacaccccagggtcactgcggctctggcctccagctcaggggtccagagcccagccccctcccttctctggggagattttgggttctgcagggggtcaccacagcctcagggttccaaaaaccccagtcagggagagcaaggcctcccagggcgctgcaaaaagcaaacacttctgaatcccatgcccagaaattcagaattagccagtctgtaggggacccaggcttcagtgtttctttaaggcgccacagtgaccctaaaagttcagcaaaatttagaagcaatgctcgaggtgattgctgggagctggtcagaaagtgggagcagggcacaggcctgaggaaggagtgagaggacaagctgaaccatgcgggtctcatcctcatggtgcctggagctgaacagcagatttccccatcacatctcacctggggatctgggaggcaggtggggggatgtaaccaatgccccaggggacagatgagggactgggaccttccacaaagctggaccagtgcccccagaagaggactcgggagctaaagggttaagggtcacggccaacccaaagcagctccaccaggcagagtcatcagtgggctttacatctgatggacagaatttcatttgctctcttcctctcaggggcccatctcaggaataaatctgggaccagctccacagaacccaggttggatcccagaaaaaccctgccggtcctgaaaggcctccgcccagagaagccagcctgaaccttaccattataccctcccttctggggaaagagaaaaggctccagagttccccagcaccacacctctcccaggatgggtatacgtgggattgggggctggggtgtggtaaggggtcaccagcattcctgggggagggtcaggaatgagagggcaaggacccctcccatctccagcagagaaaagagcagaagggggcgctggccaccaggccggttctgccaaggacagaggccccgtgtcctcgtcgtcctcctccaggaaccctccccatctccaaaccccctgctctccagggatgaaccttcccctgctggagaaagctgggccccagggacctggaacagatggaggagatcaagacttgccagcatggcgggcagtgtgttcccagcacagtctgcacccccatccacagccctgggcatctgacagcactcgcccccccgccccgcacccctgcaggcccaccttcctcacccagcacctctcagcagagagcccagcacagcacttggaaacaggaagagagggagagacagagacagagggaggggaagagagaagactcttctgtccagcctggcttctctgcagacccagagcgcccaccgccacccccacccccatcctggcacagctgggccaaggaggggggagcggtaagggaggaggcaggcagtcaaaaggggagtcgtgggaccccacacctggcttcttaccctctgtaactacccctccccgccccagggggggtctcaggccgagtcagggatgccacagacaccacacctcctcaagaggaggaaccaagggctggaagggtgagcagggacccaccgggatcgagggatgccaggcaagcgggcggcagacgggccgcagcgggtgtcggagactgccgcgggcagccggacacgaccaacgggatgctcgtccctccgtccctctgtccgtccagggcggctcctctctgggcggctctgaggccaggcgggcgctgttaaaaagctttttatgtgtgtgtgtgttaatcacatgattgccgttcacctgtatttcgaacaaagacagctcactgtttcaaggccccgaacaagagtctgggcacagggaagagaagggaggcggggggaggagggttggcagcgccgggggtggcgtcgaggaaaactggggggagattgtccaaggccgggagcgggagaaagagaaaacccttatcaaactcctaattcactgggctccgaggccccagacacactggcccgattgtctggctggttgtgtgtgcgagcgtgtgtgtgtgtgtgtgtgttccagtgtccgctccccccacccccaacatgccttcgcctcgtgtgactacctcattgtgtcccattacccaccccctccaacccccttggcctttcccaggcacaaggcctcgcctggaccccctttccagccccgctccagacgcgactccctagggctgggccccgggcctcgcccagccgctgaggagctcagaaccgtccatggtcatcatcgcggcgccggctccgtctgtcctcctcacatacccaacctccgcctcagcacccacctttagagacgagagaggggctgtggtcttagaggcctgtgaaagccttagacgatgggcaggacagaaaaatgaaggagtcaccctgctggagcagtggggtcgagtggagaagtgggcggagaggaagacgacccctcaccctttctcccggtgggggagtggggggtgtcttgacaaccaggactggactcccccaccagggtggggggagttgggtcccaggaaatggggccccagaagcttttcagatctgcttgaagaggaccccagcccagcgggggcccaggctcctgcacaatttagtctgtctctcttgagccaagccaggccttgcggtgctgggtgtccggtgagaggagactgggggagaagccggggcatctgtcctgggcagggggtatccagctgcaccccgcttcaccaggtatggacctgtaatcttcctctcctgctgtctgagaaagaggacagctgggtggggggtaggaggcggggtgagacaggctggcacgcagtaagaggtcttaagtgaagcaacaccggccagtgccaccccccatgtgacagaacggtcacctgccttctcctctgccagctgcccattccgacacctgagacagaggttgggggtcccaggtgggcccaatttccccccaagggacacgttgtgaccctgcccacctgcctccactggctttcctggcctgaccacccccactcctacaccttcccaggatgggcctgggggcagccagcagcgcagggagctggggtggggggtgggggggctggcggaggagcccagagtgttggggatgaaggaaagcgctggaggctccaccttctgccctcccctccctcccctccccctccccctctcccccctccttccttccccagccctcggcagcagctcagcgctcagtcagtctcaggctgtccggccagggtggttggtggtgaggattcgggctccgtcctgacaaggcccgtggcctgaggttcgggggcccccagcccctcccaaccagcccaccagcgtcccccacccccagcccccgagctggaccgcacaccttgggacacggttttccacttcctcaggacgagccctagactggaggagaggtccgaggaggtgagtgagtgcgcagcccgctcctcccttcccggggcccaggcctgagaccctgcggtcgggcgtggggcggagagaagctgacccccgcgcgcccccagcccagttcctcttctagtcccccccgtcggggccaggcggaagggaagaaggaaaggtgagcgaaaaggtgggaaattccaggagccaggattagagcagaagaaagagtccgtttttcttcctttccatcaacaaacctccacccaagaggaggtttttaaaaaaaaaaaaaaaaaaaaaacccgaacccacccacagcaaaaggcggttgggaccaggtgggggtaggacacggaggcgggagctaagaggccgagccccggtctggcatgtgcgggggcccacggggctgcggtgggtttaggggcagcctgccggccccaccttgggactgtgcctgagtcgcgtgccgggccgccgtcggggctgcgcgcacgccgcccatcacgccctccttcccaccgtccaggtgagcgttggactcttcgccaggaccccggcggcgggccccggggaggcggccgaggcggcggcggcggcggcggccgggggcgacatggcagaggagcaggacctgtccgaggtggagctgagccccgtgggctccgaggagccgcgctgcctgtccccggggagcgcgccctcgctggggcccgacggcggcggcggcggcggcggctcgggcctgcgagctagcccggggcccggggagctgggcaaggtcaagaaggaacagcaggacggcgaggcggacgatgacaaattccccgtgtgcatccgcgaggccgtcagccaggtgctcagcggctacgactggactctggtgcccatgccggtgcgcgtcaacggcgccagcaagagcaagccgcacgtcaagcggcccatgaacgccttcatggtgtgggcgcaggcggcgcgcaggaagctggccgaccagtatccgcacctgcacaacgccgagctcagcaagacgctgggcaagctctggaggtgagcgccccgacccgcctccggggagctcccgccgggccctctacccgggccctctacccgcggggggaatggggagaggcgctcacggcctgggcccttctcctggggcagccgtctccttgatgggactggatggccagctgagggcatcgggctcgcccttccgccagtacccccttggggttgcgctcgcgctggtctccagcggcctaggccccgctccccagccggggcactgggctggaaggcgccccctcgcggttggaattctgcccgtggcaggagctggggcctgggcttctgggccgggtgggcgagagtgaaggtggaaaggagggaaggctggtggaggcatccacaccgtagtcgtccactaaccgcatttccgcaggtgccactcaagggtgccactgccccggggtcaagggggatgcgagggaaacgtctgggaaagaactgaaagcctggctggagaggcagggaaactgaggcaggcagtggagaactgcaaggctgagatgggggcagacaaggaattcaggtccaggtctttgaaagggtgagggatggaggccaagccgaccgctgcaggcccctgtcctaccccagcctcctcctctgagcccttctgagctctttcagacccagggcttcttcatctccccaggaaaggggacccatggagaggagactccccctcccaccgggtcccagagctgccaggctggtctcttcccctccctccctctcccagtccaggcgccatcttcctttccagggccccacccaggattgagtaacctcctacccctccagccctggagctgacagccctggccaggagcaaaggctggcccctttcctacccagagtccctcagagtcccaggttctctggaagcagctcagactttgggggaaaaacatgcccctgagaaggaagtcggcctcacctctggtctggggtttaggctgctcccttttgaataccttgttgaccagggcaatgccaccgccccctccccaagaagtcctgggcagctcagaaagagaacaggggctccagaaggtgagagtctgcagaggttacctgattccccgccagactgtccatgagataggcccaggaaggcagagggcccacccaggccatgtaacagctggtggtagagccagggccagaaccaggtctcctgacgcttcagccagtggtcttcccacacaccatcctcggtgacagaagtgggtcaccctcccctctaagacacgatctggaggttgtgcggtgagggcagaggagagcaggaatgaggagcatccgagctgcagaaagtgtcaggggagcccgccacccctccccttgccagccccaacacactggagcttggcctagaaggccaaaggcttaaggtggtggaaggagcaggaaagcccccaagagaccaagaggaattcgcatccagccccctgggcctggccctggccatgtgtttgctaaaggcctggtgcttcttcccctccccgttcaacactcggttcaccccagcaggccctgggctcagtggtcaaactgctgcgttgactcagagggtctagcctttcccaggatcagaggtcaaagccagctcctctgcccaaggtccatccacatcgtggcagggttcagcccaagccaggacccttggtgccatgggacagagatgagcaagtgagagacagacaaccaggagggaggcagacaggcagacagaacaggccctggggaccatgagcagaccacagtgtaagcccagtaagagcatcaaagcaagaatggaccacccccctcccatctctcccccacgctgttgccaaggatttaaggttggaccctccattgtccctgtctgtccctgctcccccagcccagaacccaacgttgggctccctcagagggacttgttcctgaccacccctcacctcaggctgtgtgcacaggggccaacctgagtgtgggttggggggcaaccaggaaagcaggcactgcttactcaggacccaccccagcagtgggagggtgaccagacagtgacaaggatcaaaggctatgccaacagggagtgggctgcttggatcctgggtggggaccctggagacctctggactgcgttaagctagcccacctctccaggagcttctcctgaaatctgcgcgccccgcccctccaccgtctcatgaatctcaggctatcaagaagggggatggctagctgggcagaactggcaatcagaggccctatacctgaaaagagaaagacaggcagattgtgtgggacgctggaagggggtcagtcagacacaccagcgtccaggccctggctcgcaagtggctaggggagtgtgccaactgctaaccttcagtgccctcccaggaaaggcctgttagatgttgagctcatcgtgctgggggttcggtgtattgattgaccctcctggggaggataattagagccaagagacaggaaaggtggggtcacaggctggaacctcccaggacccttaggtgagcgcccacgggagcagggggagcagaaccagtgtgtcctagcgtggaagcccccccgcccccgccagttggggatttcagttcgggtggggagtcagcccaccccttccctctccgtttcagaccttggacccagaggtgaaaagcaaacaagcgttgtagttagagctgtggtgagcgagggctagcgctggagtcaagatgaaatttgggattgggtttctgtggtgggggaggacggatttaagagccttaacagagctgaagctgaaggtctgggcgaggctggggttgggtttgggggtaaggttggcgttgggctcaagttaggactggggttggggctggcagaccccacccccacccccaggtaggtttctctccaagttagggtgctggtgggaactagcgctgggaggcgccgatgggtgcaagttggagtctcccctctcttctagcctgtgcccccgctcacactccgtgccccctgccattttcttgcggattcacatccggttgccagtgggcagagggcacggggaaggtttgaggtgggagagggagtgcagggtcccctgctatcctaggagcctatgtgccggggccatggctggttgaggcaccccacgtgccacctctcctcaccaggcacccacctttgggcctgccccacctaccctaggctggctgggggcggggggagagggtgcagctagggtgagaagggctgcatcccactcccagcccctgatggtctgcggtccccatcccgtcactcagctagaggggcccttggagagagctgggctgggctgggctgggctgggccacggcccggggggagggcagccgagcaggctaagctggagaggaatgccgctgcccgctaggaggtgcctggtatgaccaccccctcccatcctgggcagggagggccccgccttctcctgactgggtgaagagggcgcccacgggggaggggggtataggggcagctggagagagaggccctttgggctaaaggacagagctgcttctggagagtcccttaagtctggggatctgggaatcttccccctgagcccctcttcgaagcatccttcctgccttcctcaccaggggtagcccagccctgagcttccctgcggccccagccctggctggagtcaggtgggtgggcgtacagtctgcagggtctgcgttccactggctgggctcagactgggaagagggtctgaatgcccccatccagggtcttggaagataggagcttcctttaccttcttgcactccctcaacaaggagatacgatcgccccttgaggtgggggtccgtgcatagtgaggggcacacgcatcctgcccaccgcggccccaccatgctggaattcacaaaaatgactccagagtcgaggggttccaccgcaggtcctcttgcccaccacctcgcaggcggcgttagaaccgcacctgtttctcggggtgctgcccccaacccccaatccccagtcccaggccccatgcacagggtttcacagccattatcttggccactcccatgcctggaagtaggtgttacccttgttctataggtgaagaaactaaagctcagagaagtgacttgcccacggtcacacagctaggaagtagcagacactgggctcttccccctcaccgtgctgctcctgtttgcacatctccagtcccagggagctcaccccctaacaaggcagccagctccacttgcagacagctttgaagaaagagtttttggtggctcagacggcagagcgtctgcctgcaatgtgggagacccaggttcaatccctgggtggagaagatctcctggagaaggaaatggcaacccactccagtattcttgcctggaaaatcccgtggacggaggaacctggtaggctacagcccgtggggtcgcaaagagtcggacacactaagcgacttcactttcacttttcaaactgaaggaagctctattgtaagctctagtctaaccccatccgcaggggctgcctggagcggcaggctggttcttctctcacaccccagcccgagaggtttgggggcagggatggctgccctcggaggctgtggtgccttgggctcacatcctccagtccctaggccaggcagcacgactaccacccgggaccctgcccgccaggctcccccagcccccaagccttgtttcttccagggcaggcgctcacggtggcccttctgctgtctcccccaccccaaccaccccaccccaggctgctgaatgagagcgacaagcgccccttcattgaggaggccgagcggctgcggatgcagcacaagaaggaccacccagattacaagtaccagccgcggagacggaagaacgggaaggcggcccagggagagtcggagtgcccgggcggggaggctgagcagggcggcgcggccgccattcaggcccactacaagagcgcccacctggaccaccggcacccgggcgagggctccccgatgtcagacggaaaccctgagcacccttcgggtgagcctggggctgggagctcgggtgggaggaggctgtgggcagcggggagaggcaaagactggaggaggacttgagacctgaggctctgggaagggctggctgggctgagttgtggcccagctgggcttcaggggcccagtggcagttcagagggggttcaggggtcaggggaggcggctgggcaagagggctgtggtcaggactgctaggaggggcattggtttggggtgaagagacccgtgaaggaggccggtgggccagttacaccagagaaaggtgggacaggacgattctgagaaacaggagggcagacagaggacagcgcgtggcctctcctccacctccccgtctgacgggggagacacggcatgtgacattgagcacgtggcatggaggagccagacgcagggcgtcctgtttcattctcgttggcgatgagcgcagctaacggtaactgagtgcttgtgctgggcaccacgctgcttgctttgtgtgtgttaactcgctcagtcatctacactgtgatgaggcagccgctgcctgcactcagacctcagctgtgtggcaaatcactcccatgctacagagtagactctacagaaaactgagggtaacttgtcctgtagatgagggctccagggcctctgctggcaccatagctacgtcccttgtgcttgtagcttacaggacaccgtgcttggggccaggctcctggccagtgtcagtgagcagagctctgccttcagaagacacactccgagtcctttgtgccagacctggaagcagacaccaggcgtccaaacgagacgccagggtccctggagcctcctgtcgccccccatggtccctggtccctcaggagcccacattctatagagggatgagcagtgatgaaagcacatgaattaagtacaggaagaatcaagggcacgtgaagcccatgaagacccagagggagcgtgacctctggggaggagtcaccccctgtccacccagtcagtctccaaaaatatccagctgccagtctctggtcaaggaaagcctccagaaggaagccatgttctcaactgcttggtatcatctctgttttactgataaggaaactgataagagaagatagggggtctgcccagggtcacacagtaagtgacagagcgagaattcaaactcaaagtccagacgctttggccagcacaggactcagcactgcctctggtctgatggaggaggcacaggcctgccctcaaggagcgcctggcttgctagaccatgaacacggtctctgtccgacgggatcccccatccagccatccctccctcacactcctttggagattcaggagtacacacacacaagaccctggatcgtgtacagagccagctcactttattactgtgggcctggctttctcttccccataaacagcccagctactcctcctccccaagcccttccccacatccccagggcagggtaagcggtatcctccactggtctcctgagcccttcacccatccctcaccatagcacctgtgatgctgccctccagccctgggtggatccctggatcccctaccccaagaccaggagcttgtgcagacaggaaccatttgacttctttgtattcccctatgcctggcaaccgtgcctggagcttagcggtgccccctaagtgtttgctgaatggacctgggaaggggcaaacggacagacaaaggaacgggtagcacaggtcactcatgtcagtactttcctggatgggcagggagaaggcagctggagggatagtggggccatgcagtgtgtgatgggaactgagagcgtggtcgggggtgctgggtgggagggaaggtttccttgaataaagggcacttgaggtggccttgggtggagggatggggtgggaggtgatgcatcgccatttggggcctggggtggtggtggtgtgcagacgagccagccaaagtgataagggcttgagaggtgagcagggcgggcaaccagcagaggccgagtgtgcttaagagagcggacaagctggggcctacaggccagactgcatcgggctgcacagctgaggagcgcagggagggcagccgacttcagctggtgtgaggaagacccttccaatggggacaatggaacttgctcaaaatgaagcaggcctctccgggaggggtcgggggcgagagaggggagtcctatcctggtaggagaaaagactcattcctaggactgaggaatttcataaatgactggacatcaacctaagatcattacatagccaaacgccaccgcaggccaccccaaacacgttaaaacgaacaaggccgagctgtgatgggtccttagcctcccggaggcattgcatctgaaaagtgaaccatcagcctctgaccttagttcctgcttcctctctctctctgtctgtgtctcccttcgccctctaggccagagccatggcccgcccacccctccgaccaccccaaagacagagctgcagtcgggcaaggcagaccccaagcgggatgggcgctccttgggggagggcgggaagcctcacatcgacttcggcaacgtggacatcggcgagatcagccatgaggtaatgtccaacatggagaccttcgacgtggccgagttggaccagtacctgccgcccaacgggcacccgggccacgtgggcggctactcagcagctggctacgggctgggcagtgccctggctgtggccagcggacactctgcctggatctccaagcctccaggcgtggctctgcccacggtctcgccacctggcgtggacgccaaagcccaggtgaagacggagaccgcggggccccaggggcccccgcactacgccgaccagccgtccacctcgcagatcgcctacacctccctcagtctgccccactacggctccgccttcccctctatctcccgcccccagtttgactactctgaccatcagccctcaggaccctattacggccactcgggccagacctccggcctctactcggccttctcctacatggggccctcacagcggcccctctacacggccatctctgaccccagcccctcagggccccagtcccatagccccacacactgggagcagccggtatatacgacgctgtcccggccatagggggccccccgacccccgtcaccacccgtcttgccctgccccctcccccagccctcgcgccctgttcctcgcccatctcaggcccggtggcggcagaggaggaggccgcagaggctgacagctgaggggaaggccttctgtctggctcactgcctttgatgacccaccccgtcctacccaggctctggcccaggcgcagccccgggctactcggctgggcagaggagaaggaggtagcttgttgcccctaaactgaaaaatgaggggctgtaccttcccccccaggaatgaccctcgatcccaggatctgagcaggccccgcccaccctcctctgggagggtgaagcacccagggtcggtcggatgggaatcggaggcctagccactcctgtgcctgtgtttcctcttccgcgaggaatagggggtctgacctaacccgtgcacccaggccacgtgtcttaagagcagggccaaccagaaacctgcgtcagggactactg

SEQ ID NO: 116 - DNA, 19836 bp, Hippotragus equinus
  source 1..19836: mol_type = genomic DNA
gagtggtctggaaagcaggcctgcaggcgacccgggactcaagcttccacttactcggtccgcgccgcttgtccctcggcggataacctccgccttccctctcgcagccggagaccgagcgggacccggaggcggggccgcgcggggccttgtaggccgcgccgggaagtacgggcagagagcgcgggaaacgcggcggcgcgcgagggacgccgctgctgcggggcgggggttatgcagcccggcaggccgatcgagcctcggctctccgatgcgagcgcggtcgggtcaggcagaccggtctcgcagggccccgccaacttagaaggccgacgcgacccgatgagactggttcacccacagtcccggctgtcctcgggaggagaggggggcgagtttattctagagtctctgaaaaccgaggttcccagcctcttcacacactcgcgcgctcccgggttagaagctcaagatcttggattttaaaacacctttctccccgagtcgtgtccggcggagggtctgcctggccgcgctcccctctccttttaagtgcgcatcaagtggcaggttggtgtggtggtggtggtttatctaagtgaataactgaatcatgttggcgagttgacgggagcaacacgttcagagtgccctagtgatttggaggcactcgcggccgtaccctccgcaggctggggaggcaatcgccctccgatatggcgcgggctgctcccatccgagccccgcttggccggcactcggtcgcccgcccgcgcgcccgcagagggttcccagagccagcccgtgccggaggctgtccgagtccgacttctttccgtgtggagtggtggagcggccagttagtgaatgatggattgcctacgagagggaggctaattttcacgatagctgatggctaaagcaccgacactgtgccatccctgtgaaactcgtggtttgtatggtcatcggttcgctggaacacccagaccctgatcatgcgtacagtgtttccttctaaaaagcactcgccaatttaaaaccaggtcccgagtgcccctcttgctaatcccctctgccactaagtccaattaaatcctctcttttttcaaatctcttctctttcctcctttcttccttcccttccttctttttcttctttcctttcctccctccctccctctatctgagtcgttcttgctgaatacagcctggtctggtggtgggggtgcaatatacccactccacatctccccagtagggctttctgcttgtagagttggagagctcatttggccccaaagcacttttgaatagtgaagtttccaattcagaggcacctatacacgcccctaaatagtgcacacgtattccccacccacccccacctccgtcagaaagccggtcctgtaacttagagtcgtttttgtggtgtgtgcttgctccaacgaggggagctgaccagtcaaattagtttgtggatacagaaaggttattttgctttttgtttttttacgcagttttccaattgaaggcaactggttcttgattccctcacctcctgaggcagttagtcactttcccttcatcgtcactcactccacattttagtcagtctgaagtctccccgcatgtcagatatggattgcattacagctttttagacaaattttggaggcttacctacaaaactgtcctcctatccttaaccagagagagagtgaggccacctgagagattttaaacttccttttgactgggattgaatagattcagttgataaaatgtgtaaggtttactcacctttagacacctcagggtactcactgatgccttcctagcttacagacacattcagtcccaaacccctcccttggtggaaaaaggacaagcagttcagattcatctttcagttcattatgaaaaggaaaatagctttcagcaggttgggacctcctttataaattttgacattcaaaaaaatatgacaagggaagcaggaagagaccattcctttattctagtggattacttttgtaatgcaaagttatgaaaccctggaataaacattttacatttgccctctcccactccaccttagttgaaggaggtgtttctactactgactttcagttttgcataatgcccggtacacacaccttgctcttggtgaagaaagtaacactcctcagcctattctattaaaggttgctcttgatttacactctccacttgcttgcttccccaaaatgcacttatacaggcacatttttcttgatccagagcatgcagagatgtacataacttttttagtattgccttgactttcattcctttcaaactgatattaagatgttcatcctgagacataaaattgaatttttgagaaacagccatgtggaatactgtttaattttccgttttattgtttgtgtttttcaagttttgcaggaaaggctttaattagtgtctaagtaatagtctccaagaattccttattagattatttcagaccatttgtaaacaaataacattacagtttccaaaagggaaagtagaagctaagatcagttctatcaagagattcatttgagtattcatcttttattttgaatggtttgtaggaagaaagggaggactgaatgaagcagggggcaagagaacccaatgaaaacttgtttttaaaactaaagccatttccccagactattgtcttgccacaagtgacaatacacagaacagaagtcatgaaagtggattactgtcactttggactattggaggcccagagagccctggcattaattcctatagaaaggtagaggaatctagccatcttctcctgcacttctcctgcagcaccctcattgccttagggttcagggctcaaagctgatacagacctcagcagagtctaggtgtcagggctccccctgtgaggggaagcagatgttctctgtggaaccgaggaggaaacagggtggttataagaaccctgagggcatggggcactgtagcaggagggctgtggccaacagtccccttgcaggatagcaatccatgagtcaaagctaactaatagtaaatgaaagagagcctagagtaggaccctttggatgctaaagactaccctctaatttgttctagtcctccccctgggatcccatcctaggttttctgtgattggagatctacctagagaagaagggaagcatagtaggaaaacatgcctaacccctgtccaacatgcatgcacgggtggagcttgcagagatcagcagacacatctcaagtcctcagtgatctgtgtgactggcttgtgcagttatgcatggccaacagggggtgggggttcgcagggaggaaagcctgttcccccccaccccccgcagttactctgtttggggctggtgtgtttcctcttcccccaaccctccacctcaccccatcagaacgaaagagaattgaaactccattgcctttgcctgcactgagcctaaaaactcagaatttgataaggttactgcaccattgatacaattgcagatttttttaaagcttcctcaaagagacagatgtttgggctgattaagaatcgaggaggaaacctgcagctgcaccaaggaataatctattggacaaatattttaataaaaaatatgaagagatcagcccgaccttgcaaggtcttctgctttaaaaaaatctttatcaaacccctattctatggcttcaataaacagaacccattacctcacggcatcttttgttggccccatacaagagagaacaaaatggttattcaggggaacgctttcgatttttattgtgggtagcctgcacaaagagccgtgttattgtatttaaaagaaccatctgtagcagaaacaatggcatcaaattatctttgaatacccactgaaaaaacataaagcttttttttttattcttcttctgtacggtggggggatagagcagtgttaggataactgacttttttgttgttctctgggtgcattcttctcgctccccctctctctccccctcaccctctctctcctctctctctccctctccctctctctctctctcttttaaaaaatcagccatttggggttttaagccataaacgatttttcttgttgcaggggattgcagtggcaaagctaggctaggtcttggaggctggtgtaaggcaaagcgggtgaaggcaggaggctgatggagagactggggggaagaaaagccgaaatggattcatggtgccttggatggaggacgagaggagaattgcaagctccttcaactcgttctgtccggtgagaagtgatcaagcttgggctgacaagaggctcagggaaccctcacgttcttttgcttttttacctgccaatcaaactgctacaagacaacaccctgatctggcatggacatgtaagtagcttgcaacccaactttgacattcactgctagctcactcctctccgcccaccccccccccaactcactcttcctctcattctttttttttttcttttgacctttaagagatctggaaatacactctatgtggcagtcattttacacagatttaagtctgaaagcgttaacttttggaattaaacactaattttgatttctttaacaaatgcagaaatgaaattacattattttattctcttctgagcagttttagcattgaacataatcagttgccttgcctggtgtgtgtgtttccttttctatgaaaatgaagaaatctgtgagcacccagagagaaatgcagaaatgaaaaattcaggcttccatttcaaaaatattaaattctaacatttcatctctaccaagaaccttctccatacctagattacacagagtagaaagagtgatttgagtcaaaaggtatatatcattaaggggctgctactgttttatctggcatcttactattttggtggtggctgaagggaagggtgtgaaaagagaaggaaagggacatggcgacaccttgttctttatgagagattgacactgaggaggctagaaaagcaagagggcaggataagccggaaatattacctgagagaaggaattacagagcatggcgaagctgaaagctaggagggcttctgtgggaagttgtgcgaaggggtgatagggcttgctctctggtgccctctaatggcaatttaaaccaacgtttactttctcaattctacacagaaaagcagctgggtttttgtcgatactgttggtgggctcccccctcccccgcagacttagaaactgtagactatttgtgtaaattaattgttttcatcctggaaacttatgtacgtgccttaaaattatcaatatattctcctcaaacattcgtcctcttccaaaattttgttaagagtaatagaaaaggaaaggctaatggcaaactgacttatggagggtggcccatgcccaattagtaattcgggggaaaagatttctttcccacctgaacaacattctgactctcttaccacagtcgagaaatgcagcgggctggggtgaggagggaagatttggaaactgcagattctgacacaggttcattataatacaattttaaggggtctctcttaggaacctctgttatttcgacatgcggtggtaagggggctttccttcccgcctcctttttctttttcttctttctttcgttcctttttttcctttttttcccccctaaatttggtagataaaggttaatcttgggctgaatgatagaactatgattgacaagagaaaaggtgttgagggcaggtcgcgctgtcttatttacagcccactgcttgctgtagagtctttgttaggactggaaagctaatttagtgctgatcaaaagcaccacagagttaaaggactggtaatgactgctaatttcatttcagcctcatgcatccccaactgctgtaattaaagacacgctatttaaatacaggtgaagggtttttttttttttaagttagggtgggggtgggtggattacaattttatttagatttcatcttacacttgggcgttatgtagtccaaatcaaaaaaaattttttagagtcgcttcttgtcatttatatctggctttgcagaatagacaacgtgaaatgtgtcaatcacataaaagtccctatttaaagaaagaaaatgggtaaaaaaggatgcagaggagtaactgttttgggggatttaaatatttgggtctcttttttccccttcaaattaatagaagggccttcgaaatagctaaagtatttgaaacttggggcagggtgaacaggccaaagggatcagtgtcagctttttaagtacttctaaaaagatcatgtgaacagatggaaaaatatatttttaattaaataatttccctcacactgtagctgcagtgttggctcagaaaccatgtaattcccccaccgataggagtctctttatatagaacatcaaaggataaaaagctctacattttcgtagttggttaaaattgataaacccccgccacacacacacacacacacacatacacacatacacacacacgcacacatacacacactcgcacacacacacaccccaaaaaagaatttagcctttaatctctttttatccacgaagactaaagctctgtactcgaccccgtgagcggctctcgccttcaggggctagaacccggctcagatgagaagcggcgctgagccgccgcgcaggttcgagcccagcgccccctgttggacacagtcggagctgcacagcgccagtcctggaaatcgctagaaccttgctctggggttaaagataacatgctttattaccgtccaaaaaggagatgggaccaggaaacaagttcttgtatctttgaaaaataatataagtttaattcaaaaaaaactaaaaggagataacacaattttaattcaataaaaaataaagacgaatctattctccctcctcacatcccggcagccacatcctatcccccgtctgggtttggaactctctttaaagattaagcgagagtaaaataggtagagaagcatgactttaaagagagagacaaagaggattttcctctgtagcagtggagaaccaaccaaaagttacctctcccgttctgtacacatttcaaaaaaaaaaaaaaaacgaagatgctgttgcgtgctgtattgacgttgtcaacagcatcttgttgccctaagaggttcttcacatgtagtaacagtgtctgactaaacgaaataacttgcccctttaaaaatttattttcagagtgtaattaaaaagccagtctcttctttgaatgtttccattcccccaggccaatcttgatcaaacttttccttttcctgctcgcacttaaattccaggtattctctaagaaacaagtgcctgatacctctccctctctcttcaccaccccccacccccaccccgagctgtaggattccaggaaagctgtgccggcggtaaagagtattttcttttgaaattcagcattttcattgactaggaatccaaatcatcctaggggaagaggagtatttttttacactttcaaaaactacctgtctacataagaaagagctttgactttttctttggtttgggagtgagggcaaaggtacactttgaaatctttcagaaagataactataaaaatgacacatcctctgaatttaaaacagtggggaaacatgggtttgtttaggtgttagatcaaactgaaacgatgtgtgtgctaaatgaacacacatgatcttagcaagatgtttggtgatatggttcttgaggattgtacttacaattctaacttttagataaaaaccttaagaagtttaacgcttgcttgcttgctttaagtttgcctattgaaggaaactagcttaattttcataatagaattactttaaaaaatatttaatactgtggctacacaagttgtttttaacgttgatcttacctttgttctcacctcccaccgtcagcagatctgagattgtgttttcagggaaattgctgttgggtgagatgagagatgttttctctccctgattccagaatcaaatcttggtttatgtttctcaatacgtgaattcagaaacagtggcagaaagagattcaaggcttttattcagtttttacctggaattctatggaaatgacaggcaagcagccttttccctccccactttccccggccccacactttgcttcactgaaagtctagtccccattacagaaatattaagtctgggcaaactttcatgccaacctcgttaaggtgacaaactgtgctctgacagccgcggtccaaggctgcctaaggagtagggagaccaaaaccagcagaatcttggaggtgaccagaatcttggaggtgaccagctaaagggactagatatatgcttgctgttcagaagtgatgtagaatttgcaaaagcagaggctgagatttctctctctccctccctctctctctctctctctctctctctctctcacacacacacacacacacacacacacacacacacacacacacacgcgcgcgcgcgcgcgcgcgcgtgcttggccccccccctcacttctgccccgcgggggtcccaacctactgggagaagtctagggaaggagctgcccctggctgcaagagggcaagcagtgagcccccaaattcccaggacccagggagaaagcacagccccaagtttaggaaaaagaactgaacaagtgggtggcctaggcctggaaataccacccagctctcccagcacagtgtcattgctgtggtttcaggcggcctcagcccctgcaggaatctcacgccccacgctggcaagcaggaaagcagcctcgcatctttggggcctggggaggaggcagcgactgactccttagtagcaggcaaagccgcaatgctggcaacccgctgcgttttctctgcaggagcaaagtgccctttaggggcggggcgggcatttttggtctcttgtcccagtgtccaggccagagcccgcgtctgttggctgagccccctgctttgtaagtagtcaatcttgtccgtttctgagggcgatccaggaggatgggctggcctagctttgggcccactgggtgccaagtcctcagacccctctcccctccatcccgcacacctttcctggtgaatacaaaccctccttctgaaagccagtatatgaggctcagagtttggtagctatttgggagtgtagaaaatgattattaaaaccaagattataaggatgaaccttcatttattattgtttgctcttttactttgtctttaaactttgaagatctttaagttcacttgatccaaccctgagacagacagggaaccagggagaaagtacagcccagcttggacaggagctgaggtatagacagatactcacctctccaccactcagtgggcagataagtgctgccagaccgtgggtcctaatccggggcccagctgctatgtgggttgctgaagggtgttgaaactacaagtacaacttgacaccactgagcccacagtgcttgtcaataatctgtgaattaggtgcagagattgtcaccatagatcataacagtttctgaaggactcattacagcctatcgtgtcaatgatcttcaaattaaggaggggggtggggcgggaggcaaaaggagtaaggagagcctgcaaaaaggaaagaagtgtgggaagggagataaaagtcagagccccagctccgaaggagcctttaaagattatcaggctagcgatctgagaattccgttgggatggatttggaagcccaacttcatctgagcctaagccaggtctggaagcaggggcgctagggcttgagcagaagtgggcccctgggaaggcagactcttcagacatttcttttgcgagcagaagagctttgggcagagtactccagatgtagaggggaggccttgaagatgacagtccatccagtatgggtgtgcactttcatttacagtgctttccagggctagatgttactgcaaatcttggagcaaagtgggtaacagttttgtttagagctgatggtgattgtacggtgtttgtttgttttttccagtggtttgctttcagtgtattttcatggtaacagcaaagtctttttctttgctagtactcctgtccctcacacataccttaattaagcagatctttcttcccccaacttgctttttggggtgtcagacacctctgccttgtgaggttgttgagttgtcactcttggggaatttgtattatgcctgattgtacttttggaaaggggattttgcaggtaacacaggagcagtgtgcaccatgatatctccaaacggaaggaaattaaaccccactgctatagcttggaagggaccaggctaagggaaagatgttctctccgcttggtgggctgccggtgaaggctgtggggagcccagcccacactttggtgtcatttatgagtcatttaatatggtctagagaaactttaaggaggacttagatttgtttttcacataaaagttgtggtcatagtcaactgaaataatcacatttggagaatctgagacaatcgtctttttcccaaaataggggcaacaatcctagtcactggaacatcaggattctaaggaaaccctgttcctttggtatgattaattgcatgagatagtatggtcaatcagggagatacatatttagactcagaagcaatgatttagaggtgggaaaaggcccgtgtgttttctgggccatttgcagttcttggtgatctatatgctgattttttttttcatctgcttctcctaaatttaatatcaaaatcagaggttctttttttttttcagtgcaaatgaaaactggaggcagctatttacttatttttaattaaactttttatgttgtattggaatatagctgatttacaatgttgcaatagtgtcaggtgcacagcaaagggattcagccacacacatacctgtatccattctcccctagaatggtagcctttacattttcagtttgtctttttaaaaagagaatttctattttaataattagattatttaatggccacactgaatttttccctgaacaatagctgcagtacagagactgaatcctatgttaaaattgcttgataattcaggagtagaaatgaaatagtgttaaatattttccagaaaatatttaagctggaatgtacagggatatgtgtgtgtatatatatatactataagcaatatgattattattatctacaaccctaaagacatacacaagtgattatatataattctgttgctgtaatttgaaaggggaaatatatttagttttataacaattgagttattttaaaaatgtatttatttcatcagtgggaattagatgaaagaaatgagtataaaaaggaactgaatgcagagtagccctgcattccttaggtttcaagggtccttacagctcttgagtgaaattatttggtgaaattgggtctggactgaaatagcatttgttatccccttattcatttgttatgtgtaataccacttctgaaaattaaatgcaaggtgctgaagggacagacaagaagaaaaaaatatgattaagcaatttaaaattgtcactctatcatgcatccacatgcatatctatgccttagtaaataaaaaggggtagaggtatatgctagtcttttgtatcagctataaacatttattgtttctgttgctgtcagtaatcctccacacttccaaaacctgccaagtttgccaataggaagaaaatgggggaaatacagatgaaagtttttatcattttggaaattgctttataaaaattgaagtatccccctcttggatttccttcctgtgagggaccctttcacaacctaaagcaaatgaagtttggtaacaggacaattctattctaatttttgctcttcctttcagcattctaactttttccagactattctttatcgatgttctggggaaatatatggtgctttttttaaggaaaaaaaaatcctctaatacgtttctttctttaccttcattttgtttgataaatgtttgtttgataaatcttggagaatcaagtgttgatcattttgaaagtcttgtggcatgatccagtttggagtgactgaggttttttgcagtttggaagggggaaggaagcattttaaaaattgacttataccagtttccttactttataattctaagttttcttttttcttgcgttgggagctaaatgtcaataaaatctcatcttaccagactgcaccaacgttgtcccaaacactgaaaatcttcctttatttttggcttttaaagtcaggaactttccttgggttgccgtacttctctttttagttgtattcgcttcttacttcccacactgctggtatgatctctttcactccagtatgatcactgctatggtcactttccctggagctggttagaaggttaggattcgaaggaaacatgatttaaaagaagaagaagaaaaaaaaaacaccccttcatttggccaaatctagctcctaatatatttaaccagttccagaattagaaatcctttctgtacattttcttctatttttctctctttttttcccttacataatgaaattaaaacttttggaacccacagttgacatttttcagaaaattgagttatcaaggcagtaattatttcacggggagataaaactctcatagccctaactgtcaaatagggcccttttcagattttaattacaaaataaaattagtctgctcttcctcggaatggtttgtgagtggttaaacagagctttccccccaatactggtggtcgtcaaactctgctaattagcaatgctgagaaattccagttaacaaggacattctccaagactctgcaggttccctgccgtttgccttcatttccataagaagattaagagaggaggggaacacactcaaatgcagatgcagaaaagaagcgttttttaacaagcatcataatagtaagatgcctggctagttctcacctaattactgcaagttaaacctctatttgccactaaggagaaaaaataagtctacagtcccccatctccacaaaattgttagttggcttcagatataacacttgaggagggatgcgggagttcaggagggaaatatgaatgcaaaagatttaaaaagaaaactgagttacacttaatcagttaaggatttggagttggggcctataataaaacaaaatcgaatcaaaatatcctgggcattaaggattcttaatttttaagcttactctgaaagtgtgcagctttttggtacccaaggaagggaaatgttacactatctttagattaagcactttcacattttcataaactgtgccagtggcaacattttaaattctcagaggatgaagcaccctcttccaagtcttattttgattcctcagtagtcaatggtgtattgttattagtactgtagccgtctgttagaagcctaaagccgggctgcttctgtcatctattatgattgttatagttattattatatttaggacccagtgatggtgctggattgaaatagagtggccggtgatctgatttttttaatgcgtatgttctaaaaaatctaatgagaaaattgtttctgctatcaccatcttctttaatcttattttcatagcacattattatgcataaacgccagccacagttagtttattgccttgataagtacagcaggcttaattaaaataaagctgtaaataaatgcaaccaatgataacacaattgtaatgtatttccatagcttatttatatgataaaagcaattaacaaaagacctagccagcccctttaacctcttaaatgcattattatagagttcaggcacaaacacatgcatctgagaatctataaaagcttttatatatcataccaaggaaaaatttgtgcctcttactactacccttgagagagattaataacatttgcttctataaccatccattattagtatttattttaatacatatacaccattatccacatcaaccccttgtatttttttttcttcaaacttaattatccataacctttttttttttcagttttccgataatgctattaagcgcagaccaatgcatacacaatcataaagtgaatgcttggtctgcccttcatggcgtctggacaatcacaattcattcatatgttgaatctcataatttgtacctatttttttccctggtttaacctcccacttatctcgaggttatatgtacatttctaagctaagcaaattaaatccgattcttgtgatttggttccatagcttatacgacatgttaacttttcttttgtttagattacgtccaattagtttgctctcactcccatccccctcatttttttttctttatttccaaacaccttattttaaaggtaaaagcaatagtcttggaaaagcgaatccaccagtagggggcgcaccagccacatccctgaaaccagacgcgctgaaaagccggtggccgccttctgttacccagatcctctcaaccttttctctttcctaactccaggtctctgtttagcttaatattacacctcgaataaacagaaaactttaaagactttaaaacagaaggttctgctttgttttgaagagttagtgtgtatgttttcgaactagcatcatccttcccggattcctgataactaaaactaatcataacttaagggctaataagagaaactacaagggtaggagaggctgattggaataataatttactaagaaaagtctgcaacttttccacaacttttctgggtttccagtgagcaaacttgagtttgactagaacagaaaagcctgggaaggcagggatcgggaagctggagcggggggttgggtggggggtaggttatgggaagaaggttagtaaggaacaaaacaatgcacagttttgtaaagataataaatggaacgtggccgacagatactattcagtacactttctttgggtgagtaagggtagatcaggggaggagggaggcggagagagtgttatagaagaaagaaaataagtaaccctgatggtttaagccttttataaaaaagaaatggcatcaggtttgtttttttttttatctcctcccgcccccccccctccccgctttgtagtcaagtgcattttagccacaaagatcccaacaagagagtggaaggaaacttagacggggctttgtttgactccgtgtagcgacaacaagagaaacaaaactacctatttgtaacggacgtgctgccattgctctgcgcattgagcgcctacctattgaaatctttacgtcgggacaatgggagagcggctaaaattaccctcttgggtcctgggagggcaggattcctgagcccctactcccgcccctatcccatcctcctccagcccgggcctggccgggtcgctcccttctccagcccaggtcgccttcctcttgccttgcctggcctgcacctgtgcctggagagcaccacccccgcctcccaggcccagaacccccttcgagggcagcccagacccaggctgccggggcgatgcggccaccgcggtagaagtcagtgggggaaatgccagggctggttctgctggagtcctgggaactctgcgtgggagggagtttgtgagtgcggctcaaaagccacctccaagcagtgccgggggatgccaggaagttgagactaccctcccccataggccgcacttctcagggcccttctgttgatctttttcttccccccagcccccctttggaaccccgctccactgagatccctctctggggcgggggtggggtgggggcggggagctcaggagaatggggagagaggacgagcgtccccttttgcacggactgagtggaggaagatgggtgggagctgtggccagggtgaggaccaggctgtggtttcctgccccgcgggctgagctgggccgggaagagggtggattcggctgctcacacaggcctggtctgacctcagttttggaggcagccgcacagtcggagcaagctttattaaaaaaaaaaaaaaaaaaaaaaaaaaaaaacagagcatattacgtggaagcaagaagattttgaggacagaacttcttgtcgggacagtgtgagaagggggcgagcgagtgtcggtgcccgtggagcgagccgagcgagcggagaagccagcttagggagaagcgctggagggctggagttgggggaagtgtgcggaggagcgggagaacaatgacacaccaactccagcacagctggtttcccgaaatattagtgggacagtctcactgagccaccttctctgccctgccccacccccccacctcagcttctcgcgtccccctcctcatttcagcagcccgcaccaaaagagtaaattcaagattaagtttgaagaagaaaatatcgtagtcttagggctgtttacccacttcctccgaaaaggcgtgtggtgtgacctgttgctgcgagaggggatacaaaggtttctcagtggctggcaggcaggctgtgggagccgcctccccctccctcccccgcgcgccttccccccgcctccccgcgcggccggcggcgcggcaggccccgccccctttcatgcaaaacccgccggcaaggctgggctcgagtggaggagccgccgcgcgctgattggtcgctggaaacccatttattccctgacagcccccgtcacatggatggttgtctattaacttgttcaaaaaagtatcaggagttgtcaaggcagagaagagagtgtttgcaaaagggggaaagtagtttgctgcctctttaagactaggactgagagaaagaagaagagagagaaagaaagggagagaagtttgagccccaggcttaagcctttccaaaaaataataataacaatcatcggcggcggctggatcggccagaagaggagggaagcgctttttgatcctgattccagtttgcttctctctttcttttcttcccccaaattattcttcgcctgattttcttcgcggagccctgcgctcccgacacccccgcccgcctcccctcctccattcccccccgcccgcgggcccccaaagtcccggccaggccgagggtcggcggccgccggcgggccgggcccgcgcacagcgcccgcatgtacaacatgatggagacggagctgaagccgccgggcccgcagcaaacttcggggggcggcggcggcggcggcggcaactccaccgcggcggcggcgggcggcaaccagaagaacagcccggaccgagtcaagcggcccatgaacgccttcatggtgtggtcccgcgggcagcggcgcaagatggcccaagagaatcctaagatgcacaactcggagatcagcaagcgcttgggcgccgagtggaaacttttgtctgagacggagaagcggccgttcatcgacgaggccaagcggctgcgagcgctgcacatgaaggagcacccggattataaataccggccccggcggaaaaccaagacgctcctgaagaaggataagtacaccctgccgggggggctgctcgccccgggcggcaacagcatggcgagcggggtcggggtgggcgccggcctcggcgcgggcgtgaaccagcgcatggacagctacgcgcacatgaacggctggagcaacggcagctacagcatgatgcaggaccagctaggctacccgcagcacccgggcctcaacgcgcacggcgccgctcagatgcagcccatgcaccgctacgacgtgagcgccctgcagtacaactctatgaccagctcgcagacctacatgaacggctcgcccacctacagcatgtcctattctcagcagggcacccctggcatggcgcttggctccatgggctcggtggtgaagtccgaggccagctccagcccccccgtggttacctcttcttcccactccagggcgccctgccaagccggggacctccgggacatgatcagcatgtacctccccggcgccgaggtgccggagcccgccgcccccagcagacttcacatgtcccagcactaccagagcggcccggtgcccggcacggccattaacggcacactgcccctctcgcacatgtgagggccggacggtgaactggagggggcgggggagacattttcaaagaaaaagagggaaatggaggacagcaagaaacagcatggagaaaaacccggtacgctcaaaaaaaaaaaaaaaaaaaatcatccacagcaaatgacagctgcaaaagaaaacgccaatcccatccacactcacgcaaaaaccgcgatgccggcaagaaaacttttatgagagatcctggacttcttctggggggactatttttgtacagagaaaacctggggtgggcaggtggggagggcgagggaacggaccttgtatagatctggaggaaagaaaactacgcaaaactttttaaaagttctagtgatacggtaggagctttgcagaaagtttgcaaaagtctttaccaataatatttagagctagtctccaagcgacgaaaaaaaatgttttaatatttgcaagcaacttttgtacagtatttatcgagataaacatggcaatcaaaatgtccattgtttataagctgagaatttgccaatatttttcaaggagaggcttcttgctgaattttgattctgcagctgaaatttaggacagttgcaaacgtataaagaagaaaattaatcagattgggcattttaattgtttaaaaattgtacaaaaggtaaaaattagaataagtactggcaaaaccatctccgtggtctctaaaggggcaaaagttttagattgtactaaattttttttaacttaactgttaaaagcaaaaatggccatgcaggttgacatcgttggtaatttataatagctttttttgtttcccaactttccattttgttcagataaaaaaccaacatgaaattactgtgtttgaaatattttcttatggtttgtaatatttctgtaaatttattgtgatattttaaggttttcccacttttagtttctgtagttgtattttaaagattcggctctgtattattgaatcagtctgccgagaatccatgtatatatttgaactaataccatccttataacaggtacattttcaacttaagtttttactccattatgcacagtttgagataaataaatttttgaaatatggacactgaaattatgcttgagtctttcatttatttggataacattgtgattataacccagctcctcggggaatatactgtgctcagccaagaacagcagagtacctaaaaccttggtattctagtccagtagcatgtgctaatgttaacagcaacaaataaatggctagatgattaattgaataagtactctcgaaaaaatggaaatgcttatgtcatttccaaaacagaaactagggacatatattgtaaacccaccccctccttttctaagcagcatgaataagcatgatggggacttaaactgatttatgccacttgttgccagaaaggagtcaattctgaaaaatttcatgtagcttagcagatggggtattgagccaaatcagaaccaggttggctggttttgttttcgttttcttcacagcacaatggccctttggaaacgtggttatagggggaaatgatgcttcttgtataggaataattgcaaactagacaagcaaagtgctcat

SEQ ID NO: 117 - DNA, 82754 bp, Hippotragus equinus
  source 1..82754: mol_type = genomic DNA
gattgttgtaattgttgtttagatgctatgtcatgatggactcttttgtgacccccaaggactgcagcccccaggctcctctgtccatgggatttcccaggcaggaatacaggagtgggttgtcatttccttctccaggggatcttccgggcccatggattgaacctgggtctcctttagtggcaggtggattctttacctctgagctacctgggaagccccaaagagctcgtaggctcttgcctattgattaagcaattggagtcttcacttttcttgatcctactccaactaaaaaaaaaacaactaagttttctaacatatgctaccaaactattacttaaagtttagtgcctttacattttaaattaatcaaaatgtaaattaaattaatggtcaaagatctctaatgaaaatgttttcagaaactgatgatgtctagatgaccaagatggagctcatctgtggttctgatgtaaaaaccaacgaaacaaaacacactagcactctgtttctgaggaagtcttctcttgctgaaccttggggtcttccattgtaattccggacacaactactaagttacttacactgctggcatgtccaggtctgtgtaagttgccctggagggctttcacactcctaggacggctgtgtaaactttttgaccttgaagatgagaatcccaaagtttggtgtgttttcacagacagtaagttgtccttgtcagttctgtcagtaacagacaagggagagatctgaggggctgttttaaaaacacagttttcatcttccttgcctgtgaaatgtccacaatgctcagcctgcagtgcagcttcggacgcaaaggaaggtatttccgtgctccgagaacgcataatcttttgaacttcaaacttccattccgtggtccactgctgaactgtcgaggggcatgttgggtccccggctgcaccccaattgttagccccgccaaccacctttcttccccgagaatacacaaagcttctggactttagcgttttacaagcgctgaacgtctcatcagggtaatagcggcttgtctttgtttcttccaggggataagaaatggtgccttctatctttgtggtttccactgtcagctgagtgcttttttgaaaatccgacttgttttctccatgtatagcatctgtttgacttaaacgtggggaagtcatttcttcttttttagggactacctgtctttcatcattttcagcgcaaatcccagtgtctgaacctgacttcggttccgagctgcccttgctgttgtcggaggcaagctgacctcggtctggggatgctggcgcgccggtactgagtggcaggcgaaggctgccctggcgctctggggccaggtacgtcctttggtccttctcttctttcccacggaaggaaccagcttttttcctgttcgctgcccccgggggcatgcagaaggaggtatcctcatacaacagctcgtctccgttgaaatggtacctgtacaggctgtagccatcggcgctgctgatgctgctccgcctgagaaggaacgtggcatcacattccgaggaggcccgggaccgcgtctgtatcaggtcagacttgtcgattcccgccaggttttccagcgcgttcaccattctgttagatagttcttccagttgggagaggcgaaggtccacagtctgtagggaagttttcataaagttttctctttcgttgatttcctccaatctcatggacatgttttcaactctagtaaatacaaagggacaggtgtattacaccgagatgaactaaagattaaaaccaaaaattaatgttattgttgctgtatgatttttttcaggctttggggaatcatggaactcggacatatttttaaacgtcacacacgcctaatataaccactgaaaattaccctgaggaacatcaggaaacaacagaagtacagttaacacatacggtgctctttaccattcatcacactgctgctgctgctgctaagtcacttcagtcgggtcgaactctgtgcgaccccatagacggcagcccaccaggctcccccgtccctgggcttctccaggcaagaacactggagtgggttgccatttccttctccaatgcatgaaagtgaaaagtgaaagtgaagtcactcagtcgtgtccgactcttagtgaccacatagactgcagcccaccaggctcctcggtccatgggattttccaggcaagagtactggagtggggtgccattgccttctccgttcatcacactaagtaccttatatatgtattaatacatactcaccgaggtcctactctacgcttgtttaatctcacagcagccctatgaggcaggcagtctttccaacacccccattttattggtggggcttcccaggtggctcagtgataaagaacctgcctgtcaatgtagaaagacgcagatttgatccctgtgttaggaagattccctggagaaggaaatggcaacccacaccagtattcttatctgggaaatcccatggacagaggagtctagcaactgcagtccattggattgctgaagtgttagtgactgaagaacaacaacattttacccatgaggaaatagagtcaaggagagggtaagtaatctgcctaaggatgcacagctggcaaacactggggctccaacatgagctccagctctgctgtcttagctggcacatcacactgcctctgatgataaaggaagacactagcacttaggtttgagagatttgagtatagctgtcagcaaggaatggttacaatgacaaaataaatacattcaaatccttatttgaaattcaggggattcagaaaatacattgttaatagttaagtttaggttcatcacaaattattggaggaatgcaaatcaaaactacaatgagctatcactttacaccagacagtatatccctcatcaaaaagtatacaaataacaaatgctgtagaggggtgtggagaaaaggaaacctcctacactgtcaatgggaatgtaagttggtgcagccactatggagaagagtatggaggttccttaagaaactaaaaatagagttgcaatataacccagcaatcccactcctgggcatatatccagagcaaaccataattcaaaaatatacatgaacttctgtgtttataacagcactaaaatagccaggagatgaaagcaacctaagtgtccatcaacagatgaatggataaagaagctgtggtatgtatagacaaagaaatattactcagccataaaagagaatgaaataatggcatttgcagcaacatggatggacttagagaatatcagactaagagaactaagtcatatggagaaagacaaataccaaatgatatcacttatatgtgtaatctaaaatatgacacaaatgaacctatctatgaaatggaaacagactcatagacttagagaaaagatcttgtggttgccaagggggagagagagtggggagggaaggtttgggagtttctgattaacagatgcaaactagtatatataggatgtataaacaattaaggtcctactgtatagcacagagaattatattcaatatcctgggtaagccataatggaaaagaatatgaaaaataatatatatatgtatataactaaatcactttgaagcagaaattaatacaatattataaatcaattatacttcaatgaaataattttttaatgcaaaaataattaagttcagattatcagataatttacttcagggacaagtagtcatttagctatctgagaaataccaatgaacttaaattgttaactatatttaataattggtattcccgtatgggattgtagggaagatcatggcagattataaatatctgcttttggattttcttttaattcttagatgatcaggcaacagcctgtgaaatcataatgttgcctgaactaaaacctgctaaggttctactgttggccgcattgaacagctgtgctctgatgtgtgggagggtccttggattctattcttaattttttccgtaaggagagcactatttttatgccccttaggaaaccacatcgtttgagcaggaaggatctggcttcctggaagtttgccaccaggaggaccgatttcaccaaattcaccatgtttgaggagatgtgacttcctcctttagaagcttccctacagggattaacatacacacactagtgtatatgaaatagatgatcaagataaacctactgtgtaacaccaggaactctgctcaatattttataataatctctataggaaaagaatctgaaaaatatatatatatatataactgaatcattttgctgtacacttgaaactaacacaacattgtgaatcaactatgcttcaataaataaataaataaaaacaagcttccctaccattgggcttccctgatgactcagtggtaaagaacccacctgccaagcaggagacgtgggttccatccctgggtcaggaagatcccctagagaagaaaatggctactcactccagtatccttgcctgggaaatcccatggacagaggagcctggtgggctacaatccatgaggtggcaaagagttggacacaacttagcaactaaacaactacaacaaccatagggagcccaactacagtttctaagggttctttctcctcctgcatttcagggaccaacagaagaacttttcactcctaattttccatgacttcaagtccaacttaattttctctattaaatgtcatgtcttctcacgcccttcaaatccactgccacgaggattcattctttttgtattagaaatcacattgcctctggaacagacttgagatccttgaacaaacacaaaattttgagatgaagcagctgtgcaaacttttaaaaataaataagctggtaaaatagagataagtatcttctcaaatcttttctaattctctgcctgacttatcccttgtatgacctaatccagaaaacagcatcaccagccactcagaaaaaggagacctcagactcatctgattctgtcaccctgacatctccctaaccatccctcctcccctgtgatgaacagataaccccactgtgcataagacgcctctttaggtgtctcagaaatgcccccatccctacactagccactcccttaactgaagctgtggaggaaacaaagcttcaagatgtgatctaagttaagaatattatttcaaaatagataactgtcaagaacctactgtacagctcagggcactctactcaggctctgcagtgacctagatgggaaggaaatccagaaaagaggtgatatgtgtatacatatagctgatgtgctttgctgtacagcagaaaaaaatacaacgttgtatagcaactataccccaataaaaaagtaactaaatagaatgttatttcaagctcatttttaaatagctacagtatggagacagaacattttatgccaaatcaagggaagttgtattgagtttttagagcatgtgtgaaaaaaggaagaaagaaccaggtgccattcatttctctctgaaatgatttaacagaaaggacacttggaaaactatctccccttccagccttgacttgtaacttttgtaacatgatgacttaagtgtgtttcacaaatcttgacatccatatatggaaatcaaaggaggggtttgcatttcaggaggggaaagagaaaagacggaggaaaccgttgggaaagggtcccatctctacacactgaatggaaggagagcatataagagaaatccatcatttataacataactcacagatacagactttcctgacttttgacatcttaattctgttttcttttcagcacagaacaaaaaactgttctaggtccacagcctacccatgaaataaatttgatttcctctcaaagacatatttccaataatgtcatatttctaaggtcatgttttctctttaaagctatcatatagttagttgactactttttcttttggtgtacagttcttttttttttttaatgtttatttatttatttggctgcaccaggtcttttttgtggcatgcgagatccctgcaccccctgcattagaattgcagtttctcaaccactggactaccagggaagttgctgacccatttttcattggattattttccccttattattgagttttgagagttctttagatatcctgtacactagccctacagcagatatgtgatttgcttgtgtttcctcccagtctgtgcctcatttttcattgtcatagcagtgtcttttgtagagcaaaagttttttcttttgatgaaatccagtctatcacttttccttttcttttatagatgcttcctgcgggttgtactttcagtttcagtttagttttaaaaactttcagtgaaaggattccctgaactctaggtgctgaacaggtatagaatgacatgaccatacgggtagaggtggttcggttcagttcagttcagttcagtcgctcagtcgtgtccgactctttgcggccccatgaatcgcagcactccaggcctccctatccatcaccaactcctggagtctactcagacccatgtccatcgagttggtgatgccatccagccatctcatcctctgtcatccccttctcctcccgcccccaatccttcccagcattagggtcttttccaataagtcagcccttcacatgaggtggccaaagtattggaatttcagcttcaacatcagtgaacacccaggactgatctcctttaggatggactggttggatctccttgcagtccaagggactctcaagagtcttctccaacaccacagttcaaaagcatcaattctttggcactcagctttcttcaccgtccaactctcacatccatacatgactaatggaaaaaccatagccttgactagacggaccattgttggcaaagtaatgtctctgcttttaaatacgctatctacattggtcataatggttacagatcttcaaatatttttgtccatatctcagtatatctaatacctagaggatttaaatttgaatcttataccactaaacctgaaagtagtttaaccaaaatgcatttttgttaaggttctgtaaatgttttccattccattcacataataggcacaacaatctgtaaatcactggaacttttgtagtaacttgggcttcccaggtggcactagtggtaaagaatccacctgccaacgcgagagacgagatgcaggttcactccctgggttgagaagatcccctggagaaggaaacggcaacccattccagtattcatgcctggagaatcccatggacagaggagcctggagggctacagtctatggggttgaaaagagtcggacttgactgaaacgacttagcatgcaccaagagaatatatgcctaagtagggcataactttattgactttcatagactcttatctattaaatataatgtccaggctagtgagaagcagctgtatagcacagggagttcagcctgtggctctgtgatggcctagtggggtgggatgggaggtgggagggaggcttaagagggaggggatatatgtatacttatatctgattcactttgctctacagcagaaaccagcacaacactgtaaagcaattatcctccaattaaaaataaaaataaacaaaaaaaaatgaggtccaaattcacattcttatggtaagagtcctgtgtgtctttgcaaaggatagaacacagacattgggagctctgtagcaagccagttattaaaactcattttttgtacagtcatttttttatgtgaaataatcaccctttacctgcaaggcatctcacaaattatatggaaacgtttccttaatgatagagttaaaaggtaacataaaaacataatattagtggagcaaccaggtccggttcctacttgacaagacccatgtttcaagattgcatggtcatctatgttgagttctaagactattcctaccctgtcatttcattccaggtctatagatcatagagttgtctcatccagccgaaattcagctattttaattcccatctgccacttcgtatggggctgccttttaagtttagtaattgtagggagaacacccagggtggcacctgattgtgcttacttatggagtttttatatgtgaaagactaaacaaagaacaatacttgagtcttcaatcttctgtactcattcttttcagtcagcaaaagacttagtaatcactgaagaatattaagttctctgggattctgtctccatgccacatcatttatacacagcaacttggccaggcacacctcaaacctccttggattctagaattcaggtcatctaaatcattaacctttcctgactctgttctctgctctggccagactctggtcaggccctcagtgaagctcttattgatatcctaggttgtctctcccttacttccaacatagcagtgacagtccctaagccttcatccatcgtgaccaggactccagggctggacagggataaacagggctggaggtgatgtaatatgttttgctgccatttgtgaaccctgacatcaccatggtacctgcactgactggttctcagcagcccaggtccccatcagctgtaccccaagcatcattcactttccgcatccttgccatcaggttgagaggcatggagccacattgacttgacacaatacagagtcacaactgggttgtcattactgccaccaggcaatctcttggttaatgacgttcctaccgtatttcccctcaaggtgaactcagatcctccttctggcttcaagtctgtaatgttgctgggtcattctttctccccattcctactgcttcttcttacaattcaaattttccatttgtataaaactcttggcctctctctagcctttcatttactcttgacaaaaactgattttctggagtggggaccaggacatgagtgtgcttctctctctctctctctctgggagtctgctgcttgcagggagtgtgggttctcattttgtcagggtcatggagtaagcttagcaggggagaagaccgctggggctgtgggctcctggagctgcctgtgcctgggtggggacaggagtgtgtacttggcaagacctgatccacatcctctagcacaaaatgtattactaataaagctgatgtttttaatctcagtccaatgtctgcaatgatctccgatttggctttcaaagtcacataaggagcaagattgtcatttaccagacacactgaaactccaccacttcatcccactcctcttctatcatctaagcatccttgactcttatgaatttataaaattaagactttcaggtaagctcttcccccaccttccccactcctatgtggacggcattctctccatcagaggaatcaccacctcctttctaagactgatcattctttcaggtctttttgcagttactgtcttgtttctcttcgttatgtctttgttagaagcatctttcttaccagcatcttctcttcctggtacttgggaagaggataccaatgattaccaaaagatcaattgctgatttctcattaagccaacaggaaacccaagaccttcacaagatcctcctcccacattgctccccagtcctggttaagggtgaaggaaagccactttctcctgaaccccctcctctttctctctctggaatctacctgtgattcagccaagaaagcgtcaacaaagggaagtggaggggcaggaatgtgctcccgtcaccctgagaacacagccaagggaaatggaaagcattgtgtttttactacctccccacccgctgccaccagccccagcacactttcattcctcttacgtgtgcaaggagccccaagaggaaaatgcaatttggcagcaacctgataatcacattcctggagccttgatccaagaatggtaaaaatccaaacaatgctgggaaagggagagggggccaggcagggtgaaagagcactgtttccatggtaagtcactgcctgtgattacagtcaagttaacgtataactaaaacgtggaaattaggttataagaggaggcaccttatccttctcatacagaaaccattttttatcctcttgaaaggttagtaattactagtaaaatagcagaagtgtctcaaagttttattgaaagtattaaggccaaaagttggtgtagataacccttcagtttggctggtagaattattaatacaaggtgactaggtgtatgagtggggaggagacagagccgtgcagctgcctggggcaccatccctcctgtggcctggggcagagtcggtggcctaaacacacaccaggaagacttcattgtgtatcatgtattctcttgtaattgctggggcccctgattgggaactatgtgctgacatattcttttgacattgtatcatctttttaagtttctccgtatacacatgtatatcagacatgaaatacatggtttcagaaaactttaatgctcaagactccagggtagaaggggactttcccagtggtccagtggctaaaactcttcactcccaatggaaggggcccaggtttgatccatcgtcagggaactagatcccatgtgccttgactaagagttctcatgctgcaactaaagatcctgcatgctgcaatgaagatcgaagctctccagtgccacaactatgacctgttacagccaaaataaaataaataaaatttaaaaagaatggtgctccagaatccccttaggcatggtccctcgctatgctcatccttcaagtctttggaacaatgtcttatcaattctcatgcactttaacaagcttcagttgcttttatgaagtgatcaaggttcttaaagactataaaatgcggggaaaaaaaatgtccgtagtgtgggttgattgttcttgtccacctttgctagttgctctgtggtgtgcagctgcaggaaacgcaatactacaaagcatagaacaagtccctctctgtccctcccagacctgccttcctctgctaattgactgactcccaagcacaggcaatcagtttgtgtagcttgtaagtgatgatgctgatctcgatgggtagccaggacagatgactgcccttcctgtacctctgttccctgagggtggaaaggtgatgggaaggagcaaggagggcacagccaggatgaggaggtcaagctggggacagaccacccttggctaaggcaacagcatatgtcaagagtggagagaaacgtccccagcagttatacggccctgcagctggtggttctccccatgtattgcattgtaaaggcacccactttggggctggggaagaactgtcacagttttgtttgttttggtttggttttggcctgggatatttgtgataaatgtcatcgtcacttctttatacaatgtataagcagcatttggaacattcacactatttccgggagggaagcgcattaaaaagccaaaattgggtcgacaggagaactgcaagtgaatgttaaatcgaactccatgtccccctcggccctgatgccccgctcccccggtggccacgcccaggtgcacctctcgcaggttacacggatgcgttcctcgctggaagactgctgctcatcctccttctcctggaagtgctcccggacgcactgctcttcaaactcgtgcagcctcttcagctcctcgtcgctgagaaacagctctatgcataagcagaagaggttaccacgtgagacatcagccaggtaggtgcgtcctagtgattttcacaggccgcctttaatcaagctcattcccctatcccttgcaggcagcaccctgcctcctggactggttatcacacaaagactctttgtaatatcagtgatcatctttccattggagatgaacaactcactttttttttttttttgaacaactcacttttaataaaaaatttttattgaggtatgcacgctaagtcactttagtcgtgtctgactctttgtgatcctctggattgcaacctgccaggctcctctgtccggggaattctcctggcaagaatattggagtgggttgccactcctccagggtattgaggtataattgatttataatactgtgttaatttctgctgtacagcagagtgactcagttatacacacatttttttcatattcttttctattatggtttatcacagggtattaaatatagtttcctgtgctctacagtaggatcttattgtttttctatcctatatataccagtttgcatctgctaatcccaagctcccaactggttcctttcactgaaagttcaaatttcaagcacagagcgtctggctgcgtctgctgggttgcatgacacctaaacagctcactttttaacacaactcaaattgctgctatttggaacgtgaaaccaagcattttctgggaaatgttttccatatattttatggatagaggcacggtagcaggaatattttcccattctccttaagtgtaacacagtaaaacatttggaaaggaacaatgggtttatagagaaaagttattttcaagaactctctcaatttttcatcccctcaggagtggactttcagtgatattaattagtaataaactaacgggtatccaattgtaactctttagaaacttgtccaggatagaaacagaagagtgctgcacatactcaatccacgatcctgttcgtcttggtccccttctcgtttcttcctgcaacgacggctgagacgcatgatgataatgtagatgtggcttaaaatgatcattggtggaggcaggacaggccggtcatgaaatgtcataattagctgataacgctggaatttccacacttggttagatattgacttcacttcaaagaaggtattgctttaaaaagattacaggtttagttagctatattacttaaaaaaatttttttttatcgtgacaaaagtcacataatataaccatatggtcatatagtaaacaaaagtcatataatataatcatattggacctagagtgtgtcatacagaatgaaataagtcaggaagaaaaacaaatactgtgtatttatgcatatatgtagaatctagaaaaatggtacagagaaacctatttgcaaagttgtactaccttttttagcactagaataattattttaatttttaatttttaaaattggagtataattgctttacaatgttatgtatacatgtagctgattcacattgctgtacagcagaaaataacacaaagttgtaaagcatttgtattacttttgattgtgatttcccagaacaatcagagttactcacactgaattgaaaatatgcaataaaatggccttttggttccattctaggaattagggctgacttctaaatgacttgtcttttggtttgcctatcagtgtggcttgtctacattgaagggcattttacttgtataaataattaagaatgaagggtattgagattgttatcccctactttcttgaaaaaccacaccatagtctacagactgctccagatattttatttcatataaagatatgagccgttcaactaagcattttgaagtatttaaactttcaattcagtcataaaactagttgactacagttttttggaactgagttcattaattattgaacattttgattgaaggtgcattatttcggatattaggttggtacaatctttgtcttcttttagcttccagcagaaggcagtaagcctagaattgttggaatcctgatcaagtgtgtggtctacacggggtccttagaaaagccagttaacttctgtcaaccttcattttctcatctgttaagtcaggagtgtaaccatattctctccagtgccttggtcagctctgagagtctctatttctgtgagggatttttctctcatatttttcatcttagaagctaaaatagtttttttcaacatttattaaacatggtcgcatcctcaatgcatcatgccaagaggggcaagttttacaagaaactggactgtgaattttaagccatttctttcctaggtcactttatcttctattcagtaaattataagaaaaatatttcatgtaataaatagtacagtaattgtcatggttgttcattggctaagtcatgtctgactctttgtgaccccatggactgcagcatgccaggcttccctgtcttccactatcttctggagtttgctcaggttagtatccagtgtttaccacagcctataaaattagctttgcttttgtgcctctgatcatgaattcaagactcaacttgataaatctttctatctcaagagactttcatctgaggaaatactttcattagatttaaattcataccaaagtgttaaaatacaaactaagattgaatgtaaatatatttaggtgtcaactctttatttaggaatgtatgaattctgattgtggttgaacaaaaaagactgcaaaaaaaaaatctgtatgcatttgaaagccctagtcgattccatgtaaacgccaggcagcctcagaggtttctgagattagactgaaaatctgtaaaagtagtaaatagtaagcacacagtcatcagctgtgacacgcacttgaaaacggcgatgagcaggttcacaagcaggatgttggccactagcaggtagcaggccatgatggcaggcgtgagccaggcacccgggatgcaaggggggagccgcttgccttcctcatcgtactggttgtcaccacaaggagctgaaatgagagtttgtctttttgcgcttgattttcacatagaatggaaagattaacaactgacctatgctattaaagggcctatttctttttttactgtgattttttttttctgatttcctaatcagtaattttctatgtgaaagatatcgactcatacaaaggagataagaaactcatttctgtactcagagttagtcattcttaatttgtcatatttataaatattttctcatttctgctttatgtttttcaatctacagtgaaaatatataatgaaaaaatgtgttcttcatctttaagcagacacatctgtctttatttatttatttatttatttttttaactgttaaccattagaaagtgattgggtcttctaattatgtaatattaagttacgttgtcttcttgatcattaactttgaaaatgattttattatgaggtaggaggtaagtatcctctctaggctcaaattcattaattgactattctgtgctctgaaaaagaatcttttttctctctgcttatatgaaatgctactttgatcctatgggacttattttctgaagaaaaagacaggatgatcctaagagtcattaatgaagtaatatccatgaattcacagtctacttatttttcacttcctattttaaaaaagcattgataccagaaaacaagtatttgaaaccagcatacaactctgggtaattagctgaggaagagactttaattaatacacgcattccatagactagagtcatcaattatgtgtaaacttacgattaatttccatggcgtagactatagagtgattggatagcagcattttatttttttagttttgacaggaaggaagaaaagaaaataagacagttgagagaaatgtcaaacaaatgatgaataatataagaactgttttgctgtgaagaaatgcaaagtattcaagggaattacacattcacacttggaaacagtgatctacttaggagaattgtgcacattattagttctaggaaatatatgtatatatatttcatgaatatttattttatgatgtcataagcaatagctaaagctcactagttaaaaagactgtgaaaaagatgtgaggctactgacagatgatcattttaatgtgtaggttgaccaatcaaacatcccctgtatgccaacccaaatacctcatcagcacaaataaatacaaaattactatgaagtaatcagatcaagaattgaaaatctacatttcccactgttactgaaaatagcctcaagtttgcctcttcattttctgtttttacccaatttaattaaaaaatattacaacttatgtctagatccagggactttttccacgtttatgtatgtttactgaagctaatattcttttgaaagcaaattagatttttatgttctggtttaccaagctacaaacacatctactaattgactctgagataatcatgataaaaatgtggtctgaatcacatgacgagatgcagtaggtggaaggcagttgtgtgaactggttatcagtctcacctagtgaagatacactgaacaaccctgcatctcctacaacgcaaggatgttcaaaaccttctattctaaagaagcttctgcttctactggaagtagtagccatggtagtgtacctggcgctttttgacagaacacaacatgcaaatcgaaacacgcagtgcgaatacgaatatgggtctgaagatacttgttcactgataatgcagtaactgtccaggtgaaatcatgtaagctcatttgaacttcacttccctataacacaagagacactgtgacctaccaattcagcttgggcagagttggggcctgcattccccagaaatccatgtagactgcagttcatctcctctgctaacatccatattactgttgataatacaaaaatagcacctcaggagtgaggaggagatgcacagctacatggaaaaggagttgtgaagcctgaagaacaggatgacacaaggcactagtcaccttcatgctcactgtctcatttggctgaaataacaccacgagttctatcttggggcagaaagaaatttaggttgaagaaaaattaggatgttggcattgggaccacattcatgtgtagaatgtgctcaagggatgtgagactcagaattccagggaatggttcttagagtagaagattggtgtctcaaaaaatctgtatttcataatctgcactgatttcttcataaaataattggatgcctatgacagaataaaaaatactttactcccaagttaacacaggctcttccattaatttggaacggatcatctgcctcaggaagcagggaagagaatcttactatgaattctattcttacggtctatctggtctgcaaacacctccccgtagatcatccagtagggcatgtagaagatgttccgggccagtttccaagaaggttcctcatctggatgcaagatggcttgacgggctactccaaaactcatcagcaccactagcatgatgaccacgaaatacagcatgtcaatcatctgaggagagaggaaatgggccaagtccacctgattcactactgtgtgctcccctcagagacttcatgagtgcttaattaggatggaggaagcttctttccccctctccctgccatccatgggctactagttcttgtattccgtgcaacatatacaccttattctagaacattgccactcccatctcctgctctcaatctttcttctcctctcttgtgtgtgtgttagttgctcagtcatgtctgactctttgcaaccccatagattgtaccccaccaggcttctctgtccttggaatcctccaagcaagaatacttgaatgggtaggcattcccttctccaggggatcttcccaacacacagggatcgaactcaggtctctagcattgcaggcggcttctctaccatctgagccaccagtgaagcccctcctctcttgttacccataaacaaattcctctagtaactacaactgcaagtagagaaagagaaccattatgggaaaacaggaatttgtaagggaaactcaggggtaagaagaggagatgtctaagggggtataagatggtgagttgagagtgtatactaatgttcgttcattatacaaatggtgagtcgtcacagtgagtaatgctctggttgctatggatactggccttgtgtaattcttaattttgaacatccctgaagacaagagccctgactgggatcacctagactatatgttccttccctcaaaaccacttgccatacaaagagttattcctaagcttgaaagatgtcctgtcttttaggtccagtcctaacactgagactattttaagtgatgtaaggatggttcattcttagtttcatattctatagcctcttctggataaatgttgccatggatttgtcttgacctcatcccctgcattgcctgtgtccactcagtgaagaatctccctacagtgcaggagatgtggaatgcaggagacgcagattcaatccctggcttaagaagataccctggagaaggaaatggccacccactccagtattcttgcctggaaaattccacagacagaggagcctggcgggctacagtccgtgggattgcagtcaaccaggactgagcactgagcaagttatatgttactccagtctagagtgtgtgatctgaaaactgtctggagttgccgtgggggagtgacctgcacccacctgtttgtctctggcttctacaacatgttaggagattaaccattgggttattgacagaaatacatatacataaagtaggcccttaactcttgtttgtcaactggatttaattaagtgatcagtatgtagaagagcttaaagcaaagaacatttcctataagaaaccaattgctggggaaagatcaaatgaaacgtcacagagtcactcctgaggcctgaccccaggtcctaaccaacagccttgtgcttgcagttcctcatgggccatcagcactaaccatctttccgatcatcatcacgtagggtcccaggtacttgttgacaccaaagatgtccaggacacggatgtaccagaagatgatgtccacgcagtagatcacgcggccgtagcccatgtaaggctgcttctggaggcgaaggatggctccaatcatgaacatggaaatggccacgaggtctgtgatattccaatactcctgcagccaaacttttattttctggcttagtttacccggttctgacatgaggatctgaaaagaaatgccaaacaacaacaaaaaaaaacagggagagtggttttggaagcttaaccttagaatcctgggtatggagggctggagcagcattccaggggcttcccctgaaccgtagtggctcagacagtaaagaatctgcctgcaatgtgggcgaactgggttcgatccctgggttgggaagatcccctggaggagggcatggcaatctgctccagtattcttgcctggagaatcccacagacagaagagcctgatgggctacagtccatggggtcacaaagagtcagacatgactgagcacctaagcacagcacagcagcattccagggcatctggtcccccttcctgctcgagatttctaagtactcatcttcttaggcagataaaatatctagaaagggaaattccacaagatgcctttggattcctagtttcacaaactctcaggaaatgccttctgagttatgtccctctggccataatgaaagcagctgccttttgaccccttttccaattttctggacatgtgccggtgagcccatgttccagagttagtccaggaagaaaccccagagcagagataaacctatttggtcccacagaggggcatccccccacaggagatggagggactgggataggacaggtaaatcagcccagattcctttgtaactcggagatgagaagtcagaggaaagctgagcttcattttctcctgcttgagatcttaccctttcaaagttaccacagcttaaaagaacactttctcagaggctttcctagtgacccaaagggtaaagactatgcctgcaatgcaggagacccaggttctatctctgggttgggaagatctcttggagaaaggaatggcaacccactctaggacgcttgcctggagaattccatggacaagggagcctggtaggctacagtccatggggtcataaagagttggacatgactgagtgactaatacacacacacatctttgtcggcaaagtgatgtctctcctcagagtagaactgaaaatatttaacaagcagcatgcaggggcacacacaaagcaaacatagatgcagctatggtgtgcagcagggtgaggtctttaaaggtggtgcccctttagctatggagtttcttgataggtcctggggaccccaggggtggaatggggtggtagctattcataagccaactcagaaggcattcactagtttgaaaactcatgcactctgacttatgcctgctgccctctttcctataactgagggtggggggcaaggacaatgggctctttgcagtaaagaacagtgtcttagcatagggctggtgctcagtgagctcacagtagcactagagatggcacgcaggccacttgggaagtccctgttgtagcatgcgcagagtttgaatgaagcccaggtagaaaagaaagaagtgtaggagatgggttgtaacattctagacctggcacttttcatttggggctgtcatcagctgacagcatgtaattagctctcctgggaagaagttgccagtaataatttttcagatcagtgaaagggtcaatacaaaaaatatattgcaaaataaataatactgcttctctctcagtgggagaaagaatacaaaattctgctgtgtgttatctcaagttcatttcttcttcggttcagttcagttcagtcgctcggttgtgtccgactctttgagaccccatgaatcgcagcatgccaggcctctctgtccatcaccagctcccggagttcactcaaactcatgtccatcgagtcagtgatgccatccagccatctcatcctctgttgtccccttctcctcctgcccccaacccctcccagcatcagagtcttttcccatgagtcaactcttcacatgaggtggccaaagtactggagtttcagttttagcatcattccttccaaagaacacccaggcctgatctcctttagaatggactggttggatctccttgcagtccaagggactctcaagagtcttctccaatgccacagttcaaaagcatcaattcttcggcactcagccttcttcacagtccagctctcacatccatacatgaccactggaaaaaccatagccttgactaggcggacctttgttgttgctatttaatcttgcagctgtgcccaactctttgcaaccccacggactgtagcctgccaggctcctctgtccatggaatttcccaggcaagaatactggagtggattgccatttccttggatgtaagctttccctttataagctgatataatgagctgaaacctgtaggtgatattagaaagaaaaggacctggcccacactttttctgccacctgcaaagactgccctctcagatatgtgagtttcaagtccccgtgatatgagttgtgcgtgaactggtgtcctttttcaacacttagttgaaaatcttgtttcctgtgtttgcagcagatgtgctggaagcctacccagagatgctggaggcttcctctgggtgggggtgcccagcccccacctgctgcaagggccactgttccctcccacctgcccccttgggcaatgggagcccttacccagaggccccgctggctgactcatgtgggtacgaaactcaggtccctttggtcaagatggaacagactctacagtactgaatacactcagagtcccctgccaatgaggccagggacagattccactgaagccacacctccctcagccctgtcccctcttcaacctgaccacccttctccttctccccgctctcctggaagctctcctttaataaaccacttgcacaaaaatccccacctcagatggaggaagacccagctagtatagggtggttcaaaatcctaagttacaggaaaaatgtcatctcctacatctccctgtctacgttcaactcccagaaaatggagccccaatttgtacccagttggagtcatgggtttatctcaggtacctggcagaattcctgctgcttttacaggccctcagacttgttttttagcactaaacaccatctactctgctttgtgttctgatttccaagttcagtttcagtttgaaacagaaggcatataaatctgcgagggaacacaatcaatttgggattgtgacacctggaaagaaaacatccagggcacttgggatttacatgactcatttttgcaataagaagcaacttatgaggacttctctggtgatccagcagttaggacactgtattttcattgtagggggcacaggttcaatccctgctggggtaactaagatcctgcatgccttgtggccagaaagaatttaaataaataaagaaagaatctacatctgaattgaagtcattggtgggtggggctgggacaggtcttcagagcatcacctcccgaattttctccaaggccaggctcaggatgtaggagatgacgatccactcctggaggcagggccagcgctccatacgcaccaggatgacgtagttgaacagcagtaggtaccccaggtaggatatctgaaagacaaagatcgacagcggtgtctggggtagggggtgggaatcagagcccggaaaagctctgaaaccctgtttacagggggacaaatcttctaaaacaaattttcatttttaggtgcactgagtctattagaggaaaccttccactcacatcacaggtgcggtaagagaaccttgaggcaggttgggaggcattttgtactttagcataatatgcatgctgaaagtccattctctaaatgaaagtatatctgttgctagtgtcagcttcatgggacttcccttatggctcagcagtaaaagatctgcttgccaatgcaagagatgcaggagactcatgtctgatccctgggtcgggaagatccgctggaagaggaaatggcaacccactccagtattctctaggaaatcccatggacagaggagcctggtgggctacagtccaaagggtcacgaagagtcagacacggacgcatgcgtgcacatcagcttcatggggaaattatgaagttgcacaaaattatgataaatagagaaactctgagtagtatactggtatgcctgctacattcctggaaattggaagatgttactgactcctccctgcattgctaatttccttcctgaatcttcccactgctgatggacaggggagtttcgaaagtggggagggtgacgatggggaatctgcccagcacgcccagcagtcctgaggccccttaatgagcagccatgtgtctggtgtgctgcacccacaacagggtccctatctttgaggcatgtagagctgagtgatacaggagtgaggtacggggttgaggaaggtgatctgaagatgagtgaggttgattcactccaaagatgaagaatcttcagctctagcccctacccctctggtccaggccccttctaaagttttggtggtgtgggtaaggtgtgtgctagcaactgatcatttgtgattcccagtctttttttttttttaatggccccttcctgattggttttttttatcaggatacaggcagcatcccatgtctagtctttgcaggaggttagagcgagagttctcaaagttgggttgcattgggaaccccttgtactcagtcatgtcagttgtgttcaactctttgcaaccccatggactctagccttgcaggctcttccgcccatgagattctccaggaaaagaatactagagtgggttgccatttccttttccaggggctcttcccagcccaggaattgaacctgcgtctcctgagctgtaaaagcatgcgaccccactcccctacatctgcaggctgcatttagaggccctggggagacacccaaggcttgtcagcctcttggctccaccctctttatccacttgagctcaggttctgggcctgggctcagaaccacctgggcctcagctggttctgaccagaacagatggacagctgtggcttcaggtgtggctgccaagaggtcgggtgtccaggctctcactggcctgggtccccatgtagccctgagggtgctgtgccccggagctccgcctccaccttctgcctacccacatccatcaccctgtccatcacctgctaatgcccagtcactaatggaactactaatggccaggatctgcctgagatgggctatgccctggtacctggggcttcacaaccctcctgaagactgcagtgatttcaggaggcacagtgtgcccaccacccctgctgggaccacccacaaccagcccagtttccttcagaaccttccaaattgctccagtctctttgccccacttctcctgcccatctgcatgtgtaagactggaccattcttgcttcaggtgaagtgctgtcccagagcaatccagacagtggccacagatagggctgtatgagagtatgtggccacagtttggaggccttgattcattcctcaaatacaggacttcatgctttggattcaactctactttgagtgatcccatcagtcttctgaaaaatagcatgtgtgaacttgctgtctcaatatgagtcatctttgttcattgttagactagaactgtattttcctaagtgtgtattactataagacatttgaaaatccttcttcttaaagaaatagaatatgattatttggctttatgaaatggtatatttagtctagaatgatcacattcctgtatataaatattatctatctaggtccaattttagttgaagatatgagttagtcccacttcatgtgcataattcattttaatccactgatttttttaactttttattttacattggagtgtagctgattaataatgttgtgatagtttcaggtagacatcaaagggacttggccatatatatacatgtatccattctcctccaaactcccctcccatccaggctgccacgtaaatttgagcagaattttccctgtgctatacagtaggtctttgttggttattcattttaaatatagcagtgtgtatatgtccatcccaaactatcccttacccctatccttcccctctggtaaccataagtcagttttttaagtctgtggatatctttctgttttgtcagtaagctcatttgtgtcatttctttttagattctgcatataagggatgttatattatttaattgaggatctgagttagtctcacttctatttgcataattcatcttaatccattgatttttttttaaaagcacttttttgaagaagaagaatcattcctcttgattctcacacatctaaaacatgctaagggaagccttactgtgtaaaaccagaacttgacgatgggggcgttgtagaattcacagatcttggtcccaatggggacacttcgttgctttttgtgttcattctcctcgtccccctttctggagctgacatctgcatttgcatcctgaaaacagagcagagcacatggcaagcagggtgccagatgggaaactcctgggaccctagccccacagtcaacagacaggcaccttcccaaatcaaggattataaaagtgttctgtattctttttcttttacatattattgtgatttattaacaattgaatttttccaacagctaatgacagaagacaacaaaattctgtaaagcaattatccttcaataaaaaataaattaaaaaaaagaaaaggagtaaaagatttgaatagatatttcaccaatgaaggtataaggaaaacaaataaatacattaatgatgttcaacctcaaatgttctgtgttcctgcagtgtctaaattcacggcaagagaaatagcaaccattttgaagatgagggttgatggtcgggggcatcactgaccatattctcctcttctttttctttgccgtcctcattttccttggatgtctgataggagaagtcatcataggtacgaaagtccaaaaacaagatggttggggggagaagaatccccatgataacctaggtatgatgagaaaagtggatttttaaactatgagaactcctgaaaattttcccagtataggtaaaattttaaatgatgagcttcagcattcctcagtaagctagcagccctggagtgggtctgtctctgctctgatggtctgtggctttatttggtttggtatatggaaagaactgcagacactgagaaatgtgaacaaccaccacattgttcaagatgaacagcaagcaggatggtgtggaatcctaacttaaaaagtgaagatcttacattgagtttaaagcaggtaattttttaaagtaaaatatagtaagtaaaaataaattaattagaccaaaatattttaaatagaaataacttagatgtaaatgtgaatatatgggtcaagagttggaagacgaatgtgacacctcaaagaaggatttgtggatgtacttagtgccattgagctgtatagttagatattaaatagtatgttttatattatgtgacttttatcacaataataaaaaacattaaaaaacaaaaaaagaagaaaaaaactcaaaggttttctgaagaagtaggaattctgcctcaagaatgtaatacagaaatcctgatttctgtattacagattctgatttaccagtcctcatactcaatcatgtgtgttgattctataaaataaataaattggttctgttcttctaggaaaacaagaaagaagaacttatcatgggctcagcctagacagcaaaatgatggcctaacctatagatggagacctctgtcattttttaaaaaaaaacacgtttctgtttttattttttaatttttttagccatgctgggcagcatgtgggtttttagttctctggccagggatcgaacccccagctcctgtattggaaccatggagttttgaccactggactaccaaggaagtgccactcttgccatttttatcagtgttgtgctgtgtacctccaatactgagctgtttccaacgttaagtcctaattttttaaaaaactttcccctcagccatccattattaagaacaacacaaaggggctatttctatcatatactaaaaaattatattataaaacactaataattaaaacagtatagtacaggtatatgaagagaccaaacaatggagcagaatggaaggatccagaaaaagattcaaatacacaaaagtcattacttgtgagacaaacgccacatccaatgggaggagtaaagatgactatttaatgcacggtattgagaatctgtgtgatcatctataaaataattaagttgaatccatatctcacacaatcactagaataactgtctagctcaataatttcatgaaagaaaataggggagggggatgcatagagagacaattaaacaacttagaatcatcacatgagaattctttcataaatggaggagaaagcctttctaatgatgtccccaaatcaagacacaatcaaagcaaagatcaatagatttcatacttaaatcacaaacttctgcccagcaaaaacacatatcacaaccacaggtaaaaaaaaaaaacaactcatgggaaaatatacttgcagctcttgacacaggcaaaggacaaatctttctaattagaaaagatctcctagacttcaagaaggaaacttctaacaacccagcaaaaaaaacgggaaaagcagtgaacttagggacatttgtatttacagcaaatcagttcattttcactcataagagatattcagggactcttcgggttgtccagtggtttgatccctggtcagggaactaagatcccacgtgcagcatggccaaaaataaaataacaataaagaaactgatagcatctttaaaaaaggggtgggggggagacattcaaagaaactatgcaaagatctcattttttaccattagattgtaaaaattccagtgtgtgctcacacaccatattggtgggattgtgggaaaactctctgcacaatggcagggggtacacttccacagaaggaaaggctatcaagatcaaaagtccatatccgcatggggccaacagctccccttctggatgttcacctagcagacatgtgaggcacaatgtgtgtccgagagcagccatggtggccatgagtgtagcaccccagggctgagtgacttgcactgaggactggcctgagctgtgacagtccgctgtaaaggaaaacaggggaagcaggtaagcatgaaggaatgttctatgtcataatacagaaagagttcccagagaagtggaaaaaaggtacgtaacaatgactacgtcaacctttgtgaaaaagaaaaacagtaagtatatttaattcaccatgaaaagaaaagagagtattcatattcgctttacatatggaaatatacacaagaaacaaatatcagtggttgccactgggtggaataggtcacatgggggacaggagttagcagagagacttgtcacacttttaaacaattttatttttatttttttgatgtgcaccattttcaaagtctttattgaatgtgttacaatgttgcttctgtattatgttttggttttggggcccagaggcatgtggaatcttagctccttaaccagggatggaaccagggattgaacccacacttgaaaggtaaagtcttaaccactggactgccagggaagtcccataaacagttttaattttttaatatatgcatatgatatgaacaagtcaaagaaataaaaaaaaaaatcctggctttacaataattacatatttatgttgcaaattaaaaatgctttgaaggaaatttgatgcttacaaatatttatacctacaaatagacattatatcaaaaaaaaaaagcattaagttaaaaaaagaaaaggaagagattgcaaaacacccaccaaatgtcaaaaacttagtacaaaaaaagaatatagactatctcattaatgatatttttccttttgaaaatattttgtacctactggtttaaatcaatatattattaaaattaacttcaggacttcccaggtggtccagtggctaagactccgagctcccaatgcaggaggctcaggttgtctccctggtcagggaactagattccacatgctgcaactaaaaggtcccacatgcctcagtgaagactgaagatcttgcatgctgaactaagacccagcgctgccaaataaacaaataagttttaaaagttaacttcaactatttcttttttactttttacaatgcacttgaaaaactttttatagctattaaaaatctttttgtaatgggaatatttaaagtttaaatttaaatttaaagtacatatgtgatttatttctgttggacagtgctgctgaagacaatacagtttaatctcactctttaaattctggcatgtttaaaaattactttttagtatatatattcaactccttttttttgtttgttttagctgtgccaggtagcatgtgggatcttagatcccgaccggggatcgaaccagtgccccctgcattgggaacctaaagtcttaacctctggaccaccagggaaatcctggtgaacttttagtatgcatgtaccctgtttgtttatggattgaagagctggaacatatggacctgtagacttgatcacagagtggacttgggggtactcctctgcctttcttattttctgccacttggcagctgcatgctgaggctggaccagaccttggttgttttggtttttttaagttttattgaagtataattgattaacaatattgggtttaatttctgctgtacagcaaattgactgttatacatatattctttttcatattcttttccatcatgatttattacagaatattgaatatagttccctgagctatacagtgggaccttgttgcttatacatactatataagctagtttgcatctgctaattccaaactcccaatccttccctcacccaccaacccatcccccttggcaaccacaagtctgttctctatgtctgtgaatctgtttctggttcgtagatatgttcagtatagaggttcttcaataaactaaaaatagagttgccaaatgattcagcaggccaactcctggccatatatttgaacaaaactataattcaaaaagatacatgcaccccaatgtttgttcattgcagcactattaacaatagccaggacatggaaggaacataaatatccatcaacaaaaaaaatggataaagaagatgtagtacatatatacaatggaacactattcagccataaaaaagaatgaaataatgccatttacagcaacatgaatgaacctagagattacatgggctgctctggtttttcatcagtaaagaatctgcctgcaacacaggaaacgtgggttctatccatgagctgggaaaatccaatggtgaaggaaatggcaacctactccagtattcttgcctgggaaatcctatggacagagaaacctggtgagctagagcccatggggtcacaaagagtcagatgcaactgagccactaaacgacgacagggattatcatacttagtgaagttagtcagacagatatcatataaggtcactcacatgtagaatctagaaaaagaatacaaatgaacttatttacaaaacagaaatagactcacagacatagaaaacaaacatatttaataaagccaaagcaaggaaggataaactaggagtttgggattagcagatacaaactattatattaaaatacttttaatataatattaaaactattattacataataattttatgtaatattacataatactatgtataaaatagataatcaacaaggacctactgtatagcacagggaactatgttcaaaaacctataatggaagaggatgtaaaaaggaatctatatataactgattcacttcgctgtatacctgaaactaacacaacattgtaaatcaactatatttcaatgaaaattaataataaaatgatagcaagtactttcagagtcataaggcaatctgtagacacagagctcaggtgcctgccttagtggtgggtggatggtcaggggtgcacaactcattagagtggactccatgcccacaagctagtcttgctgcgggttgggctctggtgttagaccacccgtgttcaggtgctgcccttcaccttacagctgggatcctaggcgagtcccttcatctcaaaggttcaggttccccatctgtaaggcaaggattgccacagggtctccctcccggggttgttcagagtcatggatgaaataatccacagaaagtgtttagctcagccgggcagagagtcagagcccacaggtgtcacttgacactacatagccacgtcacaggtaccttcaggccagggttcttcctcatccgcagcctccccatccacatgtctgtcagcagcatctggctgcaggtgtgggcaatgaagtcccggtgtttggctgccacagccagtttgaggcaggtcgaattgctccagtttttcagctcgtacgtcagtagtttcatggcaatctgctcatcgtgcttgtaggactggtccaggagctccacagccagctggccaaagtctctgccgagacacagatggaagcgggcgaggcagtgacagccacacactttgttagagagccatgtccatggggacatcacggagccacaggacacagagtccttgactccctgtcctctcccagcagggagctcccaggacgtccccaaggggacagccaggggccaggggccgtgctcagccatgttggaggctgacttccagaggccccgtgaggacaagtcggcagattaataagtctggggagccttggcttagagaaagaagtgtgtccacgctttcattagttttatctccaggagccccaccgagttctcacagggaagatgggaggagaatcccctcatcctgccagcctggggagggtccattctgaactatgcccagagcactctgttcttcctaacaaagcctgccctggggaaaactagttaaccagagttcaacctattggtgttttatcagagcctgactgagctgagggtagggaaccctgtagccatcctgtcctacctaagaggtctttgggaagatcaagtcccaaagggttgtactttgggactgtactaaagtacagtactaaggctgtactcctctgaatgtgtgtttccttatgaaaatcagttttgttgtctttgcatttaaattgtgtttcccagaaaaagaatcaaggacatagagaacacagcagtgattaccaactggaactgaggaagggagggggtgggtaattgaggttagcagacataagcttttttatatagggtagataaataacaaggtcctactgtatagcacagggaactatattcagtatcctatgataaactataatagaaaagaatataaaaaagaatcacatatatatgtatacactttattgtacagcagaaattaacacattgtaaatcagctatatttcaataaagatatactgtctaaaattgtttttccacaaatatcagatattaatgttgtatatggaatctagaaaaatggtataattgatcttatttgcaaagcagaaatagagaacagacagagagaaaaaatgtatggatgccaaggaggaaggaagggtgagatgaatcaggagattgggattgacatatatacacaactaggtataaaacagataactaatgagagccttaactgtacagcacagggaactctactcagtgctctatggtgatgtgaatgggaagtaaatccaaaaaagaggggatacacgtataagtgtaactgattctctttgttatacagcaggaagtaacacgacattgtgaagcaactatgctgttactgctgctgctaagtcacttcagtcatgtccaactctgtgcgaccccatagacagcagcccactaggctcctctgtctctgggattctccaggcaagaacactggagtgttgccatttccttctccaatgcatgaaagtgaaaagcgaaaatgaagtcgctcagtcgtgcccaactcttagcgaccccatggactgcagcctaccaggctcctctgttcatgggattttccaggcaagggtactggagtggggtgtcattgccttctccagaagcaactagactcacataaaaattaattaatgaaaaattgcatttccatagtttgcacaagaagacagtcaacaaaaacaatgatagtccagaaacgcctcagaaagacagaaggaaaaatattaacacaatggacaaagcatttgatgaacaagctttaacaaagcatttgatgatacttaagtgagaaccatatttgccacccttcctggaaaaggagtggttctcagaacaaccaggtctccctgagctctacgttccctccagacactcactttgagttgttgtccaggtcctgggagatgtcatccaccagctcactctcggaggactcgtgggccatggacttgtagagcttgcatgccaccagggccttggccatgctctcctccccccgctgccagaggaagaccgccatcttttggcgcttcatcagcacagcccacaccatcagctcgtggaaggggtactggaatcgactcacggccgggtcatccacatcaatgtccaactcctcctcctttttctttttcttctttttctttcctttggctggcggctcgtcatcctgaggggagagaaacacccttactgtggttctgccataaacatgtagtaaaggaccaactggaagaagggaaaccttgctgtctgcaggaacggagagacttcttaagtacatctgtgtgtccacccatcttatgaattcttttgaaaaggtgcacatgtttattatgagaagtaaaccattgaaaatcaaatgagctgaaaaggcatactactgtttgaagtttatattcctgggttggcaggtttgtttgtttgtttgtttttcaaaagcctctaaaaattgaagagaagctgcaaaactgaaaacaaagaaaacacttcaatccaaatcaccctatgggagagataaagcccaaaactcatttcctgagggatgtctttaaataccaacactctgaaccagagagtaataggaaaaatgtagaaagaggtggagaaaaatatcttggttttctaccagtggtttgggcttcccaggtggctcagtggtaaagaatccacctgccagtgcaggagatgcaggaggcaggggtttgatctttggatcgggaagattccctggaggaggaaacggcaactcactccagcattcttggctggagaatcccaaggacagaggagccggaaggcctacagtccatgtgatctcaaagaatcagacatgactgagcatgcacacacgtctaccaatagtttaaggaagcaggggttctattttgaatgagatttgtcttctcatggttgtgttataaatggaaggccaatgctttccacctccaatggattatgaggggtcattctagtaatagagcaggatcctaaaggaaggcattcatgactgggaaaactggtggtgaaacatgcatgtggcatggaatcattcagaaaactaagatcatggcatctggtcccatcacttcatggcaaatagatggggaaacaatggaaacagtgacagactttattttggggggttccaagatcactgccgatggtgactgcagccatgaaattaaaagacacttgctccttggaagaaaagctatgaccaacctagacagcttattaaaaagcagagacatttctttgccaacaaaggttcgtctagtcaaagctatggtttttccagtagtcgtgtgtggatgtgagagttgaactataaagaaagctgagcacagaattgatgcttttgaactgtggtgtcgaagactcttgggagtcccttggactgcaaggagatccaaccagtcaatcttaaaggaaatcagtcctgaatattcactggaaagactgatgctgaagctgaaactccaatattttggccacctgatgcaaagaactgactcatttgaaaagaccctgatgctggaaaagatcgagggcaggaggagaagaaaatgaccgagaatgaaatggttggatggcatcactgacttgatggacatgagtttgagtaacctccaggagttggtgatggacagggaagcctggtgtgctgcagtccatggggtcataaagagttggacacgactgagtagtgaactgaactgaacagactattccaggctgaggatccggtacccaataggataacagaaatggatctctgctcttttgcaaatagctttctcatcagtgaccttcttttattctcacactgatcctgagaggttgttaatgtcttctagtcagtcagatgaggaagttgtggcttaaaggctgaataatttacccacattcacatgaatggagaggctgggcatggggcggaaaagggggtggagcctgagtcttcaattcttatggcaagtagttcatgactaaaccaagttttataagctcattatgaggtgttctgatgtttttattgaaagtatcatatcttgccttgaatttaaatgtttttgttctaatttgtcccagtaaaactgcagtttcagtcatttagggaatattgaaattaaaaaagaaatatagctttattttcaagattatatcaagtcaaataaaaatccactaaggactaatgaaatattgtaaaacagaaagctttttttttttttgctacacttcaaaacatgcaggaccttagttccctgaccagggatcaaacctatgccccctgcagtggaagcgcagtcctaaccaatggagtctgccagggaagacccaaacagaaaccccttttatcctacctttccatagtatgttactaaaatattaattatatgcaacttcacataaaataattttaatattgctatagacagaaaataaccaacaaaggattcatttccctaaagtgcatgaacagacacaaagcaacaagtaaaagacaagcaacccaataaaataacaagagatatgaactgaaagttaagaaatgaatccatccacaatcacaaatcacagtaagagcctctaaacacacctcagtcagaaattaattggaaaaaaactagtacatatagaagcaaattgaatactaaaattcctaagtttgatctgacagcatgctgaaagctaaagtcgctcagtcctgtccaactctttgtgatcccatggactatatatagtccagggaactctccaggccagaattctggagtgggcagcctttcccttctccaggggatcttcccaacccagggatcaagcccaggtctcctgcagagaagtatataattttgcccaacaaactgagaaaatacatttgtttcaccacacgtggatcattaacaaaattccagctggcattattcctcaattcttttgagattttcaatctcaacaagttctaggtattggaaatcatacagtctacacccaaagagtaatactagaaatcaatgagactaagataaccacaataacaaaagtctgtatgtaggcaacttaaaatatgcttataaataactcttggattaaggagggaattataaactgtttagaaatgaatatcaataaaagttctacttactgtaacctgtaggagaccatgaaaaacaatgctcagagaaaaatgtatactcttcatgaatttattgaaatacaaagaagattgaaaatgggcaaacactttcaaattgagtcaataaaaataacacaataactccatacaaagtatatggaaggaatgaatacaaattaaaatatattaataaaatagaaaaaagaaaaaagaaagttgctgggttaagcaaaaaaataccagtgaaatccaaagacaggtatggttaagaagaaagggagaagatatgaaaaagaaaaaaactggaacaagaaatggcacacaactaaagagactgagtagattgaaagaattaaaatactcagtaaaggtttatggggcttcccaggtggctcagtggtaaagaatccccctgccaatgcaggagacatggtttcaatccctgggtcaggaagatcccctggagaagaaaatggcaatccactccagtattcttgtctgggaaatcccatggacagaggagcctggcaggctacaatccatgggatcataaagagtaggacacaactgagagactaaacaacaacaaagatttacaccagtgaacctgaaagtctagataaagtaaattgttttctatgaaaatataactgaccaaagctgactccagaaaatagaaagcctcgatgaactcttattataaacgttattactacagtggtgaaaaaatgggcctctaacaacaacactggacaggctattatataggagagttccaccaaggcttcactcagcagataaaccctacgtgatacaaccaatctgagagactaagggattatgcaacactgactttcataacccttctagttatgctgaaggtcggtgtcaatgcgaacaagaaacaaaaccttccaccctgaatccatacagaaattggaatgctacttaactcatgaatttatttgagaagaatctttataatactcagtcttaatattgtgttatggtacttcttctacttgtttacgtattttcatgtctagtgatttgttcttaagttcacttgttaggttatttctggatatttttgtcccattatgaggaaactttgttgattttcctggactttctagatacaaaatatttttctgccaataataatttcctcctccttttatatattcttcctttatttatgttttcatgtggtaaaatttccagaacacttttaaaaaccagaggggataatgatgccaacaataatgggtgagcttgatttgttcttgattttaataaaagtcagttgggtggcttttaccttttaaaaaaatatctatgacctttgaatataatctgactaaatcatccaagtaaatcttggtgtgtggtgaagtggatttattcatggaaaacaaattcaatcaattttatgttaaatacaaaatgaagtggctccatgataccatgaaaccactggaaacaagtcctacttacttccattcccagaagtttgagagctttcggctgcataattaaaagggagggaaaaaaattcaatggaatcagataactgaagttacaatactatgagttgtacattattgatatcgctagtagattgataatagattaaaaagtacttggggtagggaggtcaagagggagggaacatatacatatagctatggtggatttgtgttgatatatggcagaaacattgtattgtaatattgtaaagcaattaatactgtataacacaatattataaagtaattatcctccaattaaaaataaaatttttaaagtactttgtataattaacaatgaaggacaaaactaaggaaagcatttgtccttcacagttagtgatataaagtactcttttatctattaaaatatattttcctttcctctacttctgtcagcccaggtcaggtgaggagagagacgtgcagacatgggacccccacctcagggagaaccacagaagttcacccacagaaacgcagacacagagccatggggctctgagtggggcgagaggagggcttcatgggaggtctcacacatgagctgggcatgggatacacatggggttttgaagtggggaggtgcggctgacacattagtggagtttgttctgaaagtggtacatggtcacccacaacagggtgtggataatgagggagagccttagacgctttgatcatgagcttgacagtgattcctcaggcactggggagccttgggagtttgtgagcaaggaatgccccatcaggttcctcattttggaggatcagggtggctccagtggtaggatgcatggaagaaagcagagacaaaggagcccaggaggaagcagttgtgaacaaaggaaggggcaggtgcaagtgctgggctgtgggcccaatgtgtggagggaagaaaggatgcttcacaccgagagccactgcaggaggattggaagatgtgtgtggggatggggtgatgagcttggctttgaataggctgagttactgtggaggtgagcaaagaaccatgtgttgccctgggaaccacagaagactgcgtgtccgctgagctctaccctcttgggtccaaacaggttgttgtagagggtccggaagctcttgcgcgtgtagttgcagcggtaggcaccacccatgaggtactccagaacgagcccaatgtctatgaggctgatgtggtagtcaggaggaaggttgccctgtaaggaaaggagccatgtctcaggccctgcaagaagctcctgcagcctggactgcatcacacaccttggcgtcgtggccatccctgctggtgatgtggatgttaacagaagcaatggggcgttaaacaatcttctatctgttaccacaggatgcagggagataagagggtgaaccatgttccagaaaatggattaaacttccccatgagatgagttagaaacccgcagggctataggggagaggtctgggcttgtctgtgggcttggacagaatgatcagtaatgtgcatttaaacataaaggaaagagggaccttcccagtggtccagaggttgagactctgccttccactgcaggaggcgccagtttaatccctgatctggaaactgaggtcccacatgcaacagagtgaggccaaaaaataaaaataaagaatatatatacatataaagaatgtatatgtatgtataactgcatcagtttgctatacagcagaaaataacacaacattgtaaatcaactatacttcaacaaaaatttgattaagagaaaaaatcattgagaacagatggtgtagctggtacaagccttccttgatgtgaatagatttgccctgttgagaaggtgctttgacagctgcttgcaggggagaaggtgtcttcaggggctggtgtccagattttctacagaaggtgggagtgagcacatgatgggcaggaggactctgtggaaggtagggggaggacgggacactcctgggactgggacctttatggagaaatctccacatggtgccccaggattttctgagggaccccaaaggtttcagtaagaacacaaactccctgagatggctgggagttggtgaaggggcagagttctgctgcataatggatgaggctgtgttaagatgaaggcagggtgtgggcagaagggagagggactgagggcatccatgcacctgtaagccagtcactcacgcccctgggcagctggctgatccaggaggcagagctgacccatctgttataaggtgaaagtgaagtcgctcagtcgtgtccgactctttgtgaccccgtggactgtaacctactaggcttctccgtccgtgggattctccaggcaagaatactggagtggattgccatttccttctccaggggatcttcccgacccagggatcgaacccaggtctcctgcattggaggcagacgctttaacctaaggatgctatactatgtgctatttctggcttagttaacttcctgtagctgaaatgatggtggaaatctggggtccatcccatggagactccgttgttgttatttagtcactagtcatgtttgactctttgcgactccatggactgcagcccaccaggcttctctgtccataggattctccaggcaagaatactggagtggttgccatttccttctccattcacggagactacacttttcgaatgtcctccttgtgcacagggacctcatccttcactcaggctttgcaagtttgttcagccctcatcgtgatccttgatcaagtcagggatttcacatgaggggacaagatacatctctgcctcggtgagcttgttgtttgtggcaggggaggggattaagggccaagccacccaaatttcgacacgcagcatgttcagacccccactctgcctgggtaggcaggtgagaaggggcttcctggggagggtgacactgaagcagagcagaggctgctgcagccgagggcagagagcaccgcagatatgaccatgcttggccccaggacagaacacatgagcgtgtggtggaccccgtatggtgggcatgtgatgggcccagttgatgcaagtgtcttagatggagccttaacttcgtgagatgtaggaggctttggctttcaagtgagggcgtcctcctggggagggcaggaggaaaatgatagaagccacttaggtgagacctggttggttgggtctacacttgagtagcagtggcttttgactctcagtgcttccttagttaagaaatctgggaaagtgggaaacaagggcagggcagtccctggtccctcttggttcccagacccaatgattctgctctgatccaatgagcatttgtgagataggctgggactggggaccctttgatgcaatgcttgcacctggacacacctctccttgaacaacaaaatacaaaggaactgtatgggactaaaaataatcgcatacatgtgcacttggggcaaattctgaacccaaaagataccgagagaccaaacattataactgcctcttttgagaagcctggggcaaaagcagggtactgtccccttcatatagcaccatggtttttccagtcgtcatgtatggatgtgagagttggactgtgaagaaagctgagcgccaaagaattgatgcttttgaactgtggtgttggagaagactcttgagagtcccttggactggaaggagatccaaccagtccattctaaaggagatcagccctgggtgttctttggaaggaatgatgctaaagctgaaactccagtattttggccacctcataccaagagttgactcattagaaaagactctgatgctgggaggggttgggggcaggaggaaaaggggacgacagaggatgagatggctggatggcatcaccgactcgatggatgtgagtctgagtgaactccgggagatggtgatggacagggaggcctggcgtgctgcgattcatggggttgcaaagagttggacatgactgagtgactgaactgaactgaactgaactgaagaggtgaacagaccacctaagtcacccttccagcccgaccctggacacacacctactctcactccactgcctaaggaaccagcttgcccttcctcagggagcaagcaagggaaactgttggttgttctcactccccattgctgcagcaagaaccccaataaagcctcacctgaattccttgcctggcctctagtcaatctctgttgactggggaaggtcaagaagccaggttggtaacatttgtagtaaaagccacattctcacatcagtagaatcagatatctatttgaagtctgaacagtctttctgggactctgactgaaggcccttttctcccgtttgagttgttccctcctgctcagaacacgaacacccatcctgcactccgcatgccaggggctgcgttctggcctcatgaatcattctatgttaacctggtctgatcctccagcctgtggtggccaacaggaccccagaaactccacgacagaacagggagtagatggaagcctacaagactataaggggttgtcgtgatggaaaggatgatggggccgtgaagtggaggtatctatcactgtctaatgaggaaacagggccaagaagaactgttgcgtgggactgtcctgctaggacttctggaaagaggcatagggaaggagtgagggcaaatctgaaacttgtagagcacgggggccctgggcagcagagaggaatttgctgtcctcccccacctccacccctggctgggatcaacctaccaccaaatagttatttagtgcaagccgattgtgtgtgagatgaacaccaaacttgaagaagatgacatttgaaaaaagtaaactctttttatggagagaggaattcgtgatttcttatgcctccaataaaatgacaccacatttggaaatttaaaaatggctttagaaaatgtcttattgaaagaagtcaacaggtaaaggaatagagaacagcagactgggacttgcctgatggtccaagggttaagacaccaaactcccgatgcagagggcacaggttcaatccctcatcagggaactagaccccacatgctgcatggcatgcagccaaaaattaaataaaaaaacaaataaaccttgaaatagctcattcaaaaaaattatatatataaacaaaagcaaagacaaaaagagaagactgacctttttaacatccctcaccagcaaatgaagtgtattgggtggacccagtctctgaaagagaagcattcagccatattaaatatgtttttctcttcaactcttagagcaaaatccgactctatagaattaatgaatttgtgaaagctgggatgtcatccactattagcctatgtctttacaacacaggactggttgtgggtaagaagtatcccacacgttcaaaaatatgttaaataccgtttatcaaattattttaaagagaatctcacagggcaccatatcgtcttaaaagttcaccaagttttagcaagcaactgctcaggaccacttctacggcttaaaattttagagcagggaagggaatgtacatctcaaaattcatatggtgagaatacaagccaagaggatttcatccaaacactgtgattctcatatcaggagctccttgttgtgcaaactcagttttccatttttatcaaagcctcataaaaagtggtagttcccaggaacaaatgactgctcaccccgggaacttttcactctgctaatgactccaggagctggactcttcctctgtagagacttgtcctcttgcaccatccctgagttaatggttcagatggggtgggggtctaggtagcctggcagaggtgcgtgagaatgagacctttgctgagcccactggtcaggcgagaacactggcccttaaatgatgcatgcttagacactctgtcatgtccgactgtttgcaatccctaggactgtagcccaccaggctcctctgtccttgggattcttcaggcaaaaatagttgagtgggttgccatttccctctctcttccactaaagccgtgttctgatggggccagctcccctccactctccctcctttgcaatcactcactgtgttataaagctcttccagcctcgggatggtgagaaagtgttgcatgttgactccattttcaatcaggagcttcacaaagtccacacgatctaagaccagtgcgtccagcatggcctgctccagagcgttcacctgcatgaggccaggagaggggcgtgagtacctggcgggtgctgggaaggagcgagttcacagggcagctgaggaggcagcgagaactggaccttcccctcgaggagggagactggctccgaggggtccctgtgagcccaggaaagggaccagagccatcccacctacccagttcagcagctcaagcttccgagggtcagtttcttcctctacttcctccttcaccttccctttcttcttgccttttccttttcctcttccccccttggtggtcgccgtaggtggcttcttctccttctctgtggccttgctatccgttgggggcgccaggcttcccaggggctgcagttcaagcaggcagggttgggaaagggattaaagcttctccttatcccaggaccagtgcctcccctctgcatgcacatgtgtgcacacacacacacacacacacgtccaggtacacaggagcacacacatgcttgcacacagatacacaggcacacacacacaggtgcaaggatgagcacacagactcagacatgcacacaggcaacacaggtacacataacctgtgagcacacacacacacacacacacacacacacacacacacttagctgtcacaggccaggttgtctggtggcaaagaccctgatctcgcgaccctctattacttatagcttgaagtacattcatgtactttaagtggctgtttcagttgatgtgtgcttttgtccagaggaaagggtgctgagaggaaaattcaaagacaccaaaaagaagtgtctgtggaaagtgatggaaacaagagaaaacaactgtgaggggccggagatgacaggtgaaaccacagatgcttgtgtggagagaagtctgggctgaggtctcctgggtgtaactgacaggcacatgtttccagagaaacaagggcctttgaaagatactataagaaagggaattccgctcaatggacagtaataaaagaatagatagtcttgatgatgtaaggactatgctaagaagaaaagagagaatcaattagaaatgcaagggaggggcttcccaggtggctctgtggtaaagaatctgcctgccaatgtaggagatacaggtttgatccctcatccaggaagatcccacatgccccaactgctgagcctgtgctcacagcccgtcctccacaacaagagaaaccagtgtagtgagaagcctgtgcaccacaactagagagtagcccccacatgctgcaactagagaaagtccacgtgcagcaatgaagacccaacacactcaacaacacataaataagtaaacttattcttaaaaaaaagaaatgcaagggaaagcaaacatctatctattcaaataaggcaaggtccaaatatgaaggaaactcaaaggtcgcataatttaaacaatggatggactgtaagaaccttcatgctgttgtgttttcctttgtatggccctggtgactcacccagggctacctttctttctctttgagttcagctgcaatgttaggctcagctgtgaacaatctgtacagaatcacagtaaaatctgctggtttttccatttttagaattaacataaagacctagtatggaggatggaggagggcaaaatgaatgaagattgtcaaaaggtacaaactcccagttataaaataaatgccatggaatgtcatgtacaacatggtgactacagttgataattctgtgttgtatatttgaaagttgctaagacagtagatcttaagagttctcatcacaagaaaaaaaattgtaactgtgtttggtgacagatggtaattagacacattgtaatgatttcataatatatacaaatattgaattgttatattgtatacctgaaactaatatgtcatatgtcaattatatctcaattaaaaacaaaatataaacaaggacctaatatatagcacattgtacaggagacagggatcaagaccatccccatggaaaagaaatgcaaaaaagcaaaatggctgtctggggaggccttacaaatagctgtgaaaaaagagaagtgaaaagcaaaggagaaaaggaaagatataagcatctgaatgcagagttccagagactagcaagaagagataagaaagccttcctcagcgatcagtgcaaagaaatagaggaaaacaacagaatgggaaagactagagatctcttcaagaaaattagagataccaagggaacatttcatgcaaagatgggctcgataaaggacagaaatggtatggacctaacagaagcagaagatattaagaagaggtggcaagaatacacagaagaactgtacaaaaaagatcttcacgacccagataatcatgatgatgtgatcactaatctagagccagacatcctggaatgtgaagtcaagtgggccttagaaagcatcactacgaacaaagctagtggaggtgatggcattccagtggagctatttcaaatcctgaaagatgatgctgtgaaagtgttgcgctcaatatgccagcacatttggaaaactcagcagtggccacaggactggaaaaggacagttttcattccaatcccaaagaaaggcaatgccaaagaatgctcaaactactgtacaattgcactcatctcacatgctagaaagtaatgctcaaaattctccaagccaggcttcagcaatacgtgaaccgtgaactccctgatgttcaagctggttttagaaaagggagaggaaccagagatcaaattgccaacatctgctggatcatggaacaagcaagagagtcccagaaaaacatctatttctgccttattgactatgccaaagcctttgactgtgtggatcacaataaactgtggaaaattctgaaagagatgggaatagcagaccacctgacctgcctcttgagaaatctgtatgcaggtcaggaagcaacaattagaactggacatggaacggcagactggttccaaataggtaaaggagtacgtcaaggttgtatattgtcaccctgcttatttaacttatatgcagagtacatcatgagaaatgctggactggaagaaacacaagctggaatcaagattgccaggagaaatatcaataacctcagatatgcagatgacaccacccttatggcagaaagtgaagaggaactaaaacgcctcttgatgaaagtgaaagaggagagtgaaaaagttggcttgaagctcaacattcagaaaacaaagatcatggcatctggtcccatcacttcatgggaaatagatggggaaacagtagaaacagtgtcagacttcaattttttgggctccaaaaccactgcagatggtgactgcagccatgaaattaagagacgcttactccttggaagaaaagttatgaccaacctagataatatattcaaaagcagaaacattactttgccgactaaggtccgtctagtcaaggctatggtttttcctgtggtcgtgtatggatgtgagagttggactgtgaagaaggctgagcgccgaagaattgatgcttttgaactgtggtgttgaagaagactcttgagggtcccttggactgcaaggagatccaaccagtccattatgaaggagatcaaccctgggatttctttggaaggaatgatgctaaagctgaagctcccgtactttggacacctcatgcaaagagttgactcattggaaaagactctgatgctgggagagattgggggcaggaggagaaggggacgacagaggatgagatggctggatggcatcacggactcgatgggcgtgagtctgagtgaactcgaggagatggtgatggacagggaggcctggtgtgctgcgattcatggggtcgcaaagagtcggacatgactgagtgactgaactgaactgaatatatagcacagggaactatattcagtgtcttgtaatatgcattaaatcttccctggtggctcagccgtaaagaacctgcctgccaatgcaggagatataggttcaattgctggggcgggaaaattccctggagaaggaaatggcaacccactctagtattcttgcctgggaaatctcacggacagaggagcctgatgggctatggcccatggggtcacatatagttggacattactgagcgactaaacagcaacaaataagtattaatggaaacgaatctgaagaagaataaatacagatctatacaaatgtacaactgaatcactttgctgtacacatgaaactaatacaacattgtaaatcaaccatacttcaatttaaaaaataaagaaaaaaatattatgtcttaaatgagaatttcattaggagtttgtttgaatattgtcccttcttcattgagaatataaaatatatttgatcataaataaatatataccataatgagatattactacttatcattaaagaagctaaaattttttaaaaacctgccaatgccaagaaaccctcttacattgctcatggaaatgtaaaatgctacagctcccttggaaagcagaacacaaggacaattgaggggctttcggaggtgggattgagggctctgattttcatggcgtgctctgatttgttatctgcttttcaaaccatatttatgcatttactgaataaaagaaagcaaagaacactaagcagcatgaaaatggaagtcagagagaatttaatgccaacataggaatgaaaaatgaaattataaaatattgacagtattgctgaatttttctaaggggaggtggtcacaagtgattgtttccttcgttttgcttgtctatattttccacactttctagaaacagcttattgattctgtaacaagaaagtgggtgcaggccattacttcaggctggcaccctgtgtgtgtgatgtgttccccaggtcaggccctttctgtaatcctgaaagcctggctctctcagtgtggctgactcagagctgtgtcttcagaaagctgcccttcaaaaagaaaaaccaaccaaggtctgggattcctctttctgaatagacagtctccagagctcatgatactgcccttcctgccagccctgtctcggagctcttagcttctctgcctcatcaccactcatggaccagttcactttgctctaaaatcctttaccaagagtagacaaaccaggagattcaaaacaaaattaaaatatgtaagttgtggtagtgttcttttaatttgtgtagttcaataaacaacacgcataaaccactccccaaacttgtatcttattcctttaatacacttctctgattccttacccctggaggaagaaatggcaacccactccagtattctggcctaaaaaattccatggacagaggagcctgatgggctacagtccatggggttgcagaaagttggacatgacttaagccactgagcacacatgcacacactgattgcttaaattcttcacactaattggataaaagataactgtgaaaatgagatgtactttgaaggtatgtcccaggcctgttttgagaaataaggtttttaaagtttgacatgaaccctctagatattccaaacccccttttgaagcagcagagccctaattctgcaaacaaaaattttccccaagtcccagtacacaaaatctatcaaagaagctgctttaaaaaaaaatttttttttaattgaagtatagttgatttacaatgttctgctaatttctgctgccgctgctgctaagtcacttcagttgtgtccaactctgtgcgatcccatagacggcggcccaccaggctcctctgtccctgggattctgctgtacagcaaagtgattcagttataaatatacacatatattacattttaaaaattcttttccattatgatttatcccaggagattgaatagaattccctgtgctgtacagtaggaccttgctgtttatccatcctagatgtaacagtttgcatctgctgatcccaaactcccagtccatccttccgctactcctctcccacttggtaaccacaagtggtaaagaagctgctttgattgaaggagcgggaggctgctgagagttgttcatcatgcctgctcatatctgcacacacacgcccccacattacacccatgtacaaccacacacacacacatacacagatcccacagacatacactgcatgcatggtaaaccacacaccacacatacatttcacaccctacacacacactgcacgtagatacacatatacaatacaccaaaccacatacaaacatactacacacaaaggtcaaacacacagtcccctagccctctggggtttcacagaacgtagtttaaaaatcaatgctttcaatgcaatcattgtatttcattttaatgagcaatcttctttcttcttaaaagtgtaaaaacccatgttcaccagcaatgataaaatatttagtgctctttattcaagagcactggtttgaatctgaagttagtgccaggagctcttatttcttgctggttctttgaaatgacacagcaacatctcctaataatcctaacaactagacattgttggtgttagttgctcagtcgtgtccgactctgaaacaccatggaccgtagccttccaggctcctctgttcatgggattctccaggcaagaataactggagtgggttgctgtgccctcctccaggggatcttcctgatccagggatcaaatcacatcttgtgcatcgcaggcagattctttaccatctgagccaccagggaagcaactagacactgggtcatcagaaaccccagaagattttctgagatccacagcacaagggagcttgtactaatacacccttgtacaaagtcatgacaaacagtatagattgaaaacacttagtttcaccggccagcggggcccaaagacaaagatctgactccgagctatgtccacacggttccaagccagcgccaagctcagctggtccggagccgacgcatttgttcctggaaggcaagagacggggcagttctcacgtcatgcccggactgtggcgggctgtggggggaaggggctgggtggggagcatgggcttccacaggctggctcggcatctcaccctcttctctggcccctgagtgactcagtattttcgaagagctggctgggaggaggatggaggcaacctctttccatgtcaggaaagaggtttctgtccctggggggaacagaggaggaagccagtgaccccagtttcctattctgcaagagggcaggagccctggggccacccagacccctgccaggctccttcagatcaaaggggaccacagtccagggtaccagcccctattgcagggagaccagctcagtaccaccaggaggctggcccaatggggacccctgcccctctctcctccagcaccttccccttcgcagtggaggagggaggtgactcctcaaccagccaagtggcagcctatcgttaggagaatctgggaaaattgacggagcgcagtgagacgtagggatcacaaatgaaaaatcatttcatgcttaccctctctgagctgaaacctgtcatgagctagctgtcaatggaaactgattcttagccatcaagaaccagtgatccattgctccctcctcccagaaaagtccccctccagagaacccacttggagcttcatcacgttaccacggctttagactacaataactctaggcaacctggccagctcagggttccatccccagcaaacacatttctggcaggaggaagttgcagggggagggtttcccggccaagagtggggcctggagaggccagcacggaaaggacaggaggggccatttctgagagctcacctttcagcagggcagttaaaatcgccatctcgatgtcttgctgaccctcagaacccatcctaaacacagtgatctgaaaatagattaattgtgaaaagactgagtaaagcaaagtggaaactgagagagagaattagagtgttgtttaaaaaaaggacctcagaggccaatgttaatacaaccatccctagagcaaggggattttccatcagggccttctgatttcctgaagggacagcattttgtatcctcaccgggaccttattttattcttcaccccacctggagctgagggagcccatgcaggacattcatgctaatatctaaatggctactaaaagtgacaaaggcatctctactcagatttgttacatttgtaggaaattcgtagatttagaattttgaagagtgcctgtgtaacaagagtgcgtcttccttataattaaggaggtaaaagtcttccctggtggcttagacggtaaagaatctgcctgcaaagtgggagacccaggttctatacctggggtgggaagatcccctagagaagggaatggcaacccattgcagtattcttgcctggagaatcctacggacacaggagcctggagggctacagtccaggggtcgcaaagagtcagacacaactgagtgactaacactttcattttccccttgaaggaggcaaagggtagaaaataatgagggtatttggtagaattttctaagcacacctgaaagcatggtgtgtgtcactcctcagtgctttatttatttaatttttaaaaaaactttttggctgcactacacagcatgttgggtcttagttccctgactagagatcgaatccaaccaagccccctgcagtggaagcataaagtcttaagcataggggccacaagggaagtccctgtgactccaacgctttaaatctcattgatgacatcagcctcagaactggtgggatgtgccctgacacacacaagatcctatgcacctgtatccctactctgaggagaacctgcctgtgctttacctgcttccctcacatggacagaattgccagctgggtcaggatctgtaaactgcctcttgaaaaagcctgaatggaaataggaacaacttcatcctgcacacataggcagcatcagaaaggaaacaattctctctgtggagctgcctagaggatccactcaagacacttaccagttctttcttcttcatgcactccatgatcattgcaaacagctgatgtgattgtgtcttgttgtaattaaatgttttttggatggtgactataagctgatccctgagggagtcattgattaacctgtttgaaggagatgggagaaagaagaaaacacaggtgaaatccatatgaataaatctatatgagtcaggggcccccagcttccaagatctaataatgcctgatgatctaaggtggagctgatgtaataataaagggcacaatcaacgtgatgtgcttgaatcatctcaaaaccatccctctgtcccctgtccgtggaaaactgtcttccacaaaactggtctcaggtgctaaaaaggttgaggactgctgaatgtgatactgtctggtatctttgttttgaaaattaaccactggaggatattccaggataccaggataggagaccaaaagggaccacagtcaacagctgcatttacacttgtcctaaatttcaggctatgtgagtacttagtcgctaagttgtgtctgactctctgtgaccccatggactctagcccaccaggctcctctgtccatgggatttcccaagcaagaataccagagtgggttgccttttcctattccaggggatcttcctgacccagaaattgaacctgagtctcctgcattggcaggcagattctttaccactgagccagctgggaagctccaaatttcaggctactaggttgaaaaccttagaagggaaaatgaagttgagagagaatgtataccctccccctgcccaagaaagaatccataagaaacattgcttctgagagcaccctcacttactgaccctgggaagtgggagagtagagctagaaaaacttccttctcttatatttttgggctggctagccataccacgactccttctgggcctcacaagaggcaattcaaaccccacccttcctaacatgtcagagctcctaccctccttcctccgagtacttgtgggcaaaggacaggatgtctgaggcccggccgctgccatcgcagaccaccacggggaccggcggctcttctcggagatattccaggacgatggaaaccacgttcgggcccccttccaccacaaggcccacgaggggcacgccctgccccagccctgcaacacataccacatccaagttcagaccactgtcaaggccccatctgaccccttgctctgactcctgaaacatggggaagaaggaaacccttaggcctggacgtgcgcttacagagggttagttttcactgggagagttgaaggccctcaggatgtgatggctgctcacgttcttttattcaaagcccacatcatagccttgttggaaaaaacagagccttaaaatgacgaacttgacaatacatatgtggttcagctgtatgttttcactcacatggcttacaagctgcttcaaggtgagatgcgagaaacatggaagattcttcttgctaaaagaatacttccctgctgccctgtcctgggtgatgttcccactctggatggctgtcccttcaagaatgacactgcagatggtgtctagaccagtgctaggagagctccattctataataccagcctcacgtgaattagccttatgacatggggccagtcaccaggccaccctgaactgcagcagaccatcagtaagaggtgaatcaccccaaggcctcctctgcctcctgaaggagcaatggatgtaaagtataagaatctgtgaggctgtcaagtcaaggtgttctgtcaacctcaagtggtgctatgaatgtgcagtgttgttatagtaggtatagtagctgttgattagcctccagtgcctggaataggcagtgagttatctaggagggcaaagccatggaccatcattagctcgccagttaataactggttcccataaagaatcatatatatgtgtgtgtgtgtgtgtgtgtgtatatgtacacacagttgtacagcagaaattaacgcaacattgtgaatcagctatatttcaataaaaatatactgattaaaattgtgtttccacaaacatcatatatatatgtggaatctagaaaattggtacagatgatcttatttgcaaagcagaaatagagacacagatgtagagaaaaaccaagaggtgggggagtaggatgaattgacagattggggttgacatatatatacaactaggtgtaaaataagtaactaacaagaacctattgtacagcacaggggactctactcagtgctctgtggtgatctgaatgggaaggaaatccaaaaaaaagaggggatacatgtatacatatagctgattcactgtgctgtacagaagaaactaacacaaccttgtaaagcaacttcactctcatagaaattaattttaaaaaataataacttcccccagagtcctccctctgcctctatgagatgacaggactcttctgaacatggtaggacaagccgactctggtggcagaaccagaaggtgggctctgggaagcaggtggtaacaggcgtgcctcaagaacccaggattctgggtgggaagggagatagtgggagtgaaggggcagcagagacccattttcctacttcacaattttaccctcaaactggccaggacagactatgttctgagcatgtttccccagtgtctgtttgttgtgatgggagttatctgatctcggtaaataaggtagtgaatagaagacatgtccttggtttcacagttctgaaggactttggataagaactgccagcacagttgggagaaagtctaagaacttcaagcagggaaattgagagtttctggtttgcttccacaatgcatttctatagtcagtaactcttaaatattttgaacattttttttttttgtctgcacttcaagacatacaggatcctatttccctgaccagggctagaacccatgtctcctgcagtggaggcatggagtcctaaccgctggactgacatggaagtcccattgtgaacagctttgcagtctcctaccagagtaatctcagttatattcatttcagaagctatgtgttgagggtctggtatgtaccaggcaggctctttagccaagagatgctggagaaatggaccaaccaagagatgctggagaaatgaatcaaccaagagatgctgaagaaatggaccaagactatgcggacttgcccttgagattttcaacctctgcaaggcttgacatttgagatcttcaggacttcagggacccaatcaccttcttttctagaaacagaggagagctggttcttcatggttcaggctggactattgaagctccgtgctgtgggaggtgacgactgagcacccctttgctgtccctgccccactcagaaccctgggcaaaggatgacaaagggaagcccacaggtcacacggccaggggaggctgggcggtgtgaacatgcacgtggccagaacagcaaaaatgtgagagccatcagccaggcagctgcttcttggaaatccacagcttttcatagcatgctgtctcattccaactacactgcagccctacagaccctttaattatgatttacaatgaccatttcccaggtctagaatgtcttttgcaatcttaccaataatggttacaacaaaataccctttaagatcatttgaccattgtttgacattaagaatcactggagtctgaacagtcactttgctgtacagaagaaattaacttagcattgtaaatcaaatatactccaataaaaattattttaaagtaactacagtcattacaagaaatgagaaccactgtcaacatggtggggaatgccatcaccatgacaacagctgcagggctgtttcttgggtctgcactccttgtgaacttggggaaaagcatcctagtgcagctcaaggagtgggatttggtcagtggccaagggaaagggtcttgccatggtcgaataggagtcgggggaaggctgtaaatgtctgcgggcagtctcttctccagcctgttttgtaggacagccccaacccatggaacaacttactcgtgttgatcttctgcaaagaaatgtgcttctctagctgccgtctcagcatcacctcggccccgtacttgcccagggtgccattgtcagccaggatgaagtgcgtgtgagagttgttgagcacggagagcttactcagggggttggacatggtctggtacacccgtgtcacctgatgaaatgcacagcacagttcagagctgcagaacttcgacagtaaaactaccaggagaagcaaaaacactcagatgtggagctatggcttcatctaattgtgcacttcaacctgctctgccttccctagcctctctattgaaagtttttttgtttgtttgtttgtttctaatttttatattaaattagaaaaaatacttccatcatgacaacccagtatcttaattttgcaattaaaaatttttttttcatattttggccaaacctcatgggatgtgggatcttagttccctgaccagggattgaacccacatctcctgcaatggaagcatggagtgttaaccactgaagcaacagggaagtcccgacatcccaacattttagatcatgcccttcttcaggggatcttccctacccagggatagaaccttcatctcctgcactggcaggcaggttctttactgctgaggcactggggggtggggggtcagtatcctgcttgaagtcttgtatcatcgttttgcaagatgttactgctaaggaaaggggaaaggctacattagacctctctttattatttcctacaactacaggtgaaatctacaatgacatcaaaataaaggcttcagtttttaaaaattgcatacctctggggagaaaatacttacatcccttcctaccaggtcttccttgttctccacaatgccccagggagcaattcctatagcacagacccggcctctggacttggaggagtggtccttcaaggcatcccccacgtggctgatgacacctgtgagcagccgtaagtcatatttgcaggccctttacctcccatcaaatcacttttcaggaactttagggatccctgctctgagctgctccacttcctgcagaacagggttgaatcactgaaagtctgagctcataaaaactagtcatcctgcattagctcctaggaaagggaaaataaaaaccaaagcaactgtacaggaattttctttacaagtttccaagacctaaggatggatgaagcaagggtctccctttgtctgcattcagctaaagctgagtcagatggccaggtgtgtttctcaacctctctgggcctgtgatgggaaaagaattgtcagaagcctcagtgaaaatgaggttttgtccagagctcatgtcaaagaatagcatatagtaggtgccagagatgttgaccattatcatgatcataccaaaataaataccaagataccacataaaagtttcacttctgccataaatattattgttaccatccagggttcttggccttcccccatcaatagagatcaactagaggccagacaatattctggcaagactttattggggtccctgctgccgcaggaggggtagtgagaacaaacaacaggtgcccttgcttgctcccccaggtggggtgagctggttccttacatgcagtgaggatcaggagtgtgtccaggggtgagtctggaggggtggcttaggtgttttgcccacctattaggtggtgctgtgtgcagggggcatgcacaataccctgtttttgctcctgatcccctgcttttgctccaggctcttcagaagtggcagttatttttttgttttcagtctctttgtaactttgggtccagaatttgtcccaactgtgcatacacatagattcttttagtcccataaaaataactttatgagactctgtctttagttactttgattttgtatctcaaggagaggtgtgtccaggtgccagcgctacagtgaagggtctcaggacccagcctgtctcaatctcaagatgtagcatgttttgtttcttgatcttaattatcccaaagcttctagggaaccacagtgatctcagggtctgcacattcacagccagggagagggctgacacttacccgtgctgacgcccccggtgaagatccaggccccagtggtcatggaagccttgatcaggcctttcccgaagacctgcttcagcttgggctgcatctcaaaattctgaaggcccccatgcacggatattaagagcttggggagctccagctgccagtctctcaccatgagatgaagcagcgagtctggcttggtgtcgtaggagacccggatatactgcaaaagagggtgtggccctcagcaccctttcttgggtctgactctcgtgtcactgtcactccggttcaagtgacagcttcctgcctttctctctggcagggatctggggccctctgtgcaagtccgtggccacacgatgggaaggaacactggaaggttgccagattcggcaagtaaaaatatagaatgcatagccaaacttgaattttacatgaacaatggaacatgttttagtataagtatgcttcctgcaatatttggggcatccttaaaaattacatgttatcgatctgaaattcaaatgtaattgggggtattgtattttacctggcagactttatcttttattttttcattgccttgtgttgtgtgagtgttagtcgtgtcagactctttgtgaccccctagactgtagcccaccaggctcctccgtccacggcattctccaggcaagaatactggagtgggttgcatttttcattgccttaggatgatttattttgtcaaagttctcagccaattttcctagtatcagaacttctataatgacaataattaatactgagagtaaaaggaatcctgaaattgtccaatactgaaagatattactattagcaaagatttatttttaattatttaactagcttgttaaaaattatgtgcattgcaaataggttcatctgtaccatttttctagattccacatatatgcattaatatgtgacattcgtttttctgtttctgacttatagcagaaaataacacaatattgtaaagcaactataaaatatttttaaagtaaataatccccccaaaattaagtactgtcacacacatgcacaaatgtttgcaaattaacaaatttgtcagaaattttgtagaaacaaatttgtagaaaatgaaaccaaagttcaaaggaaacacactctaaaatttcaaagcaaagaccatttatagttctaaacgacaattgaaatacttcttcactgtgtctagcattcataggagcacagaaattcctccagattgattttatttctggatactttttgttcattggaaacttctaggaaatatgcctgttcggtttacaaaaattttagagcaacttaggaatttatctactttatgtaaagctttttaacaattggtcattgttgggctatattccatgtgctcaggatcagttgctaaattgcattgttcaagctagggattcctccaagcccgtggaagaaagtgaaatccagtctaatccagtgatagtcaactcaatccccctccccttccacctcacccaaatcccaaatctcagtcttcctggaccatctctcttttactattgaatcaaaaacatttataacaggtcaaagctgactgcggtaaagctctgtgcatgcttatgtgctcagtcgctcagtcgtgtccaactctttgcgaccccatggactgtagcccaccaggctcctctgtccatgggatttcctaggcaagaatattggagtgggttgtcatttccttcttcaagcggtcttcccaacccaggaatcgaactcgagtctcctgcattgcaggcagatcctttaccgctgagtcaccagggaagcctatagaacccaaggtgtgggggagggataaattgggaaattccggttgacatttacacacagtactatacatacaatagaagactaataaggacctcctgtataacacagggaacttgctcatggtctgtatgggaaaagactataaaagattggatatacatatatgtatagctgattcactttgctgtacaccagaaactaacacaacattgaaaatcgactgtagtccaataaaaaaattttttaaaaaggtcccaagctggctcagctggaatgtgtctccagatactggacaggatgtcttagagggaatgggtgctggaaatggggcttgtaactgatctcggggctggacctttcccttaaggtgaagaagaggttaatgagtccatgcactggccctgtgaaacgcctctttgtgtcctggccagtaggcagggcaaccttctggaagacccagtgctatggtatttgcttggaatacttctgaattttatctgaacaatgatgttgggccagtgaaatagaataaaatagcataaatggcctgacagggaccgtgggagtattatttagaatgggctgaaagggatcccagtgctgccgcctcccctctctggcagggctcctcagaaaggcagagggcactccctgtttacatgcaaatgtgaaaggccgccgtcttcttgtcttctcggaccagctgaatgcccgccaagggaggctgggcttggacttcagagagaaatatttccaggcgctcctcacccatttaagggtggctcagtgcccacagttatttaatagaaaagacaaaacaaagccccaaacaaccctaaaaaccaaatgacataattcgtctcttatccctggagatggaacagtatctttgtagagtccggctggactgtgattcttagtatagattttactgtttccctggtggctcagtgaaaagaacccgcctggcagtgcaggagatgcatgttcgatccctggttcagaaagatgccctggagaaggaaatgacactccagtattcttgggacttccctggtggctcagacaataaagaatctgtctgcagtacaggaaacctgggttcagtccctggaggaggaaatgacaaccccctccagtattcttgcctggcaaattccatggaaagaggagcctggagggctacagtccagggaattgcaaagagtcaaacacaactgagcacagcacagcatgtgctctttatcatagtgcccagtttccaaatctcatggctaaaaagtggagcgtgcagatatatttcttgtctttacaatgaaaactctaggaagattgcatcacacccttgaaagaatacccaggtgtctacggtctcagagtctgggaggctgggcctctgatggaggctgtggcttagtgacaccccttcccaagcctctcttaccatggctttgttggagtatccgccgccctgaaattcgagaatcccataggaatctgtggggtacttctgggtgtgtttgccaacagaccatttttcaggttgaacttctgccagcttgttttcctctccatttttgctggctgttacacttggcagaggggggatgtgttggttggtgagctggccacaacaacacctgaaaacaaagacaaagcttggtctttctagaacattctccttcttacgctgcattaacctgaatagaagcagactaacaccttcctcatccagttttactggggacagaaataccccttatggtgtccttttccagataatcagtgcatatctatttccacgccagactattttaaacacaatggatgactgcccttccttactgaacacatcttaattctctctttttttttaaggattgttgtatttattttaaaatttttattaaaatatttatttatttatttatttttggctgtattgggtcttcgttgttgcatccgggctttctctagttgcagtgagcggggagtactctatagctaagctgaggacttctcattgcagtgagcttctcttgttgtagagcatgggctccagagcacaggctcagtagttgcagcacagggatttagttgtcccacagatgtgagatcttcccagaccagggattgaacctgtgtcccctgcagttggcaggcagattcttaaccactggactaccagggaagtcctttaattctttttggtgttttgacaacatgattatggccaccaatcactgaaattctgtgacaaaggacactcactctccatccaccccccatatagagttgaccctcaaggatttttcaatattgctaaattcttccattgctttagtacaacatttctctacacaagttaacattgaaagtgtatttgttttgctgctcatacttttggtgtcaattcaaagaatcatttgccaaatccaaggtcatgaagattaacttctacgtttttgtctaagaactttatagttttagcccttatatctgatatgtgatagatttggagttaatttttatatgtggtgtgaggtaggggcttaaagccattcctttgtaccttgatgtccagttgtttcagcgtcatttgatgaagagactaatcttcccccatcaggttaggtaaccttgccaaaaaatcatagacaagtcatagacaagtgagtttctttctggactctcagttctgttacattggtctttatgtctacccttattccagtactacactaccttgattagtgtagaactgtagaaagttttgaaatcaggtaacatgagcccttctactttgttcttttttataagattgttttggctattttggatcccttgtaattccatgctaatcagcttgtcaatttctataaagaagttacccagaactctgatagggattacattgaatctgtaggtcattttggctgtctgcatcctgacagaggagtttatagcccaggtgactctctgcttaatgattcacatggagaataagttctgggcatccttgactcctcctccctttccctcaaacaccagaatagctgctggcagctggtggacaagggctattttgaataacatcttaattatggcttccaatttacctgtttgggtctttagtgctgggaatgacaaagatacattctcgtttgcaaaaggttttttctatccaagctttctgtccctagaagaagaaaaaagtggacattagactgagatattaccaaaccaacctcagaattcattattttacttttataaaatgaatagtaacagggagtctgcccaaaacatttgaataaacacctccaagaatggtgaatgcaagcctttcaggatcttagctctggtttcttttaagagaaatggctcagaaatatgcttttgtggtttccgtagggctaggaaacctgtgctttgcatgaaaatcagagtctacagatggggaatgttggtgcccctagagccagccagtgccctgcggagcctggtgtggacatgagttattggaaaagctgacaaaattgtcagtctctgatcaggtctttgttttgttttgtttttccttaagatgtgtgtgtgtgtggaccatttttaaagtctttattgaatttgctataatattgtttccattcatgttttggttttttggccacaaggcatgtgggatcttagcccctggaccagagatggaacccatgtctcttgcattgggaggcaagtcttaaccactggaccaacagggaagtcattctgatcaggtcttcgatttgctgacaagaacctggtcttctctagactcccaggccccattgcactatagtcattttataagtaatgtttctaactggtgctcagattcaccaactgctatttttataattaaaaatattgaagattgtgaagaactggggcctcatgtaacattgatgctggggctggaaattggtccatttaccatcaggggtaatttggcaatcatttgttgcaattacaaagcttatatgttttcacttgtcattttttaggattttattctacaaatatgcctgaacaagctgacacaggcccaaggctatttactgcatcactgtctgtgatgtcaaaaggctaggagtcacctactgcttatcagtaggggattgttacccaaatcatggaatagtcatcgatgcaattctttgacaaaacaaaaacattttttgaaagagaataggatgttcttgttctatcgataggggaaaatcattgagctatggtaagtgaaaaagcaagccacaggataatttctagaaaatagacaccatgtatgggaatgataccccaggagcagctggcagtgggtccctcagagggagacctagaggcctcagggacctgggtggaaaggaggtgcccatagcctggggccctgcttagtttttttaaagatttgtcaagcttagtgaagtaagccataaagaaagacaaatatcgtatgatattgcttttatgtggaatctaaaaatgtgatacaaacaaacttatttacaagacagaaatggactcacagacacagaaaacaaatttatggttaccaaaggggaaaggttgggggggagggataaattaggaacttgggattatcagatgcacaccactatatataaaacagataaatgataaggacctactgtatagcacacggaactatactcaatatcttgtaataatctataaaggaaaagaatatgtgggaattccctggtggtccagtggttaggactcagtgctgtcactgtgggacctgggttcaattcctggtcggggactaagatcccacacactgcacaatgtggccaaagatacatagatatagatacagatatagatacagataactgaatcattctgctgtacacctgaaactaacataacattttaaatcaactacacttcaatttttaaaattttttaaattaagactttctttttttagagccattttaggtttaaaacaaaactgaaagggtggtacagagatttcccattaactccctgccctccatccttatcaacgttctcctccagggaagtgtattttttaccaaagtcgaacctacattgacaaatcattaccacccgaagttgatagtgtgtgttatttcactcttggcattgtacagtctatggtttaacaaattaaaatgacttctatccaccattatagtatcatacacagtgttttctacccccaaaatcttctgtgctccgcctattcatccctctctcctcgtaatctctggaaatcactgaatttttactatctccatagttgtgccttttctaggatgttgtatagttggaatcatccactctaaagtccttttaggctggcttctttcacttgcaagcatgctaagtcacttcagttgtgtctgactctgtgtgatgctatggactatggcccttcaagctcctgtatccacgggattatccaggcaagaatactggaataggttgccatgcctcctccaggggatcttcctgacccaggaatcaaatctgtgtctcttatgtctcctggattggcaggcagtttctttaccaagcagtgtcacctggaagccctttctttcacttggttgtatgcctttaagcttctaccatgcctttctgacagataagtcttttttagtgctgaataatattccatggtctggatgtaccacagcttatttacccatctaccctctgaagttgtttgcatctaaattgtgtcagttccaaataaagatgccataaacatctgcgtgtggttttccatgtgggtgtttaagttttcctgtttaaaaatctgaatgatgtgaatgtatgaccttggtgtgtagccatccttcaagtgtgacatagaccctccagggcctgtgactaataaatattcctccagcttcccttggtcttcgctgaagtgtattttgcaatcagaataagaaccacaagggctagggcagccacattagtcctagaggggtgatgtctgtgtggctccctgcagtgaggcctgggtgaatgccctgggcatgcctagccaggagcttcattttccacaggctgagaccaacatggttacacaaagcacagagctcaggagacgggatcatcagctgaccacacatatacacgtatgtatatttatttcctggctccatctaccaaaagggcctaaaaacactctgacagaaataaatatacttagtgtgcaaatatttgtttctaaacaacattctccactaaaaaaagccagggctcctaggacaaatgactgaatccagatctggggcagagaaagtacaagaagagcctggaacatcttgtgccagaaagtaaggaagtgtttactttccacttgggaacttgtcagaaaatacagaaccctctttgaaagggctctcattggctttatctgagatacgagcatgaaactaaatgatcacaataaagaactgtaacactttggctgaaataaggatccatgaactcacagtggcagaaatttatacgtaaataaatatataggggagatgggaaagctctttcttgcatttcttagtcaccctcccgatacagggggcccgggttccacccctggtcagggaactagattccacatgccacaactaagacccagcacagccacataaataaatatttaaaaaataaagaaaaccaacatttggcaaccatcaagaatctttgttgaaatctacatgccacgggtaaaggattggagagtaacagtacacttacataatctcaaggcatctcccacagatatttttcagtcacaaaggggaaatgagtaacctgacaggttggagaaatctggtgaataccacctaaaataaagtgagctgtcaccagcatgaaaccaatattcaccatgagcctctagatgaaatgcagagaagaaaaattgcctaaaatgcaaaatctgaatctaacaaggaggaaactttagacaaccaaactgaggagcatcctggaaaataaccgaaatcactgagctttaaaactccaaaggccgtgaaaggcaagtaaaggctggggaacggtcacaggagctatagagacatgaccctggaacacccttcagttttttgcctcatctttggccctggcccccagtcccgcccaccctttctgactcccaccctctgatccctctccaggccccactccctgtaatggctcattgacccttcctcccagtgcctccaccccacccctgcataagaaacccttcgcagaaaactgttagtaaccaggtgtgggaaatcaggggagcttcccgggtggcacagtgataaagaatccacctgctaatgcagaagactcaggtacgatccctgggttgggaagatcccctggaggaggaaatggcaacccactccagtgttcttgcctgggaaatcccatggacagaggagactggtgggctacagtccatggggtcacaaagagacggatacaacttagtgacagggcacacatccatgtatgcatgtgggaaatcagaaatccagggtctagccccttaggaaactaggctcaggcccctgccatcacaagggggacaggccatctgccatgcagggtctcgaatgctgaggtgggtaaggaactgggccggcagtaacgtgcctcagacatagtcacatctattctgtcacaggcagtattcaaacgcccccaccacccagtgccccaggcacccttcctgctggtgcagggcatctgtgggcctccaggggcatcagcctggcatctgctcccccatctcaggagggggcttttcaaagcgcccagcactgactctgcttgtagccatgggcaagggcagcagctggtatccacacagctccaggctcaacccacttccctctgcttcaccaaaaatccattctttttctaatgaaaaagctagtatgtgattaccatactttccctgaggaaagaaaggctttgcactagtactaactctgaatttttcttattctttttttagtttagttaggaagaatcaattccaaaattccagttactgcttgttgttgttcagtcactcagttgtatttgactgtttaccaccccatggactactgcagcattccaggctcccctgtccttcactatctcctggagtttactgcaggcactcctgcaggagaccgagcaggactgtggctcctgtgatttttgtgggagattcatatccatcaagtctgtggtgctatgttactgcttagtctccagaaatgttctagaatcttctgaggatgaacaagaggtcccggaagtcactcactctatgcctgcagtcatgcttcacagggtctattttctgtcaagaggcccagcagggaggctctctggctccctgctccccagcccctccagcaagctattcctacacaccctccctctctcatctgacccttttcctcccacaagaatctcggaagcccccgccctgctcggtctcctgtagaagtgcctggtggaagggtggtgctcactgtcccctggtgactaaggggtgattcagaagcccaggtggagtgtggccagggatgagggcagcagcccacccctgggcccctgagggcagctgggcacacagagcagggagtcacccaggtcagctgacgtggggcgagctcagtctcagaggcaaattcaggtgagaggcgatgggtggagggccccttggtaaacagtcctcccagccctccagaggatgccccagggctgagtcaggccaagggattaaggaagggcatgtgggctgagatgaaaggaagcagagcctcctggggttcattcataaaccctccaagtccccccagcccctaggctaaatcccgctcactcatctgaagcagtctcttccatcacaaatatttatattattttatttttttaacagaaattgagaagcattttattttttttcagggaagaagtggttatttgaaatgccttggggcagggtgatgggacccctgtcccggggattaggctcccatctgaaagagtgcaggaagctgagtaggggatgtgggagcactgcccaccacactgagctgcaactttcctgtctctgaaagggacactgctttgcatagttctgagcttcaactgagatgatattagtgccatatttgggaagtgctacaggagatatggattcaatccctggttcaggaagatcccctggagaaggaaatggcaacctactacagtattcttgcctggagaattccatggacagaggagcctggtaggctacagtccatggggtcacaaaatagtcgcacgtgaccaagcaactacgcaggcacacacacacatttaaatggaaatcctggtcattccaacagctcccctcccttatctacagaggttacatgctaggaccccccagctgatgcccgaaacccagataggaccaaattcgggatatactatgccttctctcatacatacatacttatgataaagtttaatttatgaattaggcacaggaaaagattaacaataactaataatagaataataactaataataaaataacacaaatgaacagcaattcctaataatgaaagaaaaacccttgcctggtctggcctctagtcaatttctcttccttggggaagaaggttcagtagcaggcagatgggatatttggtggtgctgttggggctgggaaaggacctgatgttgatggggatggagggacgggaggggcctaatcacgaacctaggtttctggctggtggagctgggtggctggggctgcaatttatggaggtggggccacgcaggcccaggcttgaggaagacaatccagccccctgcagtgaacaccacaggctccaggtacccattgaacctgcagggagggaaaggggtcagctggttgcatgaatgagacccagggtatagcaatatctagataactctagataatgggaatcagagagattgctgatggagagactgcaggaagaagagaggaaggtgtctggcactgagtccccaggagcaggggagagggctggggacacaaggtctgggaggtagaggacagacacagtgtctcaggagcctgctgaggatcgtgtgtccttaatggactagccaggtttgtgggagggagctcagagtggagtgggctgatggccctgccagctcatttttttgttttattttcaaagaaaggaaaaaaaaaaaaatgtatctgctattaacaataaaaagccccaggtaacccttatacatcctggggagtaaccaccagatctcatgatcaggtcatttgctggccttttatgtggatttagagccaagtcctgaggagctgtagacagccagcctcacccccccacccccacccccgtccagaataggggtggcatcaggaccttctggaatgggttcatgtggatggggaggggcctctggggaggtgtgggtgggaggagcagggcagggcacagcctggagaaggcagggctgaagtgggggtgcccagggaaggtggggagggtggggctggggcgacggggcagcctggtctgggcctcaggaagtggcttcggaactaagagctggtttgctgctgggtgagtctctgtttactcagtggccctgcttcttgggccaaaattaacagcaaaggccacagtgaaatgatgatttgtggaccaatttagccaaaagaaaccgctggtctcatgtgtctatttagagcagacgtcttgcgctctcatccagggctgcatggggcccacacgtggacttggtttgacccttgtatcaggagaattcgctgctgttattaacggcaagagaggtccccgtgtgaaaaccttgacctctggctgccctgcactgctctggggatgtgggaactcgggctgacagacctcctgcatggctgaggctgtgagtaccccgacaggagagatgaggaaagtgctcttgaagaggggacagcaggacagggaagaatgccaggactcccttctctgctgtgatgggcacagtgatgcctgctcaaacctggatgcgtttggggtgggggccatgcagagaccatgggctcccttactgtgctttcacagatgaggagacagacagtggaggggttaggactttggtaggagctctgggaagtgatggttggatggcatcactgactcaatggacatgagtttgagcaaactctgagagacagtggtggacagagaagcctggcatgctgcagtttatgggtggcaaagagtttgacacgactgagtgactgaacaacaactgggaagttagggggcatcgagacataagacacagtgacatggtgaagccacaagcttggccagtctcattgccaggtggctgggctgactcccctgcatggctctgtccctcatctcatatctgtcttctctggcagattcaaaaaactttctccaaaatgggcagatgcttttgaggtcctccctttaaggaggatagagaatagaactatctctattttgaattaaaaaaaaaaaagttgtaataagatttttctggcacaatctagctgtgcaagaaccacccttgaggtgtaaatgtcgagttcaccatggcagccataggtagcttatggagcatcttaaatctgggtggtctgaattgggatatgctgtgaatttacatgtaaaacagcaagttatcatttgccatgtctaacactggaccttaggaagaaaagtggggacttccctgaaggtccagtgattaaaacttcaccttccaatgaagggatgtggatctgatttctgtttggggagctaagatcctatgtgctttgcagtactgtcaccccactcctcccaccccagaaaagaaagaaagaaagaaagaagagaaaaagtgtttgggaggatttttcccaggtggctcagtggtaaagaatctgctggccaatgcaggagatgcagcagaagtgggtttgattcccgagaaaatcccctggagaagggaaaggcaacccacttgagtattcctgcctagagaatcccatggacagaggagccttgtgtctgtggacacaacagtcagatacaactgagctattcggtgcgaacacattaaaaaactaatacgctctttatgttgaccacattttgaaatgatcatatcggggatatattgagttaaatacatttttatatttcactaacttttttaacatgactctactctacaatgtacaatgatgtctagggacagatctctctgcatactaatgcatccctggtgactgtctttttaatggaagtgtttaaatactgaatgccattaatctctaggtcagggactgggtctcattagtcctctggatgagggcttctattttcccagatctagaactttaacacacacacacacacacacacacaaacgtgcacatatgcacacaaaattatagaacatctttaaaacattttcaaacaaagcaagagagaattttctaagaatacctagtgctccaagtcaagaggactgtaagttaatagaaagtctgctttgttttcacttagttcagaatgaagaccaaccacttaaatgcctgcacatctttctgtgccttgtacttatcaactttgcaaaacaaataaatgaagtttcgaaggagccaaacccaacacaagccctgacttctgctgaaaaataactaataaaacataaaccatgacagcaaataccctcggcactggttaacatttccagttacattttctggggcctaaaatacaaggcagggaacgatcactttatgggacaagtatcactgcaaatgccatgaatcaaaactgctgcttgaagggcttccctgggggttcagtggtaaagaatcctcctgccaacacagaagacgtggatttgatccctgattcggaaagatcccacatgctgtggagcaacgaagcctgtgctgtagagcccagaagccacgattactgaagtctgtgtgccccagagtccatgctctgcaataagagaagcctgagcaccacaactagagagtagcccccactggccacaactagagtgatgcccacacagcaatgaagagctatcacagtcataaataaacaaatcaaattatatatatatatatatatatattttttttaatgttgctcaatagtttgcaaaatgtaatttggtgaacattcccaaagacaaccctttcccaaaatcagacctgtattactaaggtcctctcccagagaggccgattgtccctcttatttcctccataaatacttactttaggctcagcaaatctgtcttgtctttttcctcccaacctctctcccttcttttattcccgtctcctacccctggtcaactgagaacaaatcctgtgaatattttcaacattccccacattcccaccatttttgctaatatttgctaaagtttacaatttttctggtaacaaaaggaaaatgtatctcttattgaatattgttaaagtaaaagaaaaagaaatgtacaaccacaaaggaataaataaacatcacacaaactaactgcatttaaaataatggctagcatttcaacgtattccttggctctttcctatgaatagataagatgtgtgtgtgtgtgagtgtgtgcacgcgtgtgtaatgaaaactatgattatcctgctttgtcgttattcattcttctctgtcgtttaaaaagttaatacattacaaagacttccctggtagtccagtggttaagacttcactttccagtgctagagagaagagttttatccctggtcagggagctaaaatccttgatggctcaaggcccaaaacccaaaacatacaacagaagcggtattgtaacaaattaagtaaagattttaaaaatggtccacatcaaaaaaaaaaaagactacatttccccttgtagatagaccacgattatgtgtccagtcctctatttcagcgtttggattgtcccctgtgtcttactgtagtaaacagtgctctataaatgttggcttacatttatattaatccatcaggattatttccttaggacatatccttagttgtgcagttgttggacttgggcgtatgtgcgtgctaagttgtgtccaactctttgtgaccccatgaactgtagcctgccagtctcctctgtccatgggatttcccaggcaagaacactggagtgggtttccatgacctgttccagggggcatgcccttctccagggatcaaacccacatctcctggatctcctgcactggcaggtgaactgctttctagaagccagctcccgtttcccacccctcgccccctaggagtgagaaggaatctccatcttccttcacagccaatcaatctttccaccgaggttttaactaacagctaaaatgtcagctgataaagtcttacagggacatcccagccaagaggaagacgcacagatgcacattctgcaagaagcaggggaccaaggtaagatgctagggagtgaaggccaggaggccaagccctggagctggcgcttctcagcagaaccccagcatctgcatttagacaatggagcctggtggtggccggttccataggcttgtcccttcagggaacatggattcactggcccttaccacatgaccttgtctagccaggctccacaggagaggagctggaggccccaggaagctgagtcctacctccaacacgcccccacacctgagcttacctgccccagcacagggccaagagggtgcagctggcctctttccgcctcctcctctggccaggcaggaggctggccgaggagggcccaccctttaagaggaggcgtccacatgaggagcacgtgagcccccatactgagctctcatgatccccatgaggcttgtgacctcacttccaggcccaaaaaggaagccaaagcccagcccaccaggctgatcaatgttgatgccacgaaagcagccttggggtctggggaggcgggaggaggggagtgagaactttccctttgaagtgacccttcccccagcagcccttcccagctaaaaatgtcagcactgtttgaataattgaaacaattggacataactggctctttcagcaggctcttagcttgaaggcagtgccctaattaccctaatcctttcatatcatctgaggctgggccagaggtcgaggtggatgtgagtcccgtgtgactgtcagccttgtcttggtgcccctgagccccgggtccccactccgaccacagcccgagcgacctatgtccacactcaccccacaactatcctgatgagagcttctgaggtttgctgtaatgattagtccagtgatcaaggagatcaaacaggtcagtcttaaaggaaatcaaccctgaatattcattggaaagactgatgctgaagctccaatactttggccacctgatgggaagagctgactcactggaaaagaccctgatgggggaaagattgagggcaaaagaagggggcaggaaaggatgagatggttaaataacatcgccgattcaatggacatgaacgaggaaagaagaaacctgagccctgaaattctcccacccatggccttccactcaacgaatgcctccccagcagaggaggctgcaattctcctcagcctgggttccctctgtcctccagaggaaccaacagagatgcaggcagactggaccccaggggcattaggggagtttccattttacagatgaggagactgcggatcatgtgagtcaagaggctgtttgcccagacattgtgagaggcgggcaggaccctgactggcccaggctatcaggtccaccctgtagagctcccgggactgcaggccaagcctgggaccaacccccaccaccagctgcaggaggacgtacctacacctgggggatgcccagaggcttggggagcctctgaagtttggaggtggatgcaggattgtgcagggggcctggggaggacaggtctatcctttgctttcagcagcttgtctcaggtctctgcccactaaagggcagagacatctttgacatctttgtcccagcaggggtgctggggttgggtaaagtatgattcctgccaagctttgcctatgtacacagcctggagtgagttggcagtgcccacactgaagtagctctggcctggcagcagggttatatgccctgtagaccacatccctgatgggctcacaggttttagcaggagtctttctgaggctgcaggtggctgtaggtctgactgcatggctcgagggaaaattatgggtgctgggtgcttctggggcatcaggaatcagactggagcaaccagggaggcctcccaccttccctgtggccgcctctatggccagccccaccatggctgcagaacatgaagcctggtggtcagtgccaaggaccaagcccatcctagccagccagtaagtggctctccagtcagtggacatgactgtcattagtcatttaggcccttctcaggatcagataagatggagataatgggatacccagacttctgcaagccaatgcccatcctccccggggccagcatgctgagcccagtcccctgggactgctacgtgcaacatggtggccccagccccatctgcctgctgactgagaacatgaaacatggcctgttcaatctgagatgaaatctatgtataaaacacatgaaatggccaagactggtgatcatattttttactgtttgcatgttaaaatgatattttggatgtttgcagttgaataaaacattattttaaaaatattattaatattttaatatattctattttaatattttaattttcaatataattaatcctaggaggaaaatatgagtaaattttatgtacagtttgattccaactgtaaaaatatacttagagaaaaaaggaccagaaaggaacatgatatgctaacaggttatgttaataaaaataaatgtgatttttatcacatatattaatttatataatatgcataaaataaaattcatcatgagttcgtactgataatttcccattcacatttagaaacagtgattttctttaaactccttgattttatatttatgtctctttttctttatgctctcttatcttcaggtcattgacacagtttctcttttgctttatcttaggtaaagtttcagagcaacagtattactgtgacccataaattactgaaagcagtttaaaatgttgttttatttttctttttggtctgaggtatatctcatcaagcacttcccaggtggctcaagtgctaaagaactcacctgccaatgtgggagacggaagagacatcagatctatgctgggtcaagaagatcccctggaggaaggcctggcaacccactccagtattttgcctagagaatctcatggacagaggaacctggctggctatagtctatggggtcgcaaacagttggacccaactgaagagacttagcatacacacacacatatcccatcagggttttcacatcacttaaaaatgattctgccttatatggctacttggcaaaaatgatacatagttggattcacttatggaattttcccctgggtttttagaaattggcttctcaatttaatataatcatataaaataggattgggggcaggaggagaaggggacgacagaggatgagatggctggatggcatcactgactcgatggacatgagtttgggtaaactccaggagttggtgatggacagggaggcctggcatgctgcgattcatagggtcgcaaagagtcagacaggactgagtactgaactgaactgaaaatgattacattattgcaaacttaaaactgcaaagaaggttttttcagaagtgtctggctactatatctatttcctcctaaagtttatttactttaaagtgtaaagtttaaaatatttttgtttaatctttctccttttgagtattggtatataatattaattctgtgtctatatagacacatgtatttttttcatggaactgatagaggactttatacactttgtcccaccttgctttttgtacttatcttctccactttggggaggcattacttagctgtgtctcatttctgttttgtagctgtgtatcctgaatccttgagtgaatgcatgaaaattcattcaaccagacagacacttgggtgagttttggtctttacaaatcactgagcagcaaaaagccttgccgtgtgtcctttgtattttgccagtcatctctaggttagtttcctagaagtgagattattggaattaagggtaaatgcacacataattttgctaacattgcaaagttttccttccatctgtgcgaccccatagatggcagcccaccaggctccactgtccctgggattctccaggcaagaacactggagtgggttgccattgccttctccgcaatagaggttgcaccatcttgcatttccaccaatattttatgagaattgtttccccgcagctttgtctatagaatgtgttgttaaacttttggatttttttgtccatcttattaagaaatgatgtcttaataagtatagttttcatttcttgcaatgctcttgtccagttttattgtttgtttgcttgttttttaatcaggataatcctggattcacagaatgacctgggaaatgtttcaccttttattttctataagagttggtgaaaggttagtattaattcttctttacatgtttgatcgaatttacaagtgaaaacatctgagcctggggttttctttgtgggaagttttaaagttaatagttcaagctctttgcttttcatagatgtactcagacttttctgtttcttctttagacagtctcaataatttgtatcttttcaggaatttgttcattacatctgggtttttagttgttatacactagaactacactggcatgtagttgcttatggttttcccttaaaattatcctttttatttccagaagatcagtggtggtatcctgtctttcactcttgattttactaacttgagtcttcttttttttttttttcttggttcgttaactaacttatcaatggtgtttatcttttcaagaaaacagcttttggtttcattgatttcttctattgttctcctattctctattatatttctttctactctagtcttatttccttccttctgcttgattcaggttgtttgctctttttttttttttttagtgttccaaggctgaagattagattattgacttgaggtctttcattattaatacaggtgtccagggagggatgaaaaagccctggggagtgccaagtctcaggccagcactggccatttgtaaatcctgacctagaggtctgtcccaaaggccttcttctgaaagtctcatttgatgcaggacttgtacctgctcaacagattatgctgctcctggaaatggctgcaggagtgagcatccactttcaatatttctgaattatttacatacattttaaaaccaggtagtgttgacttatggcctatgaccctattagcagaatctttgaaacaaagctgaaatgatagatttatcaaacaaatatattggctttgtaaattaaaattcacatgtcatcaaacaatgcctgtatacatgagcaaggtcagagtggacttgaaggcctttgatactgagatcaaggatagtcataaaaataaatggaaaacttgatcagacagagactgacaggtccatcaaaacctttgatcaccataaactctgactccatagctctggaaatcctccaccgactgacagaacaaggaaggtttttctactttggggaaagaagatcctcaaacatctgggacacaggcctgggaagctcacccctctccgtctgaaaagcagagggtccttctggtgaatctggggccacatagaccaaaatgcataggtcattctccaaagggtgcttctcggatcaatagttgaatatcggcagcagccttttcacattcactccccctctccacatggctctagactggtgaagacagagctctgatcattcttcagtggaggacacaggccaagagagtccaaatggacaacagcttcctatctaatcctgggcgctttctcttcatttttcctttttctcttctctttatttattttggcttctcaatgggttatgttgcaatgctggcagatgatatgtcctggaatcacaagcacatgggcaaaaaaaaaaacaaccaaccaaacattgactatattttagtttccagaataatctctgcagtaaaaagaaagctggtgattttattgtggaaatgaccaactgcctcagagctttgtagaagcctcacacttgtgtggttgttgttgttgttcagttgctaagttctgtccaactcttttcaaccccatgaactgcagcacgccaggcttacctgtccttcactatctcctggagtttgctcaaattcatgtccattgagttggtgacgttatcaatccatctcatcctcatcagcccccttctccttttgccttcaatattttccagtgagtcagctcttcgcatcaggtggccaaagtattggagcttcaacttcatcatcaatccttccaatgactattcagggttgatttcctttaggattgactagtttgatctccttgcactccaacgggccctcaagagtcttctccagcaccacaatttgaaagcatcaacttttttttaaattttaattggaggctaattacaatattgtagttgttttgtcatacattgacatgaatcagccatgggtgtacatgtgttccccatcttgaacccccctcccatctccctccctatcccatccctcagggtcatcccagtacaccagccctgagcaccctgtctcatgcatcgaacctgaaatgacgatctatttcacatatggtaatatacacgtttcagtgttattctttcaaatcatcccacccttgccttctcccacagagtccaaaagtctg

SEQ ID NO: 118 - DNA, 74879 bp, Hippotragus equinus
  source 1..74879: mol_type = genomic DNA
tccgtgagccccgagggggcgcggcccgggagcggaggggatacctgcggcctctgtaacctctgtccggccgccgcctggcacaacgcaacccttgcagccggcgcacccgcgcacccccgcacacccctggcacccccgcgctccccgcggccacgggaggggcgggcgccgcagccgcctccgagctagctcccagggccccgcccgccccctgcctgccccgccccggccccggccccggcgggcgccccccgcggcgctgccccgcccccgccgtcccgcgctgccccgggccccggcccgccgcccggctgccggcccacctggctcagcgccgccctcggagcccgcgcaccggcgctcacccgcgcaccccgcgcaccccgcggccgcaggagggcccagcgccgccgcccgcgagctcccagggcccggcccgctccggcgcccgcgctctcggggcggactcctggccctccgagatctcccgcccggcgatggccccgctcggatatttcatgttcctctacggcctgaagcaagcgctgggcagctacccgatctggtggtgagtgagccttcctcacgttctccccggcctgtgtgcgtccctcagtcaccgtcccctcgggcagggccccgcggtggcccggagcccgcgctctgccctgccctcctgttccgcgggtggtttgttttccttggcggccactttcgacctgttcgggccggggctgggacgcgggtggcggagtttccggggacactgatctctcgggcatagaggagctcccggcgtcggacggggcgagcagtgagactgcgagaggcagaaactggaaccacacgagtggcacgaacgcttgggcagcccgaggtcaggagaagccaggagtgcgagctaggagagggcgatccgcctgagactttccttaaggacatgtcttacacaccacacacgcgcacacacaccttaaagcaaagtcagtgagacaagaccgaacagctcgaagcagcgtagttacgtaaagacagcggggacccggccgggagtggcgggcgcaccggggccagcacctggccctgctgcgtcttcctgctgcggtccccaccgagatgtaagagggggcttcgggagaggtaaagagggagaaagcatcgagtttgagggctccttagtgagaggctccgcaaacccacatccgagacgtcttccaccccagacaagacaccttcccgtgaaaccctcccaaacctggtgatggaagggcagaggaaccgagagaaggtcccgagggtctacagcacaaatccggagaggaggacggaagctactccggtagagtccccacaggcaagggtcacttcagctccccaggggagagggcaggggctctctgagatgcccaagatttgacgaacacggctgggggaaatacgagagccgaggggcctgaacgcgccgctggaggagacccagatcagagacaagccttcacatacacatgcgcgcgcgcgcacgcacgcacgcacacacacacacacacacacacacacacacacacaccaggaactctctccgacggcttgcctggaattataataattatgccgaggggaagttggggcggggggagactgagtgagccgaagtacatctaatccgataataatttttctcttcgagattgttcaggagcgggggcgccctaggtgtggggcgcgggtccaggcgcagcctggcgggacggggcggggctcaagaaggaggcaccggcgcttgggagaggtggttgggagaggtggcggggcggcggcgaagtgttgcggagaccccggcgcgtcccgcacccgcgcggcacctgcagctcctggctgcggcgggcgtgcctacgaacgcggggacactgactcccggggaaccagggaagcgcgtcggagagagccctcggccgcctgctgccgcgggggcctctaattagaacccgccgccgctgcattcctgggcgctagaggaagcgccttcgcccccgcgcttcttccagaaagaagggccctgtcaccagcctctggccacccaacgccgttgaatgtttgtcctctcggccctgaaagtccctggccttgctcccctcaacacacctatgccacccctgccgcctgggccagatgtgttccatctgaaagatcctggggcttgcttggtgcttccggcattctccaggtgagtggggaggggcgtcctgtccccaccccctccctttcaatggcccacccaatcaagagtctagcgcaactctaaccccaaagggaagagcgtgccatggaaccgccccccgccccactttgctctccataggattctcgcactcagtggttctcttgtttcttgagaagcatctttgggggccacaacctcagggctcattgaggaccagcacttttctctcttccttccctctgcccccaggccatctggacacagcaaggatgtggtctctccacggtgcgcatgagcataatgaaaaggagggctcacaaagaaagaaatggcgtttaacagcagcaggaaggctctctatcttcatatccaacctaatggagtttcccacaggtggctccttctttttcttgcccaccccctctcctgcttccccacccctcagtgaggcattggagtggggggggaccctctctttataacttctcaccttcacactcagcctccctagttggtattccgtttcaccttccctccccaaaatgaagtcaccgctctcatcacttctccccaccccacccccaactcttgcatatgaaagtgaaagtgacagggacttcctcacctggagaaacaaggaaacagcccaaattgggagtaattaggctttgaagttggtgtagtcttggtgggagggtgcaaggggaggaggaggtggcgctgcatcccgtggggatttaaagagccaaccgcctccccaggaccatcttgcaagtgtccttcaccctagatgttcaaggtccaaagacaggtcccagcagaggcacagagagacagccctaaggccagaatgttgaaagttgctgagatctccaagaacgtgtgttctggtctcctcatgtgacagaggggtccagagaaggggcctgggaggtgacagaacccaggcctgggcacctgatcccagaggccagccaccagcatcccacgggctatgtactgcagacctacgaggaggcgccagccccttccccctcactcccctgatccagactgaattcttgtttaattagaattgatcggaaagatctgtgtgaatacagaacaggcatcatggtcaaggggaacacacagaaaccttgaagaactattctcagcacacagctgatgatgtgctgcaggcacctgccgcccacttcacatgtctgggctgatggcgtcttgtgagcccctcccctcccctggggctgaccctggaggtcagcctgttttctcccctgccccctccccacaaagccaggccccttcatctcctgcacgactgcaatgccccatcgcaccaccttctgcctctgttctcacctcccttgcaccctcccctctaaccctcctggagttccagcagcagtgtctttacctgcacagagagcctggccctccttgtcctgccggtttgcctttcctgccctccggcaccccaccagtctctgctgtacctagagctccccagcactgagtggtacctggagtggatgtcagcccagctgaccccggaaattccccgtgaggcctcgtccagtcttctcccacccctgagccagctcagcagcctgggacagactcccagtgccgcattctcgcttctccccactctcgctgcttctccaccctcctccctagcccaccgcactccacacttgtttgtatgcagacaccctgctctgagcatgtatccagaccctaaggaatgccagcttggccatcacccctccacgcactctagaactttctctctgtacaaccttccctggtgttggctctaactggttcttcccacacaggggtcttctcagtcccaggcggaagacaggcttccccccgtggaccctgatgtttgtggggcacaagtgcacgtggaattcagggagaatgaaagagagctctaaaggcgctatgtgggacccgcagactcaaagggggtgtgggggagagtgaggaggaggaggggaaggtgagatgagcagccacacagaggaggaggttgcttgtgtcagacgacacgggatctgggagggctgagcaaggctcggcggcttctcaactgggaaaggcccaagcaagccagactccccgagctgccgttcctctgtgagcctgccccaccgcgggcccctccccagggcagccctgtccctcctcccgattcttccttctcaccccaccctgtttgtccctctctccatgtgtgtgtgtgcgcgcctctctacctctctgtctgtctctctctctgtgtgtctgtctgtcctcgtctctctctctctgtctatatttgtccctctgaatctctgtgtttgcctctgtttctctcttttctggtctctgtgtctgtccctctctctctctctgcctctccctgcagccctgaggctggtgatggtaccagctagcctatgaaacgtgtgagaaaaacgtgagagaaatccagatgccagttcaacacccttgatgttgtaagatctcagggtactgggaatgatgttcctccacagaaccaccagtggacatccttttattgaagagcagtgttggaaatgaccataggtaaaatatgtatgaccagaaatcttgttttctatcaccaagttgaatatgcatcatcttgatcccttgaaagcccaccatggaactcactccttccagaatgcaaaagcatcacccgcctctcacatccagcttgatgtgacttggccacctacacacttgggactctgtctgggactcagatggggcagcttcccccacgctagctaaccctgcatttcactgggcttcttgtcatctttttaaatgattctgttttatttgcacaaatctcctagaattctttgtgacagcgaagagggtgagtaaatacaatcaaggaggaacacagtctggagaggctataaaatcacacttttcacggtgggtctcacttacaaatctccagcctggaaggacagaagttgccttgttccagaggggctctgccaccatcgtgcaggccaggacagggaaggcagggtttgggtatacctcctgtccctgaaagtatcggttatattcaaactgtagtccacagaccagagcccatccatgcatggttgttcatgaagaaataagaacagaagttgaaaataggtattcaggaagaatcatggcagtttaaaaaatgtgttatgtattattttagcagacttttaatgtaatttataataatggattaggaatttgtgaaaccccaaacccaagttctgtagctacaacgggcagcttctgccatgcccaagtcaaagatcactccccttgaggctccatcacccagcacttgtcgtttacatttttgagccaagtcttagagtttgtatttacccctttcaagtgcaattgaaggactggagcctcctgttgttgagaagtgttgggggaacaccccactgcagtttggtgtgtgagaagctgttgggcaaggagtactggacttctgtgtggctccagcaaactctgggagcagaggctataggtagccagaaggcagattttggttcagtataggaaaggcttcctgagtctgagagtgctggtagtgagctgcccatccacgaaggggcagaagaagaggctgaggaaggaacagcctgccttggttggggggtgggggtgggggcttcccatagacactacagcggctgagaatccaaggtttacaagacccagctcctccccctccccgctcagcactgcagtcctcctggtaagttccctaaactcccctaggcacagttgggatagttcacagttacacagggatcagtgagcccaccctggcatgcctttgcccccccacaccccggcagcatgtccctgcatcccatctcacttcctgcagccttactcagctgatcccagatctgactcctcactccctgccagactgggccggatgctgtagggtaacacgaagaggtggagaataaggctctgactccggccaggctgcctgatccctgtgaaacctgcccccccacccccgccacccctttgtggaattgtcattagaacagcacctatatcaccaggctgtgagatcctacggggtatgtgttactcttccccccaaccttggcccttcaccccccgtagctgttagataagactttgttgaacaagtgaatgaaggaataaatgggtggaatatttcctatgaaaaacagaaactgcattgggtagcctgtgcttggggacatgaaaacatagctgactgttttcaccaccccctcgactgaacccctggctctggggctgggtcccccgccatgtaccaggccagctctgcctcggtctccctcccagtctctccaggtgacaccctggaggtgtctcacactttggtgcttccacattccttccccgacgaaacgtgccgctgccgcccagggaagcgggcaaatgcatggccgcgggcacgggagcctctgcccgcctgctgggacttgcgcaaagtatgtgtcagtaatcccggctcggcccggtggggcaggagagggtgctgggagggctgcaggcagggccgcgcagcccaggagctgggaagaggtggcccccgacaccagggacccaggtctcgggacgcccctcctcatgggccctcccattgccgaaagtgctccagctgctggggaggggtcttccaggcgagagagagagccagaaggcacgtgggtccctctgggagatgtcatagtgggtagggagagaaggcaaaacatggaatgccttggggcaaatgagcaccctcgggggagtctgggtcctatgagcctcctgaacagctccatctagaaaggacagagcctacccatcaagctgcgtagccatcaacccacaaggcaaccagcccatattcaaggcctccaggctgaggataggcacctggtccagtcatggagaggccctaaccttagaagacagcagtttaaaatgggacagtcactctggaattctcatgagttacgaggaaagtccatgggaccaaccacagtcctcctctgcagaggccctacaggcagactgggcaaccagggcccccagatgaggaatgagcagagatctgtgccctcgaaggacaagagaaagtgtggccgtgctctccccttgtggcccacatgtgggaggctgggcagaaggagtggcaagcttcagcggggtacagagagggcggctaggagcactgagggcccagagcgcttcctggagaggtgaccctgggtgctgtgtggatagaatgtgccccacccacccccaaggagtggatgaacccgccgtgcctatgactcacttccgctccagaagcctctgatagaatgtggcccaccacctccttggacagatggagaaactgagccccaggaaagaagggcaagaacagttcattcagtgaataacaagaggtggtgatcacatcctttcccctagacccagccaagccctcctccccacagggcccttctctctttgagaactgctgcgaggccccagctctcaacacacagccatggcaagggcagagctgtgcccacagtgcacaggtaccctgtgtttgctgatcttgcaaaaagaaatcaaaccagaactctagagagctgagagcctgtgactccattctgagctgtcagctaatggtgcacaagagtttaggcgctctgattgagggtccacccccaaaggacccaggcaggggcagcgggcagagggggtgtgctccaggtcctgcctttgccctcagcctctgtccatgagacgtagcttctgtcctcgggtctcaccgcacatttacagtaaactccgcttgagtgaaggccatcagcccaggggagcaaagctggcccagacggggtcctgagtggcctccttcccctacaagtcacagccagtgcctctcctctatcttgagtaagactgtctggcaacacgcctggcctttcaacagtgcaactgtgcagtcctcaacaggagcaaacaggggcagagggagaaaaaccattagtgcttttcggcggcaggcgtggctcacctggccccagccataggctggaactggagtctaggggccactttgcaaactgcacaagtgtgtgctctgggttgaaaatgatgctctcacctgcaaacaacttattactaaaaattaaccaaatagtagcattcagaaaaccctggaaaacaaacaagctcttcatcttaccaacttaatacaggcatttgctcactttaggttcttctcatttcgcttacacatttttcatgatcataataacagagtgcagagaagactatgtttgttttttaaggcttaccatcttccactaaacgtttggcgtttgtgggaccttctcagcggtggtgctagcagctcttcgggcttgtggtgtgggtgcgctgtaatctccttgcctgactgttgcccctttctgctgtatgggtggccctgcaaggagaatctctcccgaatgggaacctagggtagaggctcaggcctcagagagggatcctccccatatctgcggggaagggatgcattcagtttgggacagtctgattttgaggggcctttgggacagcagatgggcatttaagattccagctcccagccagggggtggctgacagtggggatgcaggcacttcagggttggcagtaagaagggaaatggaacagattcctcatgggtgaatcaaggtggccaggtgccgggtgaaggaaatgggcgcagtgagtgcagactagcggggccctcacgccctgctggttcccaggaggagggcagtgcaccccctcctgtctggctttccctggggccacaggacacaggttttgtccatcagggcagggccattgacacctgaagtcatcattggctagaatatcctgtgctggcaatggccgtgaggaggaagagatcgcgcgagacaaggtcaggacctcataatgacctagatacacgggccagagggtaaatgagggggagactgaaaaattaacctgaagccccagacacccaggtaagaactcagagtgggttcctgagagattaatgagatctcgtccatgcttgtgacccctccagagagcccctctcagcaagaccctgagtttgcctcctctgggtttggaaaattctgaaggagatgggaataccagaccacctgacctgcctcttgagaaatctgtatgcaggtcagaaagcaacagtgagaactggacatggaataacagactggttccaaataggaaaaggagtacgtcaaggctgtatattgttaccctgcttatttaacttatatgcagaatacatcatgagaaacgctgggctggaggaagcacaagctggaatcaagattgccgggagaaatatcaataacctcagatatgtagatgacaccacccttatggcagaaagtgaagaggagctaaaaagcctcctgatgaaagtgaaagaggagagtgaaaaagttggcttaaagctcaacattcagaaaactaagatcatggcatccagtctcatcacttcatggcaaatagatggggaaacagtgtcagactttatttttctgggctccaaaatcactgtagatggtgactgcagccatgagataaaaagacgcttactccttggaagaaaagctatgaccaacttagacaggatattaaaaagcagagacattactttgccaacaaaggtctgtctagtcaatgctatggtttttctagtagtcatgtatggatgtgagagttggactataaagaaagctgagtaccgaagaattgatgcttttgaactgtggtgttggagaagactcttgagagtcacttgactatcaaggagatccaaccagtccatcctaaaggaaatcagtcctgaatattcattggaaggactgatgctgaagctgaaactccaatactttggccacctgatgtgaagagctgactcatttgaaaagaccctgatgctgggaaagattgaaggcaggaacagaaggggacgacagaggatgagatgcttggatggcatcaccaactcaatggacatgagtctgagtaaactccgagagttggtgatggacagggaggccttgtgtgctgcagtccatggggtcgcaaagagccggacatgactgagcgactgaagtggactgaactgggtttggaaatgggcagtcagtgcccggcctcaacatcatctttcccaccacagcatttcaggaatggtcaccgttgttgcttccttcttctgtcaccacctggctctttttaggatcctcactactcccagatgagagttggggtctggctcctggtgatctcacttatggcaggctctgcaatactaggctggagagaagtaagtggccagccccatggagacagatggggctctggagggtggggacacacttcctggccccactcctgagcctggctgagcgtgctctcccctgccactataacggaactcacgctcttagagagcagccctagaagttgctggaagccttgggatttagaagcaaaaatcaaagggaagcttgactgccagaccacagggtttggacttgaagcctcaggaggctccctggactcaaagtcccaggactcaaagttaggctcaccttcagtgatcccagaatcagtggttttcaaacacgagtaagagagagaagccccagaagggcctgtcaaagaagggcactggccccgaggctctgattcagcaggtccagggcagcactgccagagagtttgcacttctgacaggttccgtggcgcatgtgctgccagcccagggccactctaagagtgcccagctctgcctccagctgcctactgtgttggctgggaaaccaaggtgcaaaggccacagcaacaggcagagcagaccagccagggagcagatgggagccatcacacacgttgcccctcagtgactgtttcatgctagacacagtgtcatatcaaatgcaggagtcccacagtgttctgtgtctttgggattagtggtttctgagtggggtttgttcataaatatgacatttaccttactctctgtcataaactgcatgtccatattccccagatttatatgtcgatcccccaagccctcagtgtgatggtatcaggagggagggagggcctctgggaggtaactggggttagatgaggtcatgaaggtggagtccccatgacggaaatagtttccttaaaagaagaagacaagacatcagagttctctgtctgctgtatgagggcacagcaagaagctggccatctgtgaacccagagcccctcgccagaaccccatcacgctcacaccctcacctgagggctgtgagaaacgaatgttcactgtttcagccacccagtctatgctctttgttgtggtggcccacgctcgccaagataacggttcataaatgttatcttgcatgtactggtatttaatatattttaagagcgtaatagcatactggaaaggggaaaccaacgtgccaaaaccccatcctgccaaattaactcactgatgttggtcagctgtctttctctacccccagcttcttggtccaggagattccctggggttccactgaccaggttgcataggttggagagactcatatagtaggcagggctaggcgcaggaccacacaagtgatgctggtgggataggtgggccagataagcagcttggcttatggaggaagaaaagattccaggggcttgaaaagaagaagtaatcagcctccaggagagtggtagtgggtctctgaggaggggtggtgttggggacagaggcagagaaaggggaggaagggaagagctgtctaaaggttgtggtgaccagcccttgaaggcggcagtggcttgaatctggaggggccgcctccctgtgaggttctgttcctcctggcctgcgcagctttgagggcaagagaaaagagccagcgtgagcagaggagacagatggggaatatttagtctttgctgagtaacaaacgaccagagttacggattcacacagcatctgtgcgttagttcacagctctgcaggtcagagatcttggtggtttgcctgggttttctactcctagtgtctagaggccaaaatcaaagtgttggccaatctagcaacaaatattctcccgacctcacccagctgtcaaattctggtccgtgcggtctccatgttcttgcagctgtctgccagggtggttctcagctcctcgaggagactttctggtctcggattgcagcaccttcatctcagagccagcaacagcttcagacgctgttgatgtctctgacttctgctaccaggtgaaggctctgctttgaaagcatgcttgtggttagatgaacccggattggtggccctgatctgtgtctgctttccactgcatgtcttgcagatagagtaagtgtactctgtctgtattcacagtcccaggcaggaaggtgggcactcttgaggccttgtgagcatctggacttgctgggtaggagagcaggagagcaaccacctccttcaaggtgtgcacagccgctctctgtcccatcccctcaaaccacgtgggtgtgtgctaagcggcttcattcatgtctaagtctttgtgaccctgtggaccatagcccaccaggctcctctgtctaggggattctttacaggcaagaatactggagtgggttgccatgcccccctccaggggatcttcctgacccagggatcgaacccatgtctcttatgtctcctgtgtttgcagacagggtctttaccactaacaccacctgagaagctcaaaccacatgtcccttcccaaatgctcctgagctatctccctctgggcgccagtctgctgggacaagaaaataacatctttatttgtacccaccactaactgcggtcaaactcaccttcagttatgaatggaggtgacaaaccgcaacagcctttgtggttttctgagatgctatcaccaggggaaagcagatactttcatctcagaagatggcggcagttggtgcagagattacaacatgcccttgagccctcagcccaccatgtaggctcagtaaagaaactcatggtcctgaatcacaagcttgttccctgtcgttgtaacctgatgtcagtctgcttgtttgcttgtaactgtttctttcttctccacctggctctgggatgatggcttgactctagagcagagagtttctacaggccaaacctgcttccccaagtgctcacatctcacatagtcggtttgtttatcaggatggagaccttgctagggcacagccagacacaggctgactctggcagtctctccatggacatccttctctagtccagggcctgacgcaggagtcccggctgcatttgctgttattgccttttgtgtgctctgggagcttggggagcacagagcaccgaggtggcagcgccctgcagtagcagcactcttcagctgacagcatccctctcccactagtctctagttcctggagagacccttaaacgggacagtgcatggttgttcctggggtctggggcccagagtcctggtggatgctgctccccaccaacctgtccagctcccagccccaggtcaatgcaccttccacctcctcccagaagattaggggaggaaggagttacaaatcttcatcttccaagtattaactgactgagggtacctacctcctcctcagattagaaatttgaatcttgggagcgttgagaagatagcacatgtccagtctggagttttcttccagctttaaggagatatagttgacatataacattgtgtaaggttagggtgtacgatgcaattatctgatgtatgtccgtgtaataatgatgtatatattgcaaaatgattaccacagtaaggttagtgaatacacgttgaatattcaatataagtttttatgaaccaatttatccttgaaggctcacccaaaattcagtgacatcacttgggcccctgtgacccttctctgtcccctttctcccacacacagactcctcccatgtctgacaggaccccccaactttctgccctacatgggcagggtctgcatcaccaggattctcttggttgcccagctctgggacagaggaatctttctggaaataatccaaggaatttaaggggccatcaggtctagggtgggtggaagagggatccagctgggattggtggaggctagaacaggggcgtggcctctgggctaggagctggctgccagcactctggccttgcttggggagtggtaatatgggtcctgaatgggaagagggcccggagaaggcaggcgcggggcgctaactcagcaccgcaagcttgggacgagcctgggaagaagccgtgacctcgggagccccactctgctttcccctggcaggatggggagaggtggggagcacccaggtggggacaggctgtgggctctggggatgggcagctcagcccccgcccacagtgtgccccggcatcttacagggggacaagcaccgtgggactggtgaggacagagagagatagagtccgcttttttttttctgtctgaattaagtggccctttgtttttccacttgttctgagtctccaagtacataaaaccagtaaaaaaaaatccacttagaaatcaattgagtggattttccttctgacagaccctcttcatcccttctccagtttgagcccggctgccagcaacggaagaggagagaaccccacgaacctcaggagccagcccccttcagaaaggctccaagaccagagccacgaagggcaaaccctaccctaatgctccatcaggaaatgttcaaacatccaaaaagatgcagggcttgaacaaagaacatcatacactgggtcatgcacattttgcttgacccagtgtattccatgcctcaccatcccttctattcacccactattcactgtgtgtttttatgagacctcaatccactctttccctgaagactttggctggctcatcattaactagagttcaacatttgtttgcaaatcacatcccacgtggagcgtcaaaatgtggaacacatgggtgcaaaccatcctgaatcacagagtggaagagccagaggtgagcagggcagcctcacctggagtgacagctcgttcctgcttaaaaaatccctggtggtccagtggttaaaaatccaccttgcaatgcaggcgacaccagttcaatccccggtccaggaggatcccacatgctgcggagcagatagactgttgcaccacaactgctgagccagcactctagagctcacgagcgcaactaaggaagcctgctcaccctggagcccacgctctgcagcaagagaagacaccgcagtgggaaccccatgcgctgtaactagacagtagcccccacgcgctgcaactagagaaagcctgctcagaacaacgaagacccagcacaaccaaagataaagtaaaagaaagtggagtcgctcagtcgtgtccgactctttgcaacccgatggactgtagcctaccaggctcctccgtccatgggattttccaggcaagaatactggagtggggtgccagggtcactgtgagaggtaccacacgctggaaacggatggccaacctgagccaggcacagtcagagccagccacatatgccgacataggcagagtggttaccggggccaagacagggatgtctcagtgggtgagaggggacagaaattggctgaactaagttggggagatgatggaggtgacagtgttctgaaagagaactgaggtccagggagtttcaccctctgatttataagtgagaagtgaaaggaaccattagttgttcagtcatgtctgactctttgtgatcccacggactctagctcgcccggctcctctgtccatgggtctccagccaagaatactggagtgggttgccattcccttctctgggggatctttccaacccaggaattgagcccaggtctcctgcattgctggtggattctttaccaccttagccaccagggaagtgggaggttatccgcaaaagctcagagggagagtggcagaaggcatgcaggttagacacagtctacctcacctgctgaccctcaccaacccatcctggacatctgaactcagcctggagtgggcagagctggcccatgctctccaccctgaagtccttaccctgcccactgggtgccttcaagagcagagactgctgaccctggcctgcatgccacctctcagtccaagtgccagctccccccatcctccttggcattgcctttctttgggactggaatgcgtccagcccatgctggtccatcaggaagccaaacacctcggtcagcacaggggtcccagagagacagcagcagcccctgcagtctccgctcagagccgtctgtgcaggacagagtgcaggacagcgaggctcagactgcagaatactgcctagagaggagagacctcacagctggatgagaaaagagggctgcccttcctaaaaaccttggggtcccagaccctggggtgggtgtgggagaaagctgggagggtcaggcctcaggaacctaggattcagtaggctttgcagggaatgaaggaagaagtgagggaacaagccagccccacagttggaatgccactccaggaatacagactcaggcagggccatggggatgtctgtgacatctgctgtgaggtcatggctgggttttgcctcatcaaggcacgaggatgtataggatggagactgcacccaggaaggggtgtcagattagggcacagacgtgagagggacccaggagacccagagtctggtttggaggcttcaggttttccctagaaatggaggcgctagcaccatgaaaagaagtctcagctcttcttgagcacgtggatgcatggtgtcatggacactccccggggaaagataggttttaactcatgagagatgcacttgatcaggaaggaagagcaagctgaagatagaggttgcccagaaatggtgggcagaatgggcacaggatgagaggatgccaaacttgggaaaccctgtgttcaggacttcaagaagttgccctctcctcagccagctagctgaatatagagctacataagtgctgcagtggggaggtgtagtgggtgacgctcacacaggacagcagggggattgtgggagacaaaagcaactctgtgtggccgcagagttctgtctcagtctctgtggggtccctgggtcctggtgcacacaaggtttctttgagccctctgagcgtctctgatgggaatggggtttgattctgaacatgaattcggctctcctaccatcttgctggggcttctcctttgcccttgggtgtggggtatctcctaccctacgtgggatattctccttcaagaatacacagaactatacaaaaaagatcttcacgacccagataaccacgatgatatgatcgctcacctagagccagacatcctggaatgtgaagtcaagtggggcttaggaagcatcactacgaacaaagctagtggaggtgatggaattccagttgagctatttcaaatcctaaaagatgatgcgggaaagtgctgcactcaagatgccagcaaatattggaaaactcagcagtggccacaggactggaaaaggtcagttttcattccagtcccaaagaaaggcaatgccaaagaatactcaaactatcacacaattgtactcattcacacactaataaagtaatgctcagcaagtgcgctcggcggctgcgcggatccgtctcttgcttcaacagtgcttggacggaacagacccagggacgccccttgctccagcctccgaccaccctccaacctattttccagttgtaacctccagagtcagccactcagctgtccgcgatcaccgggaccagccaccattttttaactccttattattaccgaccaatcatgagctcccagattcgtcagaattattctaccgaggtggaggccgccgtcaaccacctggttaacgtgcaactgcgggcctcctacacctacctctctctgggcttctatttcaaccatgacgatgtggccctggagcgtgtgggtcacttttttcgcgaactgaccaaggagaagcgcaagggtgcggagcgtctcttgaaactgcaaaaccagagtggcggccgcgccctcttcctggacgtgcagacgccatctcaagatgagtggggtaaaacccaggacgccatggaagccgcccttctcgtagagaagaacctgaatcaagccctgttggatctgcatggcctggcttctgcccgcggagacccccacatctgtgacttcctggagaaccacttcctagatgaggaagtgaaattcatcaagaagtcgggtgaccacctgaccaacctccgcaggctggctggtccccaggctgggttgggcgagtatctcttcgaaaggctcaccctcaagcacgactaggagcttctggagaccagtggccgttgaagaacccaccacacatcagggctgcctgaaccccctctctgcagccactaggcagctttttaacaccctggagccctctctcaagccttggaccaaatggaaacaataaagctttttgcagcaaaaaaaaaaaaaaaagcaaagtaatgctcaaaattctccaagccaggcttcaacagtatgtgaaccgtgaacttccaaatagtcaagctggttttagaaaaggcagaggaaccagagatcaaattgccaatattcgttagattattgaaaaagcaagagagttccagaaaaacatctatttctgctttattgactatgccgcctttgactatgtggatcacaacaaactgtggaaaattctgaaagagatgggaataccagaccacctgacctgcctcttgggaaatcagaggtcaggaagcaacagttggaactggacatggaacaacagactgattccaaatagggaagggagtacgtcaaggctgtatattgtcaccctgcttatttaatttatatgcagagtacatcatgagaaatgctgggctggatgaagcacaagctggaatcaagattgccgggagaaatatcaataacctcagatatgcaaatgataccacccttatggcagaaagtgaagaagaactaaagaacctcttgatgacagtgaaagaggagagtgaaaaagttggcttaaagctcaacattcagaaaactaagatcatggcatctggtcccatcacttcatgggaaatagatggggaaacactggaaacagtgtcagactttatctttttgggttccaaagtcactgtagatggtgactgaagccatgaaataaaaagatgcttactccttggaagaaaggctatgaccaacctagacaggatattaaaaagcagagacattactttgccaacaaaggtccgtctagtcaaggctatggtctttccagtggtcatgtagggatgtgagagttggattataaagaaagctgagtgctgaagaactgatgcttttgaactgtggtgttggagaagactcttgagagtccctttgacttcaaggagatccaaccagtccatcctaaaggaaatcagccctgactattcattggaaggactggtgttgaagctgaagctccaatactttggccaccttatgtgaagagctgactcactggaaaagaccctgatgctgggaaagattgagggcaggaggagaaggggacgacagaagatgagatggttggatggcatcattgactcaatggacatgagtttgagcaaactccaggagatagtgaaggacaagcaagcctgacatgcttcagtccatggggttgcaaagagtcggacacaactgagtgactgaacaacaatcacgaatagtaacatgaccacatttcaatcagttgtgacacacaaacacatgtgtaaccaacagccccatcaaacacagagcacttccttcaccctagaccctagtggtccagtagaactttccacaatgaccgaaatgttcttatatctaaccatccaacatggtaaccacatatcatacctagctagtgtgactaagaaaccacatttttctctcattttttgtcattttgcttaaattaaataggcacatgtgctgagtgggaaccatttggcagagcacagcctgagacacattttctcatgctgcctttcagagaggccagacctcccatgagaatgaggaaactatcctgatttctgtacctatctacagtgttgctgggccttggtctccatcataggaatcgcgatcacccgcactgtatcaggtctcccttaagctccctgcctgggagatccctgacctttgcaccagcaggccactcctctctatttcgacgtagcattccactgcaagagtaaacgctgtctgttcatccacgcttctgtggatgcatccttcggtggcttccaagtttttctctgatgatcacagccctgtgaatattcttgagcacatcttattgtgtacataagcttttatatctgttgagtaaatagccaaaagcctgctggtatggtgggcatgagttcagcagtgattttcgcctatatgatttatttacccactgctgtgccccatctctatgtgtgtgcatgtgtgctaagtcgcttcagtcatgtctgactcttggtgatcccatggactgtagccccccaggctgctctgtccatgggattctccaagcaagaatactggagtgggttgccatgccctcctccagggtgccctatctctaactccactctaacggcagaaagcaaggaagaactaaagagtctcttgatgaagatgaaagaggagagtaaaaaactggcttgaaattcaacattcaaaaaactaagatcatggcatccggtcccatcagttcacggcatacagaaggggcaaagtggaagcagtgacagattttcctttcttgggcttcaaaatcactgcggacggggactgcagccatgaaattgaaagacacatgctccttgaaaggaaagctatgacacttggacagcatattaaagaataaagacgtcaccttgttgacaatagtccatatagtcaaagctatggtttttccagtagtcatgtacaggtgtgagagttggagcataaaaaaagctgagcactgaagaactgatgccttcaaattgtggtgctggagaagactcttgtcccttggactgcaaggagatcaaaccaatcaagcctaaaggaaatcaaccataaatattcattggaaggactgatgctgaagccgaagttccaatactttggccacctgatgagaagagctgactcactggaaaagatcctgaggctgggaaaagttgagggtaggagttaagaggatggcagatgataagatggttagatagcgtcattgactcaatggacgtgaacttgagcaactccagaagatagtgaaggacaggggagcccggcatgctgcagtccctgagctggacatgacttagctactgaacaacaacaagatgccctatccccactgctctagaagtgattgtcctcctgccacagggccagcagcacctcctctgggcagcccctgtactaactcagcatcacctgtatccttgagtgctcctgtgtgttcctgaacagtttcagggtgctgctatctccacaccattggagccaggacccctgcagttgtgcagagaagcagggaagcctccaccacttccttgatttctcttctgtcaatccacgtgcacatcacgatgttttgtgccaagtgtcaggtacaggacagggacaggcttcctccatggtagaagcacatcttgcccaaagaaagggcctgtgtgcatcctccaaagaaagttcaccctaggacaggcctgactcctgctcccggttcacgggccagaagggcacttcccctactaaccaggcctccttgtcctcccccaggtccctggctgttgggccccagtactcatccctggggacacagcccatcctctgcgccagcatcccaggcttagtacccaagcagctgcgtttctgccggaactacgtggagatcatgcccagcgtggcagagggcatcaaaatcagcatccaggagtgccaacaccagttccgtggccgccgttggaattgcaccactatcaacaacagcctggccatctttggccccgtgctggacaaaggtacaggtggtacccatcatggctagccaggcagaggcggcagcccagggatgtgggtgcagcagggctcaaaccagcttccccctcagtgggagtgggcacaaaccagttcatttcctttctgcctctgtttctcacttgtgctcaagcataggaacagcacttccagtaaggggggcagtgctcgttactatagggatctcctatgtgggtcctttcccaatgctcacccactctggagggtgctcctggagtttgggaagggtataggatcacacagagattcctcctgcttcctctttcccaaaaaacagttacacagtttcacggggacaggattaactactgcagttttcctgaagaagccaggacttcaggcagatcttagagagaaaatacaaaaacaaacagaaaacacaaaaaagggtgagggttggggatgatagaggcacacagcagaagttatccagggtcctggagccagggaagaagaggaagatctggcaggctgggtgctggttaactcttggtgaagagcaaatttgcacaagacatagtagtttaaacaataataatcacgtgttgtcagttccaacatctgcagacatggggagatgcagtaggcagggctggtctctgctaacgagagagacgagctgatcctcatctctcttacatgcctggtggcccctgatgcttctgctcatgacctgggttcgcttaaatgcagtggctgggccctccagcaagtgaggaaagagggagggagagagaaaaagagaaagggagagagaaaaagagaaagggagagaggcttctttcactgagcataatgttttcaagatgcatccacctgtagtatgttctggtgctttattcctttttatggctgagttatattccatcatacaatggatcacattttatttatccattcatctgctgatgcacaattaggttgtttcaagccttttattgtctgttgtgaataatgctgatatttcaagtatctgaatacctgtttttcaattcttctgggtatattcctagaagtagaattgcatagtaattctgtgttttgaggaactgccaaactttttccacagcaactgcaccattttgctctcccaccagcaacacaagactgttccagtttctccacattattgccaatgtttttctttttttttcctttagccctcccagtggatctgaagtgatgtctcattgtaatttttatttgcacatccctgatggctaatgatgttgagcatcttttcatgggattgttgaacatctgaatgtcttctttggagagatgtctatgcaagtcctttgcccagtttttaattggattgtttgtgtttctattgttgagctgtcagaattctttatatatctaacactagacacttatcagaaatataattttcaaatatcttctcccttcatagattgtcttttcacttttatgacagggtcctttgatgtacagaagttttaaattttgatgacattcaatttacctatttagatatcatatcaaagtaaacattgcctaatccacagttatgaagttttacacttgtgttttctcctaagagttttatagttttacttcttacatttaggtctttgatctatttttagtgaatttttgtatatagtgagaagtaagggtccagcttaattcttttgcatgtgggaaaccaattatttcagcaccatctgttcaaaagactagtctttcccctattgaatagtcttggcaccctggttaaaaatcaattgtctatgggtgtctgggtttatttctggactttcagttctattccattggtctatatgtctgccattcttccaatacaacactattttgatttctatagttttatagtatgctttagagttgggaagtataagatctccaactttatttttattttacaattgcttttgctttgattgttttggcttttggagaatcccttacaattccatatgaattttagggttgttttttcctttctgcaaaaaaagatttttttgaattttgatggtgattgcattgaatctgtatattagtttaagaagtattgccatcttaacattattgtcttctaatccatgaacatgggatttttccatttatttaggtcttccttaatttttcagcagtgttttatagttttcaatgaatgagtctcatgcatctttggttaatgtgttcctaagtattttattcttttgatgctattataaaataaatcatctcattcatttctttttcaaattgttcactatgtgtagatgtacaattgattttgtgttttgaacctgtatcctgcaaatttgatttttttcattagctgtgagagtttgtgtagattctttagaattttctgtatatgagatcaagtcttctgtgaatagaaatgtttttgcttcttgctttccaatttggatgccttttctttctttttcttgcctaattgatctggctagcacttccagtactatgttgaatgtgagcaatgagagtgggcacccttgtctttttcctaatcttagagggaaagcttttagtctttcaccattgagtatacggtgctagtagtgaatttttcataacttccctttatcaggttaaggatattgtcttctattcctaatctgttgagtgtttgtatcatgaaaaggctactcagttcagttcagttcagttgctcagtcatgtccgactctttgcaaccccatgaatcgcagcacaccaggcctccctgtccatcaccaactcctggagttcactcagactcacgtccatcaagtccgtgatgccatccagccatctcatcctcagtcgtccccttctcctcatgccccaaatccctcccagcatcagaatcttttccaatgagtcaactcttcacatcaggtggccaaagtactggagtttcagcttcagcatcattccttccaaagaaatcccagggctgatctccttcagaatggactggttggatgtccttgcagtccaagggactctcaagagttttctccatcaccacagttcaaaagcatcaattcttcggcgctcagctttcttcacagtccaactctcacatccatacatgacaactggaaaaaccatagccttgacgagacagaccttagtcggcaaagtaatgtctctgcttttgaatatgctatctaggttggtcataacttttcttccaaggagtaagtgtcttttaatctcatggctgcaatcaccatctgcagtgcttttggagcccaaaaaaataaagtctgatgctgtttccactgtttccccatctatttcccatgaagtgatgggaccagatgccatgatcttcgctttctgaatgttgagctttaagccaactttttcgctctcctctttcactttcatcaagaggctttttagctcctcttcactttctgccataagggtggtgtcatctgcatatctgaggttattgatatttctcctggcaatcttgattccagcttgtgtttcttccagtccagcgtttctcatgatatactctgcatagaagttaaataagcagggtgacaatatacagccttgatgtactccttttcctatttggaaccagtcttttgttccatgtccagttctaactgttgcttcctgacctgcatacagatttctcaagaggcaggtaaggtggtctggtattcccatctctttcagaattttccacagtttattgtgatccacacagtcaaaagctttggcatagtcaataaagcagaaatagatatttttctgaaactctcttgctttttccatgatccagcagatgttggcaatttgatctctggttcctctgccttttctaaaaccagcttgaacatcagggagttcatggttcatgtattgctgaagcctggcttgcagaattttgagcattactttactagcatgtgagatgagtgcaactgtgcggcagtttgagcattcttttacatttcctttctttgggattggaatgaaaactaaccttttccagtcctgtggccactgctgagttttccaagtttgctggcatactgagtgcagcacttttctagcatcatctttcaggatttgaaatagctcaactggaattccatcaccttcactagctttgttcatagtgatgctttctaaggcccacttgacttcactttccaagatgtctggctctagattagtgatcacatcatcatgattatctgagtcatgaagatcttttttgtacagttcttctgtgtattcttgccacctcttcttaatatcttctgcttctgttaggttcataccatttctgtcctttatggagcccatccttgcatgaaatgttcccttggtatatctattttttttttgaaaagatctctagtctttcccattctgttgtgttcctctatttctttgcattgatcgctgaagaaggctttcttatctcttcttgctattctttggaactctgcattcagatgtttatatctttccttttctcctttacttttcacctctcttcttttcacagctatttgtaaggcctcctcagacagccattttgcttttttgcatttcttttccatggggatggtcttgatccctgtctcctgtacaatgtcatgaacctcattccatagttcatcaggtactctatctatcagatctaggcccttaaatctatttctcacttccactgtataatcataagggatttgatttaggtcatacctgaatggtctagcagttttccctactttcttcagtttaagtctgaatttggtaataaggagttcatgatctgagccacagtcagctcctggtcttgtttttgctgactgtatagagcttctccatctttggctgcatagaatataatcaatctgatttaggtgttgaccatctggtgatgtccatgtgtagagtcttctcttgtgttgttggaagagggtgtttgctatgaccagtgcattttcttggcaaaactctattagtctttgccctgcttcattctgcattccaaggccaaatttgcctgttactccaggtgtttattgacttcctacttttgcattccagtcccctataatgaaaaggatatcttctttgggtgttagttccaaaaggtcttgtaggtcttcataaaaccgttcaacttcagcttctttagcgttactgcttggggcatagacttggataactgtgatattgaatggtttgccttggagacgaacagagatcattctgtcatttttgagattgcatccaagtactgcatttcagactcttttgttgaccatgatggctactccgtttcttctgagggattcctgcccgcagtagtagatataatggtcatctgagttaaattcaccctttccagtccattttagttctctgattcctagaatgtcgacgttcacccttgccatctcttgtttgaccacttccaatttgccttgattcatggacctgacattccaggttcctatgcaatattgctctttacagcatcagatcttgcttctatcaccagtcacatccacaactggatattgtttttgctttggctccatcccttcattctttctggagttatttctccactgatctccagtagcatattgggcacctaatgacctggggagttcctcttttggtatcctatcattttgccttttcatactgttcatggggttctcaaggcaagaatactgaagtggcttgccattcccttctccagtagaccacgctctgtcagacctctccaccatgaccctcctgtcttgggttgccccatgggcatggcttggtttcattgagttagacaaggctgtgggcctagtgtgattagattgactagttttctgtgagtatggtttcagtgtgtctaccctctgatgccctcttgcaacacctaccatcttacttgggtttctcttatcttgggtgtggggtatctcttcatggctgctccagcaaagcacagccgctgctccttaccttggacgaggggtatctccttactgccaccgttcctgaccttcaacgtgaaagtcaggaaaaggctactatattatatcaaatgctctttctgaatcaattaagatgatcacatggttttgccttcattctgttgacatggcatttcttctaaggaattcttgcccacaataatagatataatggtcatctgaattaaatttgacctttctgtccattttagttcactgattcctaacaagttgatgttcactctttccatctcctgtttgaccacttccaatttgccttgattcatggacctaacattccaggttcctatgcaatattgttctttacagcattggactttactttcaccaccagacacatccacacctggctgtcgtttttgcttttgctcagcctcttcattcctcctggagctatttctccactctcttccagtagcacattggactcctactgacctggagggtgggggtctcatccttcagtgtcctatctttttgccttttcatactgttcaaggggttctcaaggcaagaatgctgaaatggtttgccattcccttctccaatggaccacattttatcagaattctgtaccatgacctatcagtcttgggtggcacaacatggtctgattcatagtttcattgagttacccaaggaggctgtggtccatgtgatcatttggttagttttctgtgattgcagttttcattctgtctgccctctgatgagtgcaaaaggcttgtgcaagcttcctgatgggagggacttgtggggaaaactgggtcttgctttggtgggtaaggtgatgctcagtaaatcttcaatgtaattttctgctgatgggtgaggctgtgctccttctctgtggtttggcctgagacagcccagtcctagagtctgcagtctctatggtcagctataggctctatggtaggggtaatggtgacctcttccaagaggactcatgccagcatgctgcacctcccaggactactgctgccaaaaccccgatcctgaagccagccaccgttgactcacgcctctgctggagactcccatactctcacaggcaagtctggctgagtctcttgtggggtcactgctcctttctcttgagtcttggtacacacaaggttttgtctgtaccctccaagagtttgtttcccctgttctgttgaagttctgtaatcaaatcccattgaccttcaaatttcctgggaatattcagtccctttgctgaatccccaggatggggaagtctgttgtagggcctggagcttccataacagtgcaagaatttctttggtataattgttctccagtttgtagatcgcccacccattggttctttggtaaggttaatggcgacctcctccgagaggatttatgccacatgccctgcctcccaggactgctgctgccagtacccctgtccctgcgactggccgctgctgacccatgcttccacaggggcccctcagacactaacaggcaggtctggcttagtctcctgtgggatcactgctcctttccctgggtcctggtgcacacaggttttgtttgtgccctccaagagtctttgggaggtatgaggtttgattttaatcatgattgcaccctccctaccgtcttattgtggcttctcctttgtccttggacatggggtatctttttttggtgggttccaacatcctcctgttgatggttgttcagcaactagttgcaattttggtgttctctctggaaattgagtgcacgtccttctacttttctcacacatatatatatgtatgcaagattatatatatacacattaatatacagtatttgtttttctcttttgacttacttcactctgtataacaggctctaggttcatcatctcaattcagctgactcaaattcattcctttttatggctgagtaataggccactgtataatatgaccacatcttcttaagcattcatctgttggccatctaggttgcttccatgacctggcattgtaaatagtgcttgaatgaacattggggtacacgtgtctttttcagttagggttttctcagggtatataaccagtagtgggattgctgggtcatatggtagttctatgtttaactttttaaggaaactccatactgttctccatagtggctataccaattcttttttctccacactctctccaccatttattacttatggactttttgatgatgacaattctgactggtgtgcgttggtacctccttgtagttttgatttagtatttctcaaataattagtgatattcagcatcttttcatgtgtgttttggccatctatatgtcttctttggagagatgtctatttaggttttccactcattttttgattggatttttttgttttttgatgttgagctccatgagctgtttgtatattttggagatattatttgtgtatatttgtatatagctaatatttgtatatattaatttatttgtatatattaatttccctttcagctctatttgtatatattaattctttgtctgttgcttaatttgcaaatattttcacccattctactggagtttccctggtggctcagatgataaagaatctgcctgcaatgcaggaggatttccctgacagctcagttggtaaagaatccacctgcaatgcagaagaccccagtttgattcctgggtcaggaagatccactggagaagggataggctacccactccagtattcttgggcttcccttgtggctcagctggtaaagaatccacctgcaatgcaggagacctgggttcaattggtgggttgggaagatcccctggagaagggaaaggcaacccactccagtattcttgcctggaaaatcccatggatagaggagcctggtgggctacagtccatggggtcacaaagagttgaacacgactgagcagctaacactttttttcctttacccattctgagggttgtgctttcattttgcccatggtttcctttcctgtgcaaaaacttttaagtttaactaggcccgatttgtttatttttcttttaacattttcattattctagaaggtgcaagaacttctttgcaaaaaaggatcttgctgtgatttatgtcaaagaatgtttttttctatgttttcctctaagagttatatagtgtctggacttacatttaggtctttaatccgttttaattttacttttgtgtgtgatgttagggagtattctaattccattattttacatgtagctgtctgatttcccagcaccacttattgaagaggctatcttttctccattgtatatttttgcctcctttgtcatagatttggtgaccataggtgcgtgggttaacttatgggctttctatcctgtaccatggatctatttctctgtttttgtaccagtaccatactgtcttgattactgtagctttgcagtatagtttgaagttcggaagcctgaatcctctagctccatttttctttctcaagattactttggctctttggggtgttttcatacagactgtaaaaatttttgttctaattctatgaagaatgccattggtaatttgataggaattccatggaatctgtagtttgctttaggcaatatactcattttcattatattgattctttcaatccaagaacatcatatttctctccatctgtttgtgtcctccttgattttcatcagtgttttatatttttctgaatacaggtcttttgccttattaggttggtttattcctaggtattttattatttttgttgtgatggtaagtgtgattgtttccttactttccctttctgctctcttattattagtgtgtaggaatgcagaagatttctatgccttaattttgtatcctacaactttgccaaattcactgactatgtccagtagttttctggtggcatcttaggattttctgcatatatactatcatgtcacctgcaaacaatgacagttttacttcttattttccaacttggattccttttatttctttttcatctctaatatccatggcaaggacttccaaaacaatgttgatgagaatggacatccttgtcttgttcctgatactaggggaaatgctttcagtttttcaccattgaaactgatgtttgttatgtattgcctttattatgttgaggttccctctatgctcattttccagagagaatcatagacggttgttgaattttgtcaaaagctttctctgcatctattgagatgatcatatggcttttattctttaatttgttaatatggtctatcactacataaactatcacactgattgatttgtgtagattgaaagatttgtgtatatttctgggataaatcccacttgatcatggtgtataatccttttaatgtattattggatgctgttggctagtattgtttttaagcatttcccaatgattttaaatcaatttatttgtaaaaacagaaaaaggaaagaaataaataaagccagtaacagtagtacagtcgatacagttgctaaggcattaataacttataaaagacatagtagctacataagtggaaaaggaaatggcaacccactccagtgttcttgcctggagaatcccagggacgggggagcctggtggactgccgtctatggggtcgcacagagtcagacacgactgaagtgacttagcagcagcagcagcagcagcagcagctagataagtgtgtgtgttcacttgctaagtcatgtccaactctgtgaccacatggactgcggtagccagacttccttatccttcactatctcctggagtttactcagattcgtgtccatcgagtcagtgatgctatctaaccattttgtcctctgccacgctcttctccttttgcctacaatctttcccagcatcagggtctttttcaataggacagtacttcacatcaggtggccaaagtattggaacttcagcttcagcatcagtccttccaatgactattcagagttgatttcttttggaattgactggtttgatctccttgcagtccaacagactctcaagagtcttctccagcaccaaaattcaaaagcatcaattcttcagtgctcagccttctttttggagaaagaaatggcaacccactccagtgttctaatctggagaatcccatgaaaagaagagcctggctggctacagactatggggttgcaaagagtcagccaagactcagcagctagacaacaacaacagccttttttatggtccaactctcacatccatacctgactactggaaaaaccgtagcttttactatatggacctttgtcggcaaaatgacgtctctgctttttaatactctgtctaggtttatcacagcttttccctcccaggagcaaaagcgtcttttattatcacagctacagtcactatccacagtgattttgaagcccaataaaatataatatgtcactgcttccactttttcctcttctatatgccatgaagtgatgggcccggatgccacgatcttagtttttagaatgttgaattttaatctggcctttccactctcctatttcaccttcatcaagatgctctttagttcctcttcactctctgccattacagtggtattatctgcatatctgaggttgctgatatttctcctggcaatattgattccagcttgagttatccaggctggcctttcccatgatgtaccctacatatacattaaataagcaggatgacaatatacagccttggtgtactcctttaccattttgaatcagtctgctgttctatgtctgcttctacctgttgcttcttgacctgcatacaggttttttaggagataggtaaggtggtctggtattcccatctctttaagaattttccacagtttattgtgaaccacacaatcaaagactttagtgtactcagtaaagcataagtagatgtttttctgaaattcccttgctttctctatgatccaagaaatattggcaatttaatctctggttccttggcattttctaaatccagcttatacatatggaagttctcagttcatgtactgctgaagcctagcttgaagaattttgaacataacctttctagcatgtgaaatgagcacagttgtaaggtagtttgaacattctttggctctacacatggacatcaccagatagtcaataccaaattagactaattatattctttgcagacgaagacagaaaagatctatacagtcctcaaacagaagacctggagctcactgcagctcagatcatcagtcccttattgcaaaattcaggcttgaactgcagaaaataggaaaaaccattcagatttgacctaaattaaatcccttatgattataccatcagttcagttcagttcagtcactcagtcgtgtccgactctttgcgaccccatgaaccacagcacgccaggcctccctgtccatcaccaactcctggagttcacccaaactcatgttcattgagtcggtgatgccatccagccatctcatcctctgtcatccccttctcctcccgcccccaatccctcccagcatcagagtcttttccaatgagtcaactcttcacatgaggtggccaaagtattggagtttcagcctcagcatcagtccttccaatgaacacccaggactggtctcctttaggttggactggttggatctccttgcagtccaagggactctcaagagtcttctccaacaccacagttcaaaagcatcagttcttcagcgctcagctttcttcatagtccaactctcacatccatacgtgaccaccggaaaaaccatagccttgactagacggacctttgttggcaaaataatatctctgctttttaatatgctatctaagttggtcataactttccttccaaggagtaagcatcttttaatttcctggctgaaatcaccatctgcagtgattttggagcccaaaaaaataaagtctgatactgtttccagtgtttccccatctatttcccatgaagtgatgggaccagatgccatgatcttcattttctgaatgttgagctttaagccaactttttcactctcctctttcactttcatcaagaggctcttcagttcctcttcactttctgccataagggtggtgtcatctgcatatctgaggttattgatatttctcactccaatcttgattccagcttgtgcttcttccagctcagcgtttctcatgatgtactctgcatataaattaaataagcagggtgagaatattcagccttgacatactccttttcctatttggaaccagtctgttgttccatgtccagttctaactgttgcttcctgacctgcatataggcttctcaagaggcaggtcaagtggtctcatattcccatctctttcagaattttccacagtttattgtgatccacacagttgaaggctttggcatagtcaataaagcagaaatagatgtttttctggaactctcttgctttttccgtgatccagcggatgttggcaatttgacctctggttctgctgccttttctaaaaccagcttgaacatctggaagttcactgttcacgtattgctgaagcctggcttgcagaattttgagcattactttattagcatgtgagatgagtgcaattgtgtggtagtttgagcattctttggcattgcctttctttgggattggaatgaaaactgaccttttccagtcctgtggccactgctgagttttccaaatttgctggcatattgagtgcagcactttcccagcatcatcttttaggattagaaatagctcagctggaattccgtcacctccactagctttgttcatagtgatgctttctaaggcctacttgacttcacattccaggatgtctggctctaggtgagtgatcacaccatcatggttatctgggtcatgaagatcttttttgtatagttcttctgtgtattcttgccacctcttcttaatatcttctgcttctgttaggtccataccatttctgtcctttatggagcccatctttgcatgaaatgttcccttggtatctctaattttcttgaagagatccctagtcttccctattctgttgttttccactattttcttgcattgatcgctgaagattataccatagaggcgaccaatagattcaaaggcttagatctggtcgacagagtgcctgaagaactatggacagaggttcataacattgtacaggaggcagggaccaaaaccatctgaaagaaaaagaaatgcaagaaggcaaagtggttgtctgaggaagccgtacaaatagctgataaacaaagagaagcaaaagtcaagggagaaaggaaaagatacccaactgagtgcagagttcaagagaatagcaaggagagataagaaggcctccttaagtgaacagtgcaaagaaagaggaaaacaatagaatggcaaagactagaaatctctaagagaattggagatatgaagggaaaatttcatgcaaagatgggcacgataatggacaaaaacggtaaagacctaatacaagcagaagagattaagaagaggtggcaagagttttgttgtttttgttcagtctctcagccatgtccaactctttgcaaccccatgaactacagcacgccaggcttccctgtccttcactatctcctggagtaggctcaaaatcatgtccattgagtctgtgataccatccaaccgtctcatcctctgtcatccccttctcttcctgccttcaatcttttccagcatcagactcttttctaatgagtcagctcttcccatcaggtggccaaagtattagaggttcagctttagcatcagctcaaaagcatcaattcttcagcgctcagccttctttatagtccaacactcacatccatacatgactactggaaaaccatagctttgactatacagacctttgctggcaaagtgatgtctgctttttaatatgctgtctagtttggccatagcttttcttccaagaagcaagaatcttttaatttcaaggctgcagtcactgtctgcagtgattttggagcccaagaaaataaagtttgtcgctgttcccattgtttcctcatctatttcccatgaagtgatgggactggatgccatgatcttagttttttgaatgttgaattttaagccagctttttcactcccctctttcaccttcattaagaggctctttagttcttctttgctttctgccataagggtggtgtcatctgcatatctgaggttgttgatatttctcccagcaatcttgattccagcttgtggttcatccagcctggcattttgtttgatgtactctgcatacaagttaaataagcagggtaacaatatacagccttgacttactcctttcccaattggaaccagtctgttgctccttgaccagttctaactgttgcttcttgacctgcatatagatttctgaagaggcaagtaaagtgtctggtattcccatctctttcagaattttccagtttgttgtgatccacacagtcaaaggctttagtgtagtcaatgaagcagaagttgatgtttttctggaactctcttgctttttttatgatccaacagatgatgacaatttgatctctggttcctctgccttttctaaatccagcttgaacatctggaagctctcagttcacatactgttgaagcctagcttggagaattttgagcattactttgctagcatgtgagatgggtgcagttgtgtggtagtttgaacattctttgggattagaatgaaaactgatcttttccagtcctgtgtccactgctgagttttccaaatttgctggcatattgagtgcagtgctttcacagcatcatgttttaggatttgaaacagttcagctggaattccatcaccttcactctttgtttgtactgatgcttcctaaggctcacttgatttcacactccaggatgtctggctctagatgagtgatcacaccatcatagttatttgggtcattaagatctcttttgttcttctgtgaattcttgctgcctcttcttagtatcttctgcttctgttgggtgcatactgcttctgtcctttattgtgctcatctttgcatggaatgttcctttggtatctctaactttcttgaagagatctctagtctttgccattctattgttttcctctatttctttgcactgttcactttagaagactttcttatctctccttgctattctttggaactctgcattcagatgagtatgtctttccttttctcctttgccttttacttgttttgtcaggtatgcataagtcctcctcagacaaccgttttggccttttgcatttctttttcttggggatggttttgattaccacctcctatacaatgtcacgaacttccatccatagttcttcaggcattctgcctatcagatcgaatcccttgaatctatttgtcacttctactgtataatggtaagggatttgattataggtcatatttgaatggcctagtggttttccctactttcttcagtttaagtctgaattttgcaataaggagttcatgatctgagccacattcacctcccagtcttgtttttgctgactgtatagagcttctccatcttcggctgcaaagaatataatcaatctgattttggtgttgaccatcgggtgttttccatgtgtagagtcatcctttgtgttgttggaagaggtgagaatacactgaagaaatatacaaaaaagttattttcttactgactaggataaccacaatggggtggtcactcacctagagccagacatcctggagtgctaagtcaagtgggccttaggaagcataactacaaacaaagatagtggaggtgatggaattccagctgaactatttcaaatcctaaaagatgatgctgttaaagtgctgcactcaatatgccagcaaatttggaaaactcagcagtgacctcaggactgaaaaatatcagtttctactccaatcccagagaagggcaatgccaaagaattttcaaactacagtacattacataaaatgattctaataatagttaaacaggaagcaatgagcttttctcagtattgatgtgaaagcaggtagtttggaatttaaaagtaactgttgactcaaatagttaatgtttatctgttcccttaacttccatagtttctcagggaaggccaattttaaaatgtattttccttttcattataaatacttcaaggaggaaaaactaaaaacaatttaaaaatttagttcctcattcctggcatagtgatttggtatttctacatatttcaaagtgatccttacagtaagtctagttaccatctgtcagtatacaaagatattacgtagcttttgactgtatatattccccactctgtatttcttacctgtgacccacttactttgcaactggaagttcatacgtcttgatctcctttacccattctttcctcagtattttctctaaccagtagtaagaaagaattgaatgtgatctgagccagccttcataatgttggctagtattttgctgaggaatttttgcatctatgttcatcagtgatattggtctgtaattttcttattttgtgagatatctttgtctgattttgatatcaggatgatgatggtggcctcatacaacaaagttgggagtgttcctccctctgcaattttttgaaagagtttgagaaggtacagtgttagctgttctctaaatgtttgatagaatttgcctgtgaagccatctggtcatggacttttatttgttagaagattttaaattatggtttcaatttcattacatatgattggtctgctaatattttctaaggcttcctggttcagtcttggaaggttgtacctttctagaatttatccatttctttcaggttgtccaatttattggcatatagttgcttctagtcggagaaggcaatggcaccccactccagtactcttgcctggaaaatcccatagatggaggagcctggtgggctgcagtccatgggatcgcgaagagtcggacacgactgagcgacttcactttcacttttcactttcacgcattggagaaggaaatggcaacccactccagtgttcttgcctggagaatcccagggacgggggagcctggtgggctgccgtctatggggtcgcacagagtcggacacgactgaagcgacttagcagcagcagcagcagttgcttctagtagtctcttatgatcctttgtatttctatggtgtcagttgtgatttctgctttttcattattaattttattgatttgtgtcctctccctttttctcttgaggaattaatctggctaaagatttatcaattttgtttatcttctcaaagaaccaatttctgcttttatttatcattgttattgttttcttcacttctatttcatttctttctaatctgatcttaatgattttttcccctcctactggctttggattttctttgttcttcttcctctggttgcttttggtgttgtattgtttatttgtgatttctcttgcttcttgaggcatgaatgaattgctatgaacttccctcttagaatttgctgtgtcccataggtttgggatcatcatctttttattgtcatttgtttctatgtcattttttattttctctttaatttcttcagtgatctcttggttatttagcagtggactctttagcctccgtgtgtttgtgggtttttacagttttttttttttctcctgtaattgatttctaatctcatagtgttgtggtcagaaaagatgcttagtataatttcaattttcttaaatgtactgaggcttgatttgtgactcaagatgtggtctatcctggagaatattccgtgtgcacttgagaagaaagtgtattctgctgctttcaggtggaatgtcctataaatatcaattaaatctatctagtctattgtgtcatgtaaagcttgtgtttccttatttttttctgcctggatgatctgtcccttgctgtaaatgggatgttaaaatcccctactattattgggtcactgtcaacttccccttgtatgtctgttagcatttgtgttatgcattgaggtgttcctatgttgggtgcataaatatttgtaattgttttatcttcttcttgtatcgatcccgtaatcattatgtagtctccttccttatctcctacaataggtttttagaggatttacttctttctttctttctgactgtgctgggtgttgctgccgtgcaggtcttcctctcgttgtggtgagcaggggctagtctccttccttatctcctacaataggtttttagaggatttacttctttctttctgactgtgctgggttttgctgccgtgcagctcttcctctcgttgtggtgagcaggggctagtcttccttgccgtgtgcaggcttctcactgctgtggcttctcttgctgctgccctcaggctctaaggcgtgcaggcttcagcacttatggtgtgtgggctcagttgttgcagttcccgggctctagagcacaggctcaatcgttggggtgcatgggctgagttgctctgtggtttgtggcatcctcccagaccagaaatcaaacccatatcttctgcactgacagcgggactctaccgctgagccaccgaggaagcccaggagtttttaaagtctattttgtctgatatgagtattgctactccagctttcttttgatttccatttgcatggaatattttttccaacccttcgctttcattctgtatgtgtccctaggtctgaagtgaatctcttgtaggcagcatatacatgggacttgtttttttattcattcagctagtctgtgtcttttggttggagcatttaatccacttacatttgaagtaattattgatatgtattttcctattaccattttcttaattgatttgggtctgtttttgtgagtctttttcttctcttgtgtttcctgccttgagaaattcccttggcatttgtttcaaggctggtttgatggtactgaattctgttagtctttgcttgtctggctcagatggtaaagtgtctgcctgccatgggggagacctgggttcgatccctgggttgggaagatctcctggagaaggaaacggcagcccactccagtactcttgcctggagaatcccacggacggaggagcctggtgggcccctgtccatggggtggcagagtcggacacaactgagcaacttcactttcacagcttttgatttccccatcaaattcaaatgagattctttctaggtagagtaatcttggttgtagatttttccctttcatcactttaaatatatcctaccacttccttctggcctgcagagtttctcctgaaaatcagctgatagccttatggggattcagttgtatgttattttttgcttttcacttgcttttaatactttttctttgtatttaatgtttattagtttgattaacatgtgtcttggatgtttcccattgggtttatactgtgtgggattctctgcacttcctgtacttgggtgggtatccctttcccatattaggcaagttttttactgtaattccttcaaacattttctcagacctctttctcttcttcttcttcttctgggaccccctataatttgaatgtttgtgagtttaatactgtcctcaattctttttgttcttttttagttattcttttccttggcattctctcttccagctcacttattatttcttctcactgttactcaactgttgattccttgtagaatatttttgacttcagttgttgtgttgttcatcactgtttgtttattctttagttcttctaggtcattattaaatgctcttgcattttctccattctgttttcgagattttggaatatctttgctatcatttctctaaattctttttcagatagagtgtgtatttcctcttcatttatttgatcttgtagatttttaccctggtccttcacctgtaagatatctttttgttttctcaatttttgttttaattgacaggtgggactgttcctgttttactagttgtttggaactagaggtttagagcagtggagtttacaggcagttgagtagagccaggtcctggtgttgagatgtggacctttgggagacctcaatgcaattaatattccctgagacctaacagtctctgttagtccagtgattctgactcgttgctccaaccacaggagctcaggcctgatctccggcccatgaactgagatcccacaagccacagagtatggtgaaagaaaaaaaaagaagcagagcaataacaaagaataaaaaataaaataaatttagaaactaacagatgttttagaaaaaataagaatatatgcgaaacaacgactggaaggtaaaaagaagaaaaaggcagaagccttggttgggggggcggggcttaggcagaacagggcttaggttggggtggggtctaagctcaagacccacacctctggaaaaggccctgggtggaagtacagggtggtgtccaggcttcagttcagttcagttgctcagtcgtgtccgactctttgcgaccccatgaatagcagcacgccaggcctccctgtccatcaccaactcccagagttcactcaaactcatgttcattgagtcggtgatgccatccagccatctcatcctctgtcgtccccttctcctcctgcccccaatccctcccagcatcagggtcttttccaatgagtcagctcttctcatgaggtggccaaagtattggagtttcagctttagcattattccttccaaagaacacccaggactgatctcctttaggatggactggttggatctctttgcagtccaagggactctcaagagtcttctccaacaccacagttcaaaagcatcaattgtttggtgctcagctttcttcacagtccaaatttcacatccatacatgaccaccagaaaaaccatagccttgactagacggacctttgttggcaaagtaatgtctctgctttttatatgctatctaggttggtcataactttccttccaaggagtaagcatcttttaatttcatggctgcaatcaccatctgcagtgattttggagccccccaaaataaagtctgacactgtttccagtgtttccccatctatttcccatgaagtgatggggccagatgctatgatcttagttttctgaatgttgagctttaagccaactttttcggtctcctctttcactttcatcaagaggctttttagttcctcttcactttctgccataagggtggtgtcatctgcatatctgaggttactgatatttctcccggcaatcttgattccagcttgtgcttcttccagctcagcgtttctcatgatgtactctgtatataagtttaataagcagggtgacaatattcagccttgatgtactccttttcctatttggaaccagtctgttgttccatgtccagttctaactgttgcttcctgacctgcatataggcttctcaagagacaggtcaggtggtctggtattcccatctctttcagaacttttcacagtttattgtgatccacacagtcaaaggctttggcatagtcaataaagcagaaatagatgtttttctggaattctcttgctttttccgtgatccagtggatgttggcaatttgatctctggttcctctgccttttctaaaaccaacttgaacatctggaagttcacggttcacgtattgctgaagcctggcttggagaattttgagcattactttactagcgtgtgagatgagtgcaattgtgcggtcgtttgagcattctttggcattgcctttctttgggattggaatgaaaactgaccttttccagtcctgtggccactgctgagttttccaaatttgctggcatattgagtgcagcattttcacagcatcatcttttaggatttgaaacagctcaactggaattccatcacctccactagccttgttcgtagtgatgctttctaaggcccatttaccttcacattccaggatgtctggctctaggtgagtgatcacaccatcatgattatctgggtcatgaagatcttttttgtacagttcttctgtgtattcttgccacctcttcttaatatcttctgcttctgttaggtccataccatttctgtcctttatggagcccatctttgcatgaaatgttcccttggtatctctagtccaggcttagcacatcccagaacagagtgtataagatcaggcccgggaccctaggaggcttcccagggttgagtgggtggggaactccaggtgcttccctcatcctccaaccctggaggttcccttcctgtccccttgatccccaggagttagggtaaggatacttctccgggcatacaaaaccctcccctcccaagctacccctcaggtgtcctggtcctgtgaggtcttgcttctcctgccccctgctccccccaaactcctgcccagttgcttggggattcttcccttctacctgggcatctgaggtccctcaccagaatctattaaatgtcctggctgtggggaggcatggactcttggtcttccttccctgtcatcttatctccatccttctgtctctatcttttgatagtttgattaaaatgtcttagtgtggagctgtctatgcttatccaacttgaagcttgttgagcttcttgggagtatctggaatcttcaagtctttttaaaatcaagtttggaattcttggccattatttccttaaatatattctttctgctcctttctctctattgtcttcttctgggactttcataatatgtctgttgctgcatttgatggtatctcacaaatctgttcacttttcttctttttccttccttctcttcagactgtataatttgagttgaattgtctacaggttcattggttctttttttaaaattctttcttttttttttaaattatggaagtatgatgacacattcacaggagacttggaaaatacagaacaaagttacatacagttctgctatgcattacaattattttttaattagataaattaagatttttggttggagtttcaataaaaaactctcaaaaattaatagaatggatatacagaaaagtagaagcgtatagtccagtgaccctgaaaagcaccacagggtcactgattctttgttctgcctgctcagctctggtgttggaaacttcaagtgagcattttgtttcagttattgtacttttcagctccacaaattttatttgggtgctatttataatgtctgtctctttattgattttctctcttttttgagacatttttcttctggtttcctctatctctttgagaatatttaggacaattaatttagagtgattgtctacagtgttcaatatttgtgcttcctcagagacagtttctgttaatttagttttctttctcctatggatggtccatacgttcttgtttctttgcatgcctagtaattttttttgtggaaacatgtaccttctgaatattatcgtatcaatattatcataactcaggaaattagattctttttcctctttagggttggttcttgttgttgctatgggttgttattgtatgtttgttcagtaacttttctaaactatgtttaattactgtattctacattatatattgttctcggaaatctctgtttctttagcttagagtcagctaatgatttggcagagatttccttaatatcctggaataacaagaaaaacccgcccactctgccattttgctgatactcctgtgtatcatcttttgagacctagcctcagaggctgtgcagtcccacgttctgttggttgaggtagacacaaagacctccccacccccagattctaggatagcgacacatcccacccttgatggcacatcaaggtcacattagaaaacgggacatccccggatgtggccgcctctggaacataccatccactctaggatgggccaacagagatttgatggctgagatgggtccccagaggccatagctgagcatgctgtcagtagctagactaggccacggaagacctaaggagacagtgatgccacaggaaggccgctaggatggagatacggcgggtcacgtaagcaaagatctgctgggggctcctgctgtagtcccaaggctgttggtgataggctggccaaggccacgtgcctctgccacacacccgctttcccatctttgtacagggcagccccatccttctgctactttgacttccttatgattcctctctatcacaaatgcaatcagcaatgccttcagatccaatcctgaatccagccatctcccaccaagcccagacaccctgacagcctgtatgatcagagtggctcctatacagctgctcagtgacatttgcaatgtccctaaggccaaaagagctgtgtcaagcacactccccccccacataggccccccagggcacccagctcccttgaactctctggccccgctgcctcttttccctcctcccgttcgtctttcctgtgctcctctccatcccactggcctcttggctgcttcccaaacacggaggacagttctagctccacctctgctcttgcagctcccctgccattgctcttttctctgcttctgtatgatttccctgtccatttccctctgcctccttctaaatgtcaccttgtctccacatcacatagccccatgctggcctctctccccatcacctggcgtcacatcctgcttctcactgtcctaagtcctttaccatcacatccatcagcctccccatgagtactgtgaggcccaccccagctgccctctctgtcttaccagcacatggccactacctttgggaggaacaaatggccctgctcagccctggtagctggaatgcagaggaaggaagaacaaaagatgtctgggaggaagacataccaggccctgagactgctggcgtgcatgtgcacagaggtcctgagagtgccactgagcattgcattgacggcaggtggggctcgatggtgtttgttcaggggccagggctgcttgacatcaggcagtcatggtcacacccctccagcttggcccatgtcctctagagtcaggaaggggcaggggagagtcacaccgggtgaccttgaccagcaagtcagctcacttcctggagcgttagcgtccccatctataaaatgggagagtaattgccactcagccaacttcatggagccactggctggggtaattacacagcaggtcctgtggggatggccactgctgtgagcgggagaagttagggccgctgggtgatgtgacacatcgagagtgggggcgtgtgcgtgagtgtgtgtgtgcatataagtatgtgtgattctgtgtgtgtgtgcatgcatataagtatgtgtgattgtgtgtgtgtgcatatatgtgtgattgtgtgtgtgcatgcatataagtgtgtgtgattgtgtgtgtgtgcatataagtatgtgtgattgtgtgtgtgcatgcatataagtatgtgtgattgtgtgtgtgtgcatataaatatgtgtgattgtgtgtgtgcatgcatataagcatgtgtgattgtgtgtgtgtgcatatgtgtgtgattgtgtgtgtgtgcatgcatataagtatgtgtgattgtgtgtgtgcatataaatatgtgtgattgtgtgtgtgcatgcatataagtacgtgtgattgtgtgtgtgtgtgcatataagtatgtgtgattgtgtgtgtgcatatacatgtggagtcatgtgtgcgtgtgtgtatacgcagaagtgtgtatgtgttcacatttgtgcatgtgcaaagttgtgtgtagtgtgtgtgattccaatcccaaagaaagtcagttgccaaagaatgctcaaactaccacatgattgcactcatctcacatgctggcaaagtaatgctcaaagatctccaagccaggcttcagcaatacatgaactgtgaactccctgatgctctagctggttttaggaaaggcagaggaaccagagatcaaattaccaacatccgctggatcatggaaaaagcaagagagttccagaaaaacatctacatctgctttattgactatgccaaagccttcaactgtatggatcacaacaaactggaaaattctgaaagagatgggaataccagaccacctgacctgcctcttaagaaatctgtatgcaggtcaggaagcaacagttagaactggacatggaataacagactggttccaaatagagaaaggagtacatcaaggctgtatattgtcaccctgcttatttaacttatatacagagtacatcatgagaaacgctgggctggaagaagcacaggctggaatcaagattgccgggagaaatatcaataacctcagatatgcaaatgacaccactgttatggcagaaagcaaagaagaagtaaagagcctcttgatgaaagtgaaagaagagagtgaaaaagttgcttaaaactcaacattcagaaaacgaagatcatggcatctggtcccatcacttcatggcaaatggatggggaaacactggaaacagtggcagactttatttacttgggctccaaaatcactgcagacagtgattgcagccgtgaaattaaaagattcttgctccttggaagaaaagctatgaccaacctagacagcatgttaaaaagcagagacattactttgccagtaaaggtccacctaatcaaagctatggtttttccagtagtcatgtatgcatgtgagagttggactgtaaaaaaagctgagtgccaaagaattgatgcttttgaactgtggtgctggagaagactcttgagagtcccttggactgcaaggagatccagccagtccatcctagaggagatcagtcctgggtgttcattggaaggaatgatgctgaagctgaagctccaatctttggccacctgatgcaaagaactgcctcaatggaaaagaccctgatgctgggaaagattgaaggcgggaggagaaagggatgacagaggatgagatggttgggtgacgtcaccgactccacggacgtgagtttgagtgaactccgggagttggtgatggacagggaggcctggtgtgctacagctcgtggggttgcagaatcggacacgactgagcgactggactgaactgtgtgcgtgcatttacgtgcgtgtgtgtggtgtgcggtgtgtgtgtggtgcaggggtttatgctgtgccaaggtcagcggtgttgtggtgcagcaaggtatggtcatcaatgtcaccatgcccaggagggtccagacaggagtgtggtgccatctgggttcctggctccagaacctaatgcggatgcctgaggttcccactcccccatgtaagaagaaacatcaggggtttcgggaagaaggcagaagcctgtcccacctggaaaggctgtcatcctggaggtggaggaaggctgtaccaggtggggtcaggctctactagcagccagagaaggaagagtgggtttatttctgggctctattctaccccattggttcacatgtctgtcctctgcctaggccacattgtcttgatatctgcagccctgcaatgagtttgaaaacagggaagtgtgagtccaactttgtcagcttttccaagtttgtttcaactcttcagggccccttatttggcttttaagatcagctagtcaattcctgggggaaaaaaacttgcttttttagaggttacactgaatctgcagatcacttagaggaatattgccagcttagcagtttttaagtcttctgatccaagaatatagaatgtcttcatttatttaggtctttgctatgctatgctatgctaagtcacttcagtcgtgtccgactctttgcgaccccatagacggcagcccaccaggctcccccgtccctgggattctccaggcaagaacactggagtgggttgccatttccttctccagtgcatgaaagagaaaagtgagagtgaagtcgctcagtcgtgtccaactcttagcgaccccatggactgtggcccaccaggctcctccatccatgggattttccaggcaagaggactggagtgggtgccattgccttctccatttaggtctttaatgtctttgaatgacattttgcagctcatagcctacaaatcttatatttcttttgtcagatttattcctaagtgttttttttttaatggtattataaatggaattgttttcttaatctcatttttgcattgctcattgctggtgtatagcaataaggttgattttcagatattgacctcttgaactctatggttgattttcaaatatagatctcatactctatgatgaaagtttatcaattctaatagacgtttcattcattacttagaattttcatgtcatttgctaatagagacagtttcctccaatctggaccctttttatttatttatgtttttcttggtcagtcgccctggctggagcctgcaggacaatgttgaaaagcagtgagaagagcaggcgctcctgatttcctcctgatcttggaggaacagctttcagggcccattgtgttcttaaaatttaaaaatctaggtatgagaactacccttcacaaaaacaaatagataaaagggggagagttttgatagaacacgtctcaattctttgaatattttctcagttatgtatgccaaaaatctcacagtgatgtattgatacagtgatatatcaaaacatttttttaaatgtgtcagctcatcattctattgggtcctctttcattctgaaacaagaaattggaaacgcctgatttacacaggtcttggtgtcccagtctttatagctgacatcagggctggacatggaccgggaaaactgggggcgtcttcgtgggtcaagtgggagatgggtggtcctggaagggaaggccaaagaagaagcagtgatgcaggcaagaatgacagtcaggatgccttggaatgacccatgccatcctataggccctggcctgacccctagggacatgtgaacctgccttggagacctttggggcacagcatcaccctcagtggcctacaggccttgtcccttttctgcacattcagacaaaggatcctgtcatgctcaaccccaaactgcaatcttccagccatgatcaaacacacaagcacctaagcaggacagctgtggtgacagtcaggaccctaactcccttctgtgttacccacaccagggtgccacagcacccatgccctctccctggtgacttttccaagcctgcattgtagatggacctaccctcagagctgcctgcacatgctgcttcccgggccccacagtccgaagtgggatccgtctttgtggccccgttgttgcagcctccatcctctccagatcagttttctctttagctctgggcccatagggcccacctaggggacccctcccatcctccagggcagctcctagtttcctgactccatcctcaacatcactctcccaggacaagagctgagccctgcagggtgttctccagtctggtgtgggcccccctgccgtgcacagtaggttcacatggcaggtacatagggcagtaccaaggtttgctctggcacagaatggttacttcataaggacatgctgagtaaatgactgaaggatgagcacgtaggcttgagggtgcccatgcaggcagacttccctggggagcgggaacctaagctagatcttaaagagctttctttttatttaaaacatgtatacagtgcttttgaagccatgtgttagagtgctctacacacagcagtaaattgaatcctaacacccatctcatgagccagcactatggttataagttaaggaaactgagatacaaagaatgggctgggccaggactcctaagagagcaccagcctgtgggaggttgggggttctgtagaggctgttcaggtgagagcaaccctgaaggcgcccagggcctgcatcaaggagcagagaggcaccagcttcagggctggaggcccagggagctccccctcctttgcactccctcgaaaggctctcagagactctctagtctccagcagacctccaggaccctcgggtgggctctccccccccacccttcccgagcccactctcgcctctcgtctctccctcatgtccactgtcccccgcgttccccgcttcacgttctccgccccatctccgtgctcctccctttgccctttcctccctcttccccctcctcccctcagtctctctccctcttcctgcctccattttcagggggatgaaagtcacctcagctccattcgccctcatcacttggtctaacgggaaagggaagacctctccccccgttgctcgccacggggctgagaaatggccggatgcattgtggcgcagagctgaatggcccaggaggaaggagcctgccaggggccccagagagaggccagctctgggaggccattgtggaggcccccgcctgcccacccggccacactcacagtaatcaatctgattggattagggtcagggcgaccctaatcgtgtcagaggtcactcgggctttgtggcagggtccatggggcatttgcccacccctgctgaggcggcctagttgaacaaagcttaacactgccagctgaggagtggggcccagccccatgtggaggtgtgtgagtgtgtgcgtgtgtgagcatgtgtgtgggggtgaggataagagggaaaaagtgtgttcatgtgtcctgcttccagcatgctcactctctctctctgtctgtatctctctctcatacacacacccacacaccactatctgcctgcctggcctgggactgaagactggttggccaggtggacccctgagaggctgccaccaaggagcgtgaggttgggcagcagaggcgagcctgggcttggaagaagtaccctccactctcatttgcacagtagcaggacaatttaacctgcactgggcagaaagcatttgaagaattttgagtgcgtggaggctggcacacgatgcagcttatctgtccctcctggacacctggagcaccagctttccctgagagctggccgacacccactcttgacctccaatgaggtgaagggaggggaagccaaaaggcagggaaggcaggtcccagacgtcagcgctttcgcagacactctggaggaagccccgccgggaccacgcccctcaggaagtgagatggctggtccaaggtccaggccagtgggtttgtgggtggcacatactttgaggggtctgtgtcacagctaggtggagcatttgcaccttagagaaatgaaggggagccgtaaggaggtgactcatccacggtgggaagcaggacccttgatgtctctcccactggtgtcccagcacgtcagcatgaacaggtggggcatgggccccagtttcatcatcgatgacccctaagaagctgggcctcagcctgggtccatcactagtttagtgcccttgggatagtgtccttgccagtggctttcgcaggcacccccaagccagggcctccgaggcttccctagtgaagagactggaggagccgctcaaccctgcctctgattccagactgtgtgcctctaagggtcccttcggggtctcaggacctggaggacacagtgcctgaacgtctgcactctggcggggcatcctcattggcagagggggcctcgctgctggtagaggtgggccagtcttcacctgagtcctcacccactggacctcacccacgggacagctgacttgggggccctggctgaccccttcaaaacacatcatgtcagaatcctggttggttatttgaggtatattctgtggtgtcggtcaaagtctcagtaagtgtgttctgggtgcctgaggcctgctctggctccccaggccctgcttacccccttgcagccctctgcctatgcccttgggcagccctgggccaggcagccacatctgcctccctctacccccttttccttgtgaggctgggctggagagagccagagggggatggcacagcctgtcctcccccaggcagagccccttcccttggccaggctccagggggtggtctgtccacctccctgtgtgtcctggcccgatcctcggagggtcggagtgcaggcacggggccagggcaggatggccgggccggcaccaaccacggggctcaggaggggccagagagaaggggggccctccagagaaccagcatccctgaatccaggttgcaacccctgacccccatcggaaagtgtttcggttcacggtggttggggggctccgaccgtctctgcggccgcccctgtatatcattaactctccccagttgggggtgtgtgtaaaggggccaggagagaccccggtgacaccctgccgagcccggctcagaaaacaatatccccacgaagacgacaagattaagcacaagaggaaagtgaaaatgctgctggcgattcacacgccctcaggagtgctgtgttaaagcgtgtgaatagtgagctcccctcgtgccccaggcccctgggccgcgcatacctcccggttgctatgactggcttgctatggcctaatcgccgacgagggggaaattcatataaaatatcgagggccattgtgggcctaacgcggcgtgacagtggctcacaaagccagattcattagccccagcaggtaatcaggacgccggccgtgctggcggccgggcagtgtcaggggccgctgctacagtggggcgcaagccgcattccgctctcaggtggttccatcctttgtgcgggacgggccaacaggattaccaaatgccattgcccattgcgacaccccctcctagccaccccgccagctctgagaccaaggacggtgggctgtgtgggaagggggcagactgcaggctaggggttcttgccagtcttccgtctctcctttcctcgtgttggagcattgctacggggaagaggtaacaacctctgaatgctctgaaagtgctcttgaggccttcgtgggccagggagacagacacagagcatttgctggcctctctgcacctgcacaggcactgtaggacttgcttgtctttgcagggggttggttatccctggacctgcctctctgcatccctcccttcctacagcctctcacctgccaggtacgtagaggcccgagtctggccagggaggcctggagggagccacggtcgctgcctctgagtgtgtgctggggatgtggcagagtgagggcgctgagttctttctatgtcttgccagggatgctctggaggcaggtgggaacagagaaatgaccccacagaagctcccatggaggctcagtgtccacaggagccatttgtcccaagcaggcatctctgcaggcctctccaactgtgagcaccagcacgtgccacaaagaactccttgcctgcaaccccggggaagacccaaaggacccctagctgagtaagggcaagcctgtgggatgggggaatttgcctcacacagctggtgagagagaagcttccctgcagcgtagtagagtggtggggcgagagtccagggctccccaccctgagcaggcgactgtggttgcagccatggtcctggcagggggagggggtctgcatggaggcaaggaagcctgcctcctacctgcacctcttctgctgatccactccagcatcaagacaggaggtctgaccccgaagtcaacattgcccatggaagaagcagagccccaggtctcaagggaccacaggggaggcacgcccaggtgagagagggccgtctctcaggccagaactcagccaggaggctttgacaggcaggtcttacagctctaaaggagcagtcacatcctaccctgccccaggctgagaccccacccagctaccagatgatagcagtcaagccccagggacccagggcctcacttcacatggaagccaggccagaaatgcgtagcccactgcaggagcctggagtaagagggagtaggtgacaccctccatattagccctttccatgcccctccaagggcagggcgtgtcagagacaccctcgccatgggaaaccctctccctttagaaccctgtcctgggacctcctttccaggtgcctcttgggtctggccaccttcctgaggagggccttaggaatctgagaccataatggagcttgagttcagctcaggaatgtatcagaatcaccaaaggattcttcacagatatacatgccccctcccagaactgcagccttgggtccactggtaggtctgcagtgaccactgctggggtatctagttacctgcagagcttttcaaagggtgcattgtgtggatcccacagacagaatgccccaggagcttgatttcattggtcagtggtcaaatttgaaccacagtccccttccaggaacttccactgcctgagaggttacactcattcctcagaaaagggatccacggccccttcaggccaatgggaccgtcccaggagccctaggccatcccctccttctcatccaggaccagccccccacagccttcccctcccaggagaggactggagggtctctccccatgcccagtggccacaaagtatggggccagcctagcagggcaggtgggtcctccacctcctgaaagccacagctatggggacagcccggtggtcatgaagcccatggctagggggtcgcaggagcttctgctgggctcagtgcccatggctgggcagcatggggcccgggctgactgccctggggctctacacccctctggggctgagagggcctgagggacccattatggtggctcagcagagaagagccccctctttttgtctggaccagttataaaaggatgtgcaaagcctagggcagggaggcctctgggtggtgctttcctatcaatccttgataaaagggccttctgggtaatctcccagatggaaaatcatctctgggacagaggccgcagtcttcttgtccactcagaccacagtcaacacttaataagtagttgctaaccactggggaaatgttaaagacaaggaccttggaatatttttttgaactttcttcagcatataggactttggaaataaatcctttttttgatgtaaaacaaaggtccttttctgaaattatgcttgtcatttcttatgtatcttattctctcaaaaaagtaacaaaatttcacagtcctatgtcagtccccaagtaatttttagtactttccaagcctatgaaatccaaatctggaaacaggatttattagaatccctctagagtttagcactagagttctaaagttctgagactttagaagtaaagtaaagtaaccgccaaagcccatctcacatgtgactcttgaccctggttcccaaggctgcactggtctcagtgatggtgcagccgtgccagacaactctcgctgcatgtccctcccctactcccacccaccaggactgcaagctcttacaacatagtaacctgccccagcctttacctctgcccatgcctccatccaccgttcatccatccatccatcaatccatcattcagccatcacccacccactgtccaccacccactcattcatccacccagtctccaccatccacccattcatccatccatccaccctccattcattcagccacccctccatcccaaacctgccccagagcttacattgccaagcctattgtgtgtcctttccccccactctcttcatcataaactgtaatctcccagaggcaggtgacacagcacagcccaaagcaaagaacctgacttgcaatagcagggcctcccactaaaggaatgcaaagattcctctggttcaccctcctcctctccagtgcaaggcttccctccacctaacagtaggtcattcagtgtatgcttaattaccgccagaacaggtagctccttccactttcagaaagtctaagttgttagaaattccatcagagcagcaatccactttctcacagatttcttactttggttcttgagaatgggcaccttgcatcttacttatcttgtatatctagttgtgagcctagtgtatggctcattataggctctcaggtcctagatgggtggatgactatattgatagatggatgatgggtggcgaatgaatgaatggatggatgatggatggatggatggatagatggtggagggatggtagatgaacagatggatggatgggttgattctggatggacggattgtggataaatgaaaaaagggtagctcatcgatcctttgaatgaactgactaaataattgctaatgaaacaattattaccagttaggaacaaaaagcctcttgatgaggtgaaggaagagagagaaaaggccagcttaaagctaaatattagaaaactaagatcatggcatctggccctattacttaacagcaaatagaaggggaagaggtggaagtagtgatgtatttcctattcttgggctctaaaatcactgaggatggtggctgcagccgtgaaatcagaagatgatcacttcttggcaggagagctataacaaatctagacagtatgttggaaagcagagacattactctgccgacaaaggtccatatagtcaaggctatggtctttccagtggttacatacagttgtgagagctggaccataaagaaggcagagcaccaaataattggtgccttcaaactgtagtgttagagaagactcccgagagtcccttgaacagcaaggagaacaaaccagtcaatcttaagggaaatcaagcctgaatactcgttagatgctgaagctccagtgttttggtcatctgatgcaaatagccaactcattggaaaagtccctgatgctggaaaagattgaggacagaaggagaagagggcgtcagagaatgagatggctggatggcatcaccgatgcaatggccatgaacttggacaaacttcaggagacggtgagggacgggggggcctgatgtgctgcagtacatggggtcgcaaagagtcggacacaactgggctactgaacaacaatgaaaaaatatcaagcttctggggaagatggttttcttgatgggagacacttgtctcacaaaaagactcttttaggagattccctttcttcttccttttcccaatctgagattgcagtgtgggaatgagagtcctgagctggcacagagcaggcttgagaagccctaacagctcatgtaggctctgttctagcaatgcacccctctcttgtaggctgtgtcccttccttctctcttgacctgccatagcccattcacaagaaagcattttgctggtgacggggatatttccagtctcatctccaagaagcaatttctctacccacaggcagaatggttctctctccctatctgtgtgtgtctgctgtttgtggctaagatgttgctgaaacctgagtcactgctgtgccctcccagcccatgaccacaggagagtcctgtgccccttcctctctaagccgagactactccagagggtcatggctttcttggttcaaacctctgtggaaatttgataaaaaaaacagtctatccagaaaacacacaagttttcagacatgccctggaattcagctcatgatttggggagggttatgttctggactttgttggtatgttactgttacatattgacaagaactttaggttgaaagacttctgtaagtctacaataaacctcgttttaggggtagagtaaatgaacatgtgggcttccctggtagctcagcggtatagaacctgcctgccaaagcagaagactcaggtttgatccctgggtcaagaagatcccctgaagaaggaaatggcaacccactccggtgtgcttgcttggagaatcccatagacagaggagcctggcaggctacagtccatggggtcacaaagagtcggacacgactgagcgactaaaacaacgaacaacaatgaacaccctaaagcttacctatggtttcctgggttaaaagccccacagctgtgggatggcatctgggcattctgggggtctcatgcacagcatcagaatgtgttttaacttttcctttggaaataattgtgtagacttacagaaacgttgcaggaatccagatctcctcccaggcctctccattgctgacacgacacaaatccagctagatccatcaaaaccaagatctgtcacgactaactaaactctagggtttacccagatttcatctacttctccactaatgtcccttatctgtccaggatcccaccccaggtccatgggctcctcagcccagcccttgcccttcatgcccttgaaaccaggaggaatttggttaggtctttgggggtgtctgatgtttcctgatgattagatctttaaaatgcctcaaagagggtggaatttccttgggacatcgtcctaggaggcacatggcatccatccatctgttttctgtcccgttgctggtgatggcaaccccgatttctctggtgaggagggacctgttatagttccccaatgcaaagtttcaggttttctctttgtgactgatcagcttctctggtaactgcttaaagacatgtgtcttcaattttaaaaggattttcgttgccagaaagacccatcttactatttttttttttttttttttttgcttatggtcttcgtaaggcttcttttcctcatgagcaatttgaaggccagctccaaggggtccttggtcctccgatctttatttgtgaggagcccctcccctcgtttgacagaaaaggaaactgaggtacccagaggagagagaagtgtgcaggctcacacagctagttggtgacagagcagggcaagaatgagttttttcctctaagttcaagggggaacacccctcccaatccctgcacagccttcccctcaagttgtctggaagccctggactgtttgcctgagcttgataagcggagatctccaagccctgtgcagggcagggcaaagccccaggcccgctttctctccccttatctcagtagctggagaggggaggtgaacaggggctaatagagggtgcagagcagaggcagagaccggaggcaggatcctcctacagggctcgccctgggccctctggggacaggctcagaaggacctgggggagcgtatttaggactcggagactctgagccttgagaagggccaccagagagccgcgtggtaggggaggcatcaggctgtgtgcagtgggtttcgggaatgcccaggacatactggctctaccctgccctgggaggggtggttaggaacccccagacctccagctcacagcccctaacccagagtcactgcatgggcaggaggggagacaccagaccaggaccctggaggggtgagaatcaggtgagcccagcctccaaagagttggaggtgagggacaacctgaatccttgagaagacaaaataagggtgggggctctgctgagtggaagaacaggaaggaagggggtctgtggccatgtcatgtgtgccttgagtcagcaggaagtggctccaggccgccctgaaactaatcaggtttattataaaaggataacaggacgggggcttcgtgtcttcagaggcctggctgatgtctgggaaagaggacggtgaggcaagctgtcctgaatttgttccaggacaagctgagtagggaggggcagagagccaggtcccctggggtgcgcctgtccaggtgtgctcagaccctcctggactccttgtcccagcccaaggcctctgccctctcctctgaccagtccctcgctcaccaataaccatctgtggggcgggcctggggctacagattagaaacaaaaggtgaacaccacacagcccccacttcagggagctttcaggcagaatgggtgtgagacggtcctcctgaagtcctcggggagccctagggctccagggccaggtgtggactgagcccaggctgcatccttggatccccaaagagcagggacggggacacagcagacgcacagcagcagagaagcagctggaaagaacccaagggaaggacgagggctgagtgtggctggaggccagggagcggtgatcagggctgagagggtagcaggtggagcagagtcagcctctgtatgagccaggcaaggacacagtggcaaggcctggaggaggggcttggcagggccagatgggctctggataaagcattcctcctacagtatgtatcgggggatgtacatacttgtgtgagtgtgcacatatgtgtgtgtctgtgtgtacatgcatatacgggtatgaggtgagagtgtctctatgtgtggatggggtgcggggaagctggaagctggagccgcctgtcccaactaggatcctcttctggtgcaagtgggagattctaaggtctggactcatggtttgagaacaaggagaggcaagatgggccacggccatttccggaggccagagcagccttcagacttgggtagatcccaacaaagctgtcagtgggaggctgatggggagaaatggggaatccttccgggtttgtgactgagtgcttgcctgggagtttccagaaagaagcaggtgtccaggcctgctctggggaatacatgaggagtacataggtgggctgtgatctgcagaggaccatccagaagtgttggcaaatccatagaaagaagtcaccaaaagcacagtggagccttgcagctatcaagcggcctggtgcctagggagctttctcagacacatcccaccctgtgtgttcctagtgtaggagtaaatgtgcttttctcagtggcaggtgtgtgtgtatgtgtacaaagctgtgtggctgagtctgagtgtgtgcacactgctggctggaaccctatcttaccacttccctgactctgctgcctgattttgggacacatatccttggctgcaaacctgggagcgggtaagaccatgcagttggaggaagtgtgcggtgcaaccccaaacctctgcttgctccccagggtggagccccctctccatccccctcccaggaaaaaagcctcctgagcattgatgtggggtgaggaggtagcagccccctgggatgactctcctgtagccatttcgagcccttgcacggtccaggcctgctgtggggcctctgcccaggaagagctcagggagaaagtggggcacataccccttgccagacacagaaggccctggttggtcctgttcctatatctctccagctcactcctcagtccatagcaatttttttacctgggattttaaaattcctgctaatcagcaggtaagctccatgaggttatcccgctccctgatatttctccagcagggtttggcaaacagcaggtgctccacacacatggggaatggtgattggaggagtgagtgagttctatcagttcatgcaggacccagggtacccccgggacctggtcctccacctggagcacatcacggcttggtgccttgaggaaatgtttgcacacactcgggagccatgatgcactgatgcattcatccacaccgtctggggaagcctggctgaggatccagcctctgcaaagtccaggctgtcccccacatgccctgcctttccccctggtcctgccagcccagcccctccccacctggggccctacctttgtgagcccccatgcagaataccccctgcctcctgattttcctctgccgacttcctgcctgtcctttgagaccagctcctctagggttctgtctgccagggtgaggcgaggcctcccacacccagaaaccccctgccgctggcctttccaaggcaggcctctgctgactccctcacatgcctgtctgatccagttcagccccactggctttttcttcctaagcgtcagccaccccccactggccttctaaaaacaaatgtcacatcccctgactcagttcctccatgtgtagaaggagaaggcagcattcaggggcccagaagctccaatatcaggtcagaggcagtctgccagttcccgaggggcattcagctccagacccacgcacgaggggccagcacagggtaaagtgcactcggagacgctgaccttcagatggctccagaagagttgtcccttccgctgggcctctcagtacctggtgtctgaagtgggagaagggaagtgtgtgcaggcagtgaaagaggcacaacgggcagcatgtgagccaggagccgcaccctgggcagggccgctggaagcttccaacaaggacgtctgggcagaagggctccaccatgggttaggaggacactagaaggagtatctgcctttttaatcaatccacataattattttgagattcatccatcctgtctttcctggcatgccaagtagaattccacttcataaatatgctacaggttttaattgaaatataattgacatataacattataattagtttaggtgtccaaaatagtgaggggcttccctgggggctcagatggtaaagcatctgcctgtaatgcaggagaccctgagtcaatccctgagtcgggaagatcccctggagaagggaagggttacccaccccagtattcttgtcccatagacagaggaggctggtgggctacagtccatggggttgtaaagagtcagacacgactcagtgactaacactcctactactacaattacaacataatgattcagtgtttgtggacactgtgacatgatcaccacaataagtttaattaacatccattacccccacacagttacaagactttttcttatgatgagaacttcaagatctatgttcttaacaatttccaaatatacaatattaattctagttaccatctgtaacccacgacttatttaccttatgccactatttttcatccattcacctgttgatagacattttagaactcagtttaggactatcacaaataaagttgcagtgacatttgcttcatggtcttcacatgaacacaggttttctccagggttagtactttatggggtaggtatatgttttcaagaagcggccaaatagacttccaagcaggaagcaccggtttccttccagccagcagtctacagcgttctgatttctctacatcctcaccagcactggttatgatctgactttctggtttcaaccgtccccgcggttctccataagtgatgcccagaatcttgccttggctccttaactctccgtgtactttctttggggaagctctctcccctccttgggtccttactcagggacgcacgctcctgtcccaccgcagccccgcctccccttcactgtaccccggttaccgcgctgcgagtcttagcaccccacgcccactgtgggtgcccagggcccagcctgggaagaggcagccacgccccccacggccagcccctcccagccaagccgggtgctgccaagcaagtcatctcttttcgcagctactcgggagtccgccttcgtgcacgccatcgcctctgccggcgtagccttcgcggtgacgcgctcttgcgccgagggctccgctgccatctgcggctgcagcggccgccatcagggctcgcccggtgagggctggaagtggggcggctgcagcgaggacatcgagttcggcgggatggtgtctcgggagttcgcagatgcgcgggagaaccgcccagacgctcgctccgcgatgaaccgccacaacaatgaggctgggcgccaggtatgtttgtggcccccttcagtcctgggggtgaagcagaaatccctgagaccacacccctgcagggctctgggaaacagaagctttctgagcaggatgtgtgccctgccctctgaggggtgtggcccgctggaggccgggtggtgggccatgggagggatgtctctgatggccagacagggggtctgctcacctcctgcccaggagtgtctgaaacacagggctgtcccgctgctccacgaggtctagggcattctcacagtatggcaggtctgcctgtgacgttgaggtcacaaggaaggagggacgggagaaaggcctgctcctgcacattcccggagggagacagccgggctgctacaccacagtgtggtaagttctccaatgaagaaatgcgcgcgcgcgcgcgcacacacacacacacacacacacacacacacacacacatcgcaaggtgatctgggcgtagtggagaggtcagacccagactggagtctcaaaaaagacttctactaactgaggtggtgagtggagacaagcagaatccttggcagacagggaagcctggcatgctgcaatccctggggtcccaaagagtcggaccgattgagtgactgaactgaactgaagtgagatgaggggaagccaggaaagcattgggtaacccatagtgaaagaatgcacaggggttagttcaggcagaatatggagaacagagaaagaaagatgtggggaatggagaagctgccagagagcaagttgtaaaaggctttgtgagccttttcgaacagaacttgattagagggtcaggggtagctgctgataggaagtgatgtgtgtaggggctggaaaatgtccagtagagttggctctgaccttggccaatgaaactggggcattgcagagggctgaagagtgaacattttaatttccaacagcagggaccttggtgactcacattactcttccaactaaagacaagtacaaatgtaggatgaaactaaaaagcaccattcacaagtatagaatactcacctgatacagtcacctgacttatcacaggcaagaagacagtgcagtgccaaaggggaaatggtcttttcaataaaggatgctcagttagttggataacaatatggtaaaaaattaatcttgacccctacttcacaccatatttaaaaacatcaattctccatttccaaacaggaaaaagtaaacagagaatgtttagaagaaaatctctttgggaacttggagtaggcaaagagttcctaaacggccaaaaaagcactcataatgaaagaaaaatgtgataatgcagagtgtattaaaatgtataaaaccgcaccaccatgaaactgaaaaggcaatccatacaggaggagagattcacaatatatacactcaacctgtatattaaagttatagtataagaagaactctacaaactaataagaaagactgataacccaatagaaagttggctaaaatatggaaagccacttcacaaaagaaaatctagaaatgaccaatatgtgtgaatatgtgaaaaggtgatcaatatcactagtcatcaaggaaatgctgttggaatacatgccctggcaggaaagaagataacaactagaagagagcatgatggaggtttccgaagagctgtgttctgaggctggtcatttgtgaaatttggtcatatttcatgcttatgacatataaacttttgcatgtatactacacttccaaaaaaataattgttaagtgtcaaatagctagccatatagtgaggaattagcagtccaaagttcagagggcgactatagcctccaagccaggtacttggggctgcttttatccaggggtcatttgctggtctgtgaaaaaagtatatatgctgagctgcactttcagcagcctcactgagctaaaagggaccgtcagaggttctatgtctgggaaataattcctcagtttaggcgggatcctgaggagtaaaagaaaacctgaagtagacaagcccttgtgcacatgtgcaggctagtaaaatctcaaacctggattaaggtgatcccaaattgctggtatccccatgcacctggaaaaagaagacaaaaatcttttttggagaatgataaccttatgataggctgatatttttttctacaaacaatttttcaaacacagtgttcaacacatgatcaaatataacctatcaaatgagctggtgacagaatgagtgataaccagccaaacaaaacaaagcaaaacaagaacagcaacaaaacagaaacaagagtccaatactgaaattattagacacagattatgagaaaaaaaatatgcttacttatgttcacaaagctaaaatgtaatgtaatgtaatagatttgggaaagaatcacaaagaaactgtagacctgaaaactgaatgggagcttccagtttaaaaaaatgacaaactaaatacgaaggatttttgtctgcagtcccctagaacatcactaaaatgacaataaattgattttaagatacataactaaactatagagaacatgcaaaacagaaggggacaaaggcaataaaactttgaaagcagaaagcaatacctcagtacagtcaagaaagctgaatcttaagccattagaagctcttaaactagatcggctttactctaaagccagtcttaaagcaatcaacaggaatttctagtattcgatatcttgagaagtagagatagatatagggcttggaaacagaaagattggttgaaatctattttaaaagcacttttaaacctactagctcttctgtccaacctcttgcatccagacaacacccctccatcaccatggcagaagcctggaggcttattccctaacgagggtaaagcagaagatgtctggactgctgagggtgaggctgcccagatgagaggagtctgtctatatatacatttctcttcttaatctcctagtgccacagcaactcttgtatgctccaggcgggagaatgaaagattctcccctgaaaatcagaccaatccaagagaagagacttgaagacactgatgtggggtttcccctaaaagcaacgtcgccagatcactctacagtgagggtccaagaacatgagtctctcctgtgtacagcaggttccaataagtttttggtgccctacttttaaatacagcaggtagttagggatcactgaacatgatgccttcctgcaaccacaacgataaagaccaaaataaataaacaaaaaccaaacttacaggaaagagacattatagagatgaaaacttcaaaaaaccatcactatccccagagagttaatacagtgaatccataaaactggaataaactgttaacttaaaagaatattcggggggggcggggaaggaggctcttagaaattaaaatagaacagcaaaaaaatcttagcagaaaggttggaagacagttgagacagccttcccacaaagtagaggaagaaagacaaagaccgggaaaataggaaagattagaaaatatagaagatctgtgcaagaaagacaatgatgaacgtgaagatgaggaagtttggtaaagaagtaatacaagaagtttcccagagctgacgaccagacgttcagaccaaacaggccgtgtaagtgattggcacgagaaaggggaagacccatgtccaagctcattgtgagggctttcttggcggtgcagtggttgagtccgcctgccagtgcaagggacatgggttcaacgcctggtctgggaggattccacgtgcagcacaactaggcccacgcgccacggctgctaagcctgtgctctagagcccctgggccgcgacaagagaagccaccacagtgacaaagtccacacgtgtcagtgaagagtagcccccactcacagcaacgaagacccagcacagccgaaaataaaaatttaaaaagaaagcttattgtgaaatccacagcctatgacacagagaagccttccaaacttcccagaaaaaggtttgatttcatgcaaaggatcaggaatcaaaatatcatcagtgttttctaagaacgacagtgaaagctaggataaaacagagcaatactttcagaatcctgaaagggggaaatattttaagccaaaacttttatacccagctaaatcatcttttcaacttttcaagtagaaaagatttgtttgcagacatgcacacttcacaaaatttaccaaaagggctttgaaaaagatgtctccaagaaaatgaaatccatggaacatctggtgtgtttcaaagtcttgaagagaatatttacatgactagagagtgtatgagactgaatctgtaagtatgttaaaaacagcaacaacaaaacattttgtagggaaaaaaaaagcaatcacatcatgtggctcaaccaagtatgacatttaacaaagccccaacattgtcagcttccctggtgtctcagctggtaaagaatctgcctgcaatgcaggcgaccccagtttgattcctgggtggggaagatccgctggagaagggataggctacccactcccgtattcttgaggttccctggtggctcagctggtaaagaatccacttgcaatgccagagacctgtgttcaatccctgggttgggaagatcccctggagaagggaaaggctacccactctggtattctggcctggagagttccatggactgtacagtccatggggtcacaaagaatcagacacaagtgagcgtctttcattttcaacactgtcagcaccaagttttgatctaactggaactatgctatagtttttagagtagggagggagtttggaaaaactgtgtatcagagttgtggcataggtgcccccatgggacctccatggtgataggtctattagacaaggccaaacactgaaaaatcaagaagtaacaagtgaaagtgttagtcgctcagttgtgtccaactgtttgcaatcccatggactgtagcccaccagattcctctgtccatgggattctccaggcaaggatactagagtaggcagccattcccttctccaggggatcttcccgacctagggatcaaacctggatcaagacaagcatcttattagaggtgcagaggtgccaggtgctgcccctagcaggtcaggaaagtactgttaatgagagtgtgggagcagaactcctgtttttcttaacaagtcttaggaactcttggactctttaaagtatatgcatatataattttgatcaaaagcaagactaaaacaaaagacttaggaggcagagatgggaagtggcagctcctctttggaagtttggtaaaaaggagaagaaaatggagattagacagaactggactttggtgagggaatgtaatttacagatgcccctaaaaaagtgccaggatgagaaggaagtcttgaagaaacagcaaggagaggggaacagggtggaggaaacatctggacagggagcccacctgaagtcttagaccagcattgttcaatatagaagtgtaatgaaaaccacacagtatgtatcaatttctagtagccacattttaaaaggaaacaggtgaaatttgttttaaataataaattgtattgagcccaatataaccaacatgttaccatgacagtaatgcaatcaatattaaaattttgaatgaggtattttacatcctcttatgaaatctggggacttagtgtgacccagcatgtagtgtgcccttaacagcacttctcagtttggaccaccagccgcatctcgtgacctcacaggtggctatttctgattacatcacaggacctttcacccccagccccactccttcccccaaagagagaagggaagagatcctgctgctggggtgcccacaggagaaacataatgtaattctcagcactcccctacaatgcaataaacccagtttcctgggccctgaagatactgtgctcaagccactcccattattcacgatcaggccagcccccaggcttgccacccagcccgtgtgcatttcctctagaccaaagtcttggatttccccagttagaaggaaccatttccctttcccacccctgcagttacatgtcaagttacagccccttcactgaacagagatggcctagaagtagactcagcccaggagggggcttcccagaccattccctccaggatcttgggtctgccaggggaaccacatcaaggatagcattgggagagggtgtctgctccgcctgggagtcccagagctttatggagcaggttgagggatcgtttgacagtggaaggaagactaaggcaaggagcacggccatcctccggggaggtggggaggttgagggcctgccccgaccccaccgcttgcccgctcctgtaggccatcgccagtcacatgcgcctcaagtgcaagtgccatgggctctcgggcagctgcgaagtgaagacctgctggtggtcgcagcctgacttccgcgccattggtgacttcctcaaggataagtatgacagcgcctcagagatggtggtggagaagcaccgcgagtcgcgcggctgggtggagaccctgcggccacgctacacctacttcaaggtgcccacagagcgcgacctggtctactacgaggcctcgcccaacttctgtgagcccaaccccgagacgggatctttcggcacgcgagaccgcacctgcaacgtgagctcgcacggcatagacggctgcgacctgctgtgctgcggccgcggccacaacgcgcgcaccgagcagcggagggagaagtgccactgcgtcttccactggtgctgctacgtgagctgccaggagtgcgcgcgcgtctacgacgtgcacacctgcaagtagagggcgtcgctgtcggcgcccgcgggttagagctccacctggcgggggcggggcccctccgtgggcggggctggaggcggggctctgaggtagcgctccccccgtgggcggggcggaggcggggctctgaggtagcgctcccccgtgggcggggcggaggcggggctctgaggtagcgctcccccgtgggcggggcggaggcggggctctgaggtagccttcccccgtaggcggggcggaggcggggctctgaggtagagcccctccgtgggcggggcggaggcggggctctgaggtagagctccctcgtgggcggggctggggcggggctctgaggtagcgctcctccgagggcggggcggggcggagcgggggcgggggcggggctctgaggtagctctcctggagcggggcggggtcctttatggtaggacagggttgaggctcctgagtggcataaagttcttccccggcctagagtgaaacccaggacccttcct

SEQ ID NO: 119 - DNA, 186623 bp, Hippotragus equinus
  source 1..186623: mol_type = genomic DNA
attgacatttgggggaaaagtcacagttttaccaggcttcttgctgctttttttttttaaacaaatgagaaatgttatgttctgacctgagaatttaaagctactgaattacacctaactaaactaagagaaattctctttgaaacatctggatcgtcctcccatacaatacatgctagcatttggaaatcagtccagctgaggtgcaatttgctttcttgagagtttttggcttgaaacaagttccaagggaacttgtgagatttgtttttccttttccacattttagcatatattacaagcgcattcaaccatttgtatcagttctgtccattacataccatcctatattgccagcatatcaatatgggaacaacaatcctgagtcaatcatttggtactgtaatttttgggttagagaagctttggaactgcagttaaaagtcttatttttttttaattttttttttttttttaagcacgggatcctgtcttcacccctacacactgaacatatccattcggatgctattgaaattaccatctaggccagaagcaggcttagctttcacttccaaagaattatctaagtcttctagcttctggctcagctcactgtcagactcatctgaacaactttctgtgggtagtgaggtttgaacccctgaggtgctgcacaaacttgaggtaaccgttgaaggcaaggaaagggaaggaggagaagaaggggaagaagcagctctcctggcagatgcttggaaaaggatattaggccaggacttcatggagaagcaagagagatgaggataggtgttattagaagaagctgcagactgcgaggtagatgtggtgttagggttaggggagcagactgagtgaggtaataatctaacatgctctttggcatttctcattgcttgtttgattgttttctctttgtgcaagcttgactggaggtgttggctaagtgcttcattcccaccgatggccacatcacaggcgagacactgatatctgctgaccgggacgcgaagcactgtctcttgtgggtcaatcaaaggctgaccgaaataacagaaggacttttgatggtttactgcggcgtcttcatcagtaaacatcatctggcactttctgcatataaactcatacttgacgaatggaacaacgtaagtgtctgaaaagtctgcacttttggactctaactggggttcttcttttgtgctttctgtggcgggactcttgtctcccttggtttccgaagcgtcgctggggttcggcggcagcggctcgctctccgctttggaggtcttcgtctgcagggctttctgctgctgctcctgctgctgcttctgctgtctctgcagggaatcctgcaggctctgctggtactgttggtactgctgcaacagggtccccggggacagccccgccagggtctgcggcatggtggggccgtagggaaagaggctctccatgccgcaaacgggcggcaggtagcctccttgcacagcgccgggaagctgaggggtgaaataggaagcaaagccagggataaagtacggcaagaactgtccgcccaggaaggatgcggggtcgccggcgatcgcgttctgtaaagcctgcagctgagaagggtccacaggcgtgtcgcctacgactttgcccaacactgaaagagcagacgagattttttcctcttttttggggtgtttttccggttttgtggcctcgagttcctcctctttgatttttttgaccttgtttggcttcgttggctttttctcagagtctttgttctgcggctcggtctgctgtcctgacagagagggtggtggtggtggtggaggcggaggagggggtggcggaggtgctggagtctgcagcagaggtttggtgggggcgctgctgagagacagggcaggagacgaagtagctgaagtaggaaacccaagcatgcctgcacccggcggtgttaacgctgcaaaaggataacagagagacgcccactgtcagtgcccagagccacacggatgctcaatccctagacagccctcgaaaacattattaacacgcaccaggaattgtcaagagcaccgagcttttgtgttcctctccttttccctagtttcaaacccccacagttaactctcagaaatggaatctacacacttgtgtgtgttagtccctcagtcatgtccaattcttcgcaaccccacggactgtagcatggctgtccacggaattctccaggcaagaatactggagtgggtatccgttcccttctccaggagaatcttcccaatccaggcatggaacccagggctcctgcactgcaggcacattctttaccactgtctgagccaccagggaagccctctacatagttgaacaagattttactcagaaaacaaaacgctcgacagtgggctaggaaaaaagaaaaaaaaaaaaaggacaacctggtgaattgttgggtccttctaactgatacactttgcaagacccctccttcattttaaccaatttttactatacctctgggaaggtagacccacttgtccttcactggagcagtctgacaattaccacattcactaaaaataatcagctatcaataaaaaatgaatttcatttgtttttttctgcctaacttctgatagaaaaatacctttgcatcggataaagaaggcagtagttaatgcctgctgaagataccaaaaaacaactagcagtgacatcagagctcttcttcactaggactgagcgtggttaggcctgatttcattgttaagggtacagggtaagctactcattactccctattctgacactttggccaacagtacttgataggaattgcatgtgttaacacacagctttatcactgacccctccacccatcccacccccaccccccaacagccaaacatgcttcttccaggtttacttgtagcaggcataaatgattctcatatcattagagaaggagaactaaatgctcagtaggcagacacatgtgaggtagagtgtgacttgaaatggagatctttgctggatttcaagcatgcagtctaatgtagtggctggtaaaagcctatcacaaagccatttttaggctctggatagttgggtgaaaaactaagacagttcaaggtagaaatggaaactgtaaagtctgtgcctttcctgagtctgtttttttagaggcaaatacagttagttggttgcaagaggaacagactggaagcctaattgggttgtggtttgctcttcaatgaaggaaggctcactaccaaatgatccagacaaggaccatgatggaggtctgatgggctgatggaagaaataactaggagaaggtgaatgaagtttcaatgtgtagctgtggggaaaactctttttaaaatattggctagtcttctatgctaaatgcaacatttgggtgttaaaaaaatgaaaaataactgacacaaaaagtgacacacatttctttagttagaaaaagaactttagttttttaattggcctttacccagctgagaaactttgtctaaggcttagcattcaagatactctcaagtcctcaacatcactctcaacttgaccccaatcattatcatattactgtcaattagcctagcttattactggttgctcttcttttcaacctcaccacacccaatttttctctgacctgctttgaaatcatttctgtagttgtattattaacagtatctaaggaatttccattatgttagggaatagtcttccaatatcttcagtggtaagtggctgctgctactgctgctaagtcgcttcagtcgtgtccgactctgtgcgaccccatagatggcagcccaccaggctcccccgtccctgggattctccaggcaagaacactgcttcctgaacaatgactgaggcctgtgtgggcttcccaggtagctcagtggtaaagaatctgccttccaagcaagagacacgggtttgatccctgtgctgggaagatcccctggaggaggaaatggcaacccactccagtattcttgcctgagaaatctcatggacagaggggtccagcaggctacagtccacaaggttgcagaacagtaagacatgacttagtgattaaacaaaaacatgtttaggatcactacttactattacttttttttttaaataaaatgaattactttctgctaaaaaattaattcagaagaattaatccctgattcatagtttcaggcatgagtgatttgagtggaagaagctttatggaggacagaagatccttccttgtactgttagaatgatattaggttggtagccagcctcttttgcctactcataatgccaatattagttttggatcaagaacatcttggcctcatactcaataattatccccctactgcctaagtgctttcccccctaaatctaaggaaagtgctggcttacctatctctctgacatgagaatttaagacaagagaaattttaaggaactaagactttaaaaaatcgcagtggtagttagaaagcaagtagatcaatatttgttgactcaggctttcctatcagatggggtctacaaattcttgtctagaggtcatataacaaagtaatgaaaatttttagaagactgccgtaggaatcttaactactatagtcaaagactatcagggatttttagaaattcaacatcttgaggaataagctgagttaaacaactagctaagtaaaattttaagtaaacgagatacagataagaaaaatgaataatgtacattaggtctactactaaaagacatacacttgtagatgttcataaccaaaaattcagtagtcaactgatgtatgaaaaccagatttagaagagaaaaactgaacaccaatcacgatgcaccagtggtgttaaatagggttttcctggtggctcagcgggaaagagtcctcctgctaatgcaggagatgtaagttccatccctgagttgggaagaattcccgggtgaaggacaaggcaacccactccagtattgttgcctggaaaatcccatggacagaaaagcctggtggactacagtccatggggtcacacataacttagcgactaacaacaacagctacacaacatacattctttcctgttccctaactcctggtccgattatctgagagatgaaagttttcctgcagatgatctcatattactgtgatttggtttagttttgttttcccaaaactgctagagtgtattggttgctcagttgtatccgactctttgtgaccccaagaactgtaactgaccaggctcctctgtccatgtgatcttccaggcaagaatactggagtgggtacctatttccttctctgggcatcttccggacccaaggatcaaacccaggtctcctgcactgcaggtggattctttaccatctgagcctccagtaaagtctgaaactgctgtctatgcccccaaagtaatgctttttggaagaaaatgcctgtctccccatgaacatagcacagatttagtgcttttcctccaatttgctttgacctaggtctcgcagaggaaaactttattcttgaggtgaaaaataacactaatgatgtacatgggccaaagacaattgtgctaaaattattaaagacttactcttatctagatttacccccaaaatgctagtatattacactgaggtatgacaaaaatgcaaaaggcatgttctaaagttccatttaagggaaccgggttagtcagtatttccagagactaatggaacatataaaaatcagacacataaaaagaatcagacactgcttaaaacaataaagtaaatacattaaaaatagaaaatcaagttattttcctattcttcttgaggaaaaatccaaaagaagctaacctcctaaaggataaaatgagaaagttttctaattttttccaggtgtacaggcatatgattttccattaccattttccctttttgcatatgatcatgatagaaaaagacaaatgtggaaaaattttgtagcagaaaataattcattttgttaaaaaaaagaagtaatagtaagtagtgatcctaaacatgtttttgtttagtcactaagtcatgtctaactgttctgcaaccttgtggactgtagcctgctggacccctctgtccatgagatttctcaggcaagaatactggagtgggttgccatttcctcctccagtggatcttcccagcacagggatcaaacccaggtctcctgcttggcaggcagattctttaccactgagccacctgggaagcccgatattgaacacaggcctcagtcactgttcaggaagcaggctcacatgatagatattactcttcaaagggtcttccttgtgatcttgaaagaccaaacaatttggaaattaagatgaaaaagttttatgagaattaatgctgctaaaacaataagaattccatccaaaaaagaacaaaatgggtatttaaaaccaggaaatttggaggttaaatattagtcgctcagccgtctccaactttttgcgactccatggactagcttgccaggctcctctgtccattttgagcctttaaattctaaacctctggttggccgattgtttctttatttagattttaaggtgaatgacctggggctatttgtttccatcaacctgattgcgaatctggaggttgataaatgctgtagtgttggagaagactcttgagagtcccttggactgcagggagatccaaccagtccattctgaaggagatcagccctgggtattctttggaaggaatgatgctaaagctgaaactccagtactttggccacctcatgcgaagagtcgactcattggaaaagactttaatgctgggagggattgggggcaggaagagaaggggacgacagaggatgagatggctggatggtatcactgacttgatggacctgagtttgagtaaattctgggagttggtgatggacagggaggcctggcgtgctgcgattcatggggttgcaaagagttggacatgactgagcgactgaactgaactgaaatgctaaaactgaatatgtacatttcaattaagtcagtttgagggtgcagcctttgcaatcagacttattacttattttatggctgatctcattcaatggatcactttttagtgattttcttaggaacaaaatcttaaaatgggcccaaggtaaacacaccatattatcaaaatttattcatatagataataaactgttagaaaagcccagagcatgtgagagatataggaatattctacttatgaagtaattttcttcttttatttcatctagctggtatacctatttcttccacaaagcataggagatacttgtttgatgaaatgtaatccagtagaaagatgctgatagcaagatggagagcaacagctctactccatgacataattaaaatattcagtattacccatcacagatcaattaacctaaaaaagctgtgagctggaagtgtgggaattcaggctctcagatggaatcttgctggtaactgtgctgtgctaatgtttaaactccatcaaaacaaacaactaattcaagagagactgcaaattccaataggtatgttcatgcaccttttctcgatataacactctcgtctgttttggtccatgatttaattatacagcagatacagggtgcctttggtacatgatgcatttaaaaacttcagctgcatgtaacaaattctggtaaattctcttttcatttttattgaattttctaatttttccttgttatggctacttagatacacccatcatttaaaagttgacatttaatttccaaattcatggtatttttaatgcacctttgatattaatttcccactttgatattaatttctcatttaaatgctttcgtctctgcaatcaccctctgtgttttttgagtcttgtaactttattgagactttcaatggctaagtcaaagattttccttggtaaattgtacttgaaaatatgtgggttattttcaaatctttttatattgacttctaacataattccacagtgataagagaacagactctatgattttaatacctttagaccatgaaatttttgtacttgttttatatccctggatatgttccagtgtctcctagtttacagtctgctgctgccgctgctgctaagtcacttcagttgtgtctgactctgtgcaaccccatagatggcagcccagcaggctcccctgtccctgggcttttccaggcaagaacactggggcgggttgccatttccttctccaatgcatgaaagtgaaaagtgaaaatgaagatgcttagtcatgtctgactcttagcgaccccatggactgcagcctaccaggctcctccatccatgggattgtccaggcaagagtactggagcgggttgccgttgccttctccgagtttgtagtctatgggaacttgaatagaatttgtatcctactgttgtgtgaaaattgtataaatcctaattatgttgaactggttcgtggtgcttttcaggtctactatatcctcctacttttctgtatattcagtctattaatttttgagagtttgatattgaaacatcaactaaaaatcttagtttagctacttgaaataattgtaatgtatagtggaactatatataactttattctgtattttccaagtctcttgtaaatgtgttatattttcataattaaaaaaagagagagagaaaaaaaataaaaaaacagtgctcatcaagaagggcctgcctctaacatctttccacaactctgatagttttgccaatccatatttcagaaggagaatgtaaattatatttatggtggtagaatgaggagaaaggttaggtttttaaagtatttcaaaaacatattctctcctctccttcctggctttctcttgtacaggccctctgggtactagtttcagagtgacaaacgggaaaggcagtcagtaaaggacacattgtctaagcaaaggccttctgatctggtggagagaaaaccaagatgtcctgatcaccacttagagggtgactacacaggaccatccatcaaagctgacttgcagattaaaggcacacgtacttgaactgttcttagcccagtgtaaataccaaattttattctgttttacataattttcaaatttatacgtgttcatggagtttttccacattagacattatgtggaaaagctctattttacataactgatcatagtaggttttccacataagacatttttctagatattagttaataatcacagtgatatataaagtgagactagaagactaatacattcagatgcaaaacaattagccattgcattattctttaactatatttgacttaattgaaaggtacagacaaaatacataattgtagctccaatatttaaggccctaagaatattcagataattaaacccaagtacgttccctacatataggtggatagtggaaggtagctggtgctatagttaaagaaaatgacactgaataaattttctgggtagaattctttgtatttggagattcactctgcttctctctaaagccaacaaatctttctggacaaggatccagctgagatagcagtggccaagaggtcacctgacaccactgtttttatgtctcccaaactaaaaatgggaatattttccaaagtcacattaaaattaaaattgccatcagagaaggacgaaattgaaaggtttgaaatttatgtaaaaagtctaatttggaaaatgaaaaaaaaaaaaaaataagagccttcctatcatgttttggaaacttcccagatgtattagttcattctagatgtctctttggaatgtcataatttccttgtaaaaattaaaaaatatatactgttaatctggaaaacaaaacagtttaaaaagaaactagaatctttttttcttcttagtttgtgtcaggtaccacttttgttatatgtgtggcaacatgaatgcctataaaactgtattcagtttttttcaataactagatacttatagttattcacaaaatctaaactatacaaactgcatttctcttgataagcacagaattggattcaccatctaggagtgcctcaaacagttgtcattttgttctgtcttgattataaatctaggtgacgggtggtggtagaaagatatagagtattattaatatatttttaaggttgtaaatatacttgaacaataagaaataaaatgaatgctactaaaagcaaaattgtacaaattatcatagaagtgaattcttagtaattaaactttacatatctgttttattacctgctaggtataatgcaggggcattcctgtggctagaaggctctttgcttttgaacttcctggcatttaagggggaaaaaaacccaaaagaatacaaaagcaaaaaaaaaaaaaaaattcagtatcccttggaaaaacataaattaagatgccaacgaatgctttaatactttactttcttaatatgtataacaaatttcatgtcacatgtcttcactgaaatgccatttgaaattaattttgaaatgagtctaaaaaaggaatgtttctgagatatgatataaataatatatttatgagatgctaatctacccttttctgcacatatttggggtggtttactgcctgtttattacctatagctactgaactatatatttcaaataacttaatggtttcacttactgaaattaagagatccgatatacccctattcttggttacatgtcattggctgcctaatatcacttaattcattagactgactctccttgacatgacttactgtttgaattttgtggaaatccaggcaaggaggatggaccgttcattccagggagaaggacggggggaggcccgggagtcctgggtaggctgcgggcagactgatgccatggagggagctgctgtccatcatgcttggctgctgtactgctaatcccagcacgtctgaagctttctttatacggtcaagttcttgctgagccatcagctgtctaacggtcgtgggagccaagtaatctttctcccgatcaagctgactcccaacagtctccctcactttggaaatgtgctgtttggagaaaatatgatctctgatggacaagcgggcagagtacttcaccccacagagggtacactctggtttggcgccttccgttccactttgattgatcatgaaaggcttccctatgttaattttaaatttcttttcctttgcccttgcattctggaaccacacctggaccacacgtttgggcagaccaatctcattccctagcatctcacattcttgcatggttggagttcggtagtcactgaagcaagccttgagaaccttgagttggagattgctcatctgggttctgaaacgcttgtgacctggtcggtcgttacttttggatttgaaaggattgctggagccgaatggatttggtgaactggggtcagctatgctagatgtttcactgcggtcggcattgtcatcggggtcatccgtgatataaaagctttggtcgtggtcaccatctttatcactgaaaggtatcgagggacttgtgagcgagaagagaaacttctcatcacagacctctgtggtgggggtggtcgctgtttttggcaaagcgtcgagagttttcccctctttaggagacaaagccggcttcacctctccggaactcccggtggtgctttccatttctgcgtttccctcgtctccggtggtggcgtcactgatcgctgtattaatggacgaagtctcatcaaaatcagttttattttgatcatacccagcctcagcaggaggggcgtttaaattctctacatcctcagaacattccgctttgaaagaagaagggcttaacagattcttcggtgacagttctgccgtcttgctaacaggtgtcgacactgtagaagccaactcattctcactggagagatcgattttcgttaatggcaaagatggataatcaaaataaatgtatttctgcgggctatctccaccatcttcggtggatattaaagggcttggtggcaagctgtaaccagcctgcttgccttcgttccagtgccgggagcgaatgtggctttctaaggctgacttggccttgaacagggctcggcagaaaggacagcgtttatgcgattgtgctggacccacggcccggaactggccctttctttctcgtgctcttgtattctggaaccagacctgcacgacccttttcttcagccccacttctcgcgcgatgtgatcgagcattttccgggtggggttggaatccagtaggtatttttcatagagaatttccagttgctccggagtgatggtggtcctcaggcgcttatcgcggtgttggtcctccccactgttcccgccttccttctcactgcagttctcctccttctcatccagcttcctcttcagggaagcggccacggtggccggggctgtggggtgggaggaagctgtctgtgggggcatctgtgtgagaggaccaccgagcagctgtccggtcatcagggaattgttagggtcgaatatcatgtagggcatgtccatgggccgttccaggaacggggagtgaaggaattggttctgagcagccaggaagtgcatgtgctgatgctcctgccagagttccaaggtagggaaggcaactgtacactgatcacattggtactgaagtaactgtggaggtagactgttctggagagaagtcatggcaatctgcagcggactggaagggacgggggtctgagaagccgagggaggtcgtcccaggagttggggcggtttgggtggctggggctgagcggccgaggccggcggtggcggtggtgggtccgaggaagaagatgctgacggcagggctggtttggtgccttgagggtggggcgaggggtcacccggctttggcttttctgtgggacactcgggctttggagacgtcttttccagttccggtttgggagatgggatcaggggggtgctggtcccagaagcagagcccccagcaggggcaggagcggttttggctgcttcggtctggccaggcactgaacaatgcttatacaccacctgatctgtggcgtccatggagtcttcagtttggctctcatcttgggcgtcatcgtcttcatccttgtaacactgctttttctgatgcgtgatcaagtcgaagatcctggggaaaaccacactgcactttttacactggtattgcatgttgctcgttcggatgtaccgctcatttgtgagttctcttttttcgttgtcttttgtctctgtttgattctcataactcttccgcgccttctgccgagcattctggaaccagacaacaataactcgggtggggagattgagaacggtggaaagttgttcgatttcatcatcttttgggtaagcgttggtgtcaaaaaagtcttgaagaacccgaagctggtagtcagtaaacctggtcctggaagaccttttactgaaggatgtgtctgatttgtagtgttctagggaggagggctgggggtccattctgatatcttccaaaaccgttatgggagggttactgaagttgtagggcgaatccttatttctctgccgctccttaaaaagcgtgtttcgaaaccagtgcttgataaccttctgggagaggccagacttctctgccatttcctggatctgttcttcactcggagaattgttgatgtcgaagtaagccctcaggattttcagttggtcgtctgtaattctcgtcctcgggcgtttgaactgcgagtgcctcaggaagttgggatccaagccaagctgctgctggcagagctgggtgaggtccgctgagagtgtgtccattggaggcagctgcagggcgagctggggcgggagggcgggatgttgcaccgactgcatcatgatggacggaaagaggggaagatccagggatactggcagctggacctgcgggggtgcagaagggggtgggggcgggggaggtggaggagggggcgggggcgggggtgggggtggcgggggagtgggcgctggggcctggagtggggtggagaccgcgctgggcagtttcactggccccagagaaggaggctgcggaggagcgggaggcaagggaggcggtggaggtgggggaggtggcgtttccggagaagatggagaaatgggataaagcttgtcataggcctccctgtactgacgggcaaatttttccagtgctccgtatggaaaaaactggccgtggacatgctcctggtgactctttagaatgagaacattggagaacaacttcccacacgtcccgcattccagcttctccgtgctttcgccttccccactcttgcccttcttctgtaccttctgcctgttctcgttgtactgaatgaccagttcaaaaccaaagttttccagtaaggctttggctgcgtttcctcgggcccctgaagcgatgcggggcggcgggatggatggttccgaggacttcagcttctttccgaggtctttgctttctttgagcccttcgccttcacttacacattcttgctttggcttgtcttgcttctcggccatctcttctgcctccttgtaagagggtacgtccttcacgatggggcagtcggcactggccacggtggtttgctcttgtttcaataacttgctggcctgctgctgctgctgctgttgttgttgctgttgcagctgtggctgcggcttttgagatggcaggtggggctgtgtggcctgatactgttgtgcttgctgctggagaatctggagttgagtttggccaacgtgatgttggctttgtatctgctgcttcaaatcttcaagcagggacccagccattcccgtcatgcccggcatgccaaaggcggcagagcctactggcaagcccagatctggccccaagctgaactccgtcccagggatgtagaagggaaagagaaactgaggctgctgaaactgcagcagagcttctggggtcataggaaaatggggcaaaaaggcagggttgagaaactgaggctgaaagaaggccgcctgctgttgcaattcgtgctgcagctgcatctgaatctgtgctggtgactgcggtgggtgatgtgtaggttgagcagagatcagttctggagtttgctttttatttaattctttggcatctaagtgggtatctttgctgcctactgctgctaaactaatggaatctaacatcccttggctgggactgttaacactggctgccactccatgcccgccaggtgcatgaccaccgctgggctctagcttcgctgccctcgcctttgtctggtggagcacagacctcatgtggatttccaaggtcgagctttggctatacgcaacgttgcagatgctgcacttgtagggtttgttatctgggctgttgttggtttcttgagggacagggctggaggcttcctgcaaaacctttttcaacttgtgcaggtgagatactgagttataatggaccaggagaatgttcttctgggtgaacgactctttacacacggtacacttatatgggcgagatggatcgaggaatttttccatcgtaaaatttggcccttttctaaaaggtaaggtccgctttggttcagagcccatgtcatctggaatagaactactgtcactgcctacaggacttgccttcccttcatggtccacctcatactctctctccatctcctgctctagggcatgctcctcctgggccataggttcactctctgcccatagttccccattcacgggcaaggaggcatacagctgttgaagttcggcttcactcagttcggggtggcctgcttccaagtgtttttttaaagcctggaatgtacggaaactacgctggcacaggttacacatagtggcggcccgaatcgcatgatactgggaatgtatctgaagcttctgcatagtcttaaaagccaagctacagtggttacagcgatacttgtaaacgtggcggtctgagacagagagtggttgccttttctgctgttcacttaactgatcttgcagtgtgtcggagattttcatatccttactgctatttttattccattccgacacttctgtggcttctttagttggtttctgctcctcactctttatttccacactagcctttgaatcatcgagacccgccatacttttgtcatccactggactgtcacctgtgtgaagaaagcataaacagcacttacaggaaggaagtctacagattaaatgccaatgaatattgttatgcaggagcctctgaagggcttccttggtgattcagtcagtaaagaatctgcctgcgaatgcaggagattgagggttcgatctctgggttgggaagaccccctggagaaggaaatggcaacgcattccagtattcatatctagagaatcccatggacaggggatcctggtgagctactgtccatggggtcgcaatgagtcagacacgacttagggactacaccaccaccaccattgtttaggaggaacctccaaagaaatcacctctgacctcaaggaatttcagcatgggaagaaaataagtcagaattagcatgctaccaccagtatgacagcaagggttataagcacagtgttcaagaattagagcccacaaaatattcctggtcagtggtatttaggtcccccctcaatctggtaaagaatttgcctgtcaagaagatcccctggagaagaaaatgaaaacccacttgcctgggaaaccccatggacagaggagcctggtaagccatagtccatggggtcacaaaagagtcagatatgacttagcagctcaacagcaacaataacaacaaagggtcatttacagataaccagatagtaaatatgccttggaaatgacagtttttggaaatgtgtggtttttttttcctttgtgcatctcaaaaacataaaatcttttaccgtaataatgctagatcagcatcatgaatagaaggctcagagtgtgtctggcacagatcctggtcacaggctggcatacctgaatatttcccagccccctcagctgtgatgactgcaggtgtgtcccgctctgacttctcagaggcagctgctggcagtagcaagctgttgggcatcatcacatcagggactggcacctgtgaaaaccaaaggtgttcatgacaaaggtaccccagacatcatggactccatcacactttaccccagacagttgtgtaccccagttatattttctaaccaaagcagggacattctgtgactcttagaggtcaatgctctcctttcaaatttcagatcagtgctgtggcaatgctgtattctttacttttcttttttaaaaaaataagcttgaaggtttctgtagcccagaactgatagccaagcaaagatgaaactcctagtgcccacaggaatcatttgattaacattataggtatattcaaaagcagagacattactttgccaacaaaggtccatctagtcaaggctatggtttctccagtggtcatatatggatgtgagagttggactgtgaggaaggctgagcaccaaagaattgatgcttttgaactgtggtgttggagaagactcttgagagtcccttggactgcaaggagatccaaccagtccattctaaaggagatcagccctgggtgttctttggaaggaatgatgctaaagctgaaactccagtactttggctacctcatgcgaagagttgacttactggaaaagactcagatgctgggagggattgggggcaggaggagaaggggacaacagaggatgagatggctggatggcatcaccaactcaatggacgtgagtctgagtgaactctgggagctggtgatggacagggaggcctggcgtgctacgattcatggggttggaaagagtcggacacgactgagcgactgaactgattgactgactgataggtatgagaataaggctgcaaattttgtgttgttgaatcagctattcttgtatcacatttggggtttattcccaaggcacaggagaaacaaacgggactttacttgtgatttctacaacatggtcaacaagagcttgtcgccacccagaagaaatacatttctgtcacacaataatgacagattttatgttgataccttcacagagattatggcacacatgcatcaccacttggtacccttactgtcataagcagcttctccacacaatccggagacacactgtgcaaatgcgtcagatgaagctggaggtgcatcttgttgctaaggacgtcctggcagaggggacagcagatgaccggctgcactgagtgctgtgacaggacgtgcatctggatacgactttggtccctactattgtagttacaataaggacactgatagaactggaaaatattgaataaacatgactcctattagttaacggatgttgatgcctttggagcatttgaagtcagaccaagagttaatcaccttgccaattacagtgtctacatacatttcaacagcatggaatggtctgggggctctaaaatgatcaaggcaacaattaaatatatatacatgtttacacagcaaagggagaaaaaaacaaaaaacaaaccatgtgtacctgctcgtgacagaatttattgtcctctgtaggctttgatctttttgttgacacatcctcttcttttgccagcagaagtggctgggttccccctgccacactgacttttagctccttttctggtgtgattactcctgattccccaaaagagaatagaacatctcaatcttaaaagactgacaatatcaaaatcagaaaaatgatgtctttcgcatagctctaagtccactgaatcactaaaaggaggggcaagcacttgtaaatgatgctaatctcagaaggcaaaaacacacttctttttgtccactgaccaagtggactttataaatgtattttaaaatgtacttctgtctcgtgtttagataaccctcagtgaccatgaaagattcatcaatgacacatgccctctgctgtctcaatatacctttatcacattaaagcaaatctattcccattcacaaatgctaacttagaaaataattacttttggaactgtttcattaccttttttttttttctaaaattctgggacactaaaaacacttcaaaattctgagaagggctgaccagttataattcacaaatgaaaccaatgcttttatgtggtaaatataggattttaaaattatacattatgtattcaccactgcttttttgtgatttatccttggctttagatgtttcagcagttggctgtgcatatgacattgtagtccaaatcaagaagacagttgttttatgaggttaatcagaatattcggtgttaaagatggtttaaaattttgccaagatgagcagtgtaatgtatagaagcctcacacacatcaaaagatagagtgtgattctaatttcccaatctaacagaaaattctttccagcatcaattttcccgataatctcctctgtgaggctggatattacagcgacattgggtaggcatgtcacatacatctcacgacaaacacaaaacctcatttaccagccattccaatctcatcatagcacggcatcatctgaccttttttctgctgtttattatgagtatttctaattttaactttcaattttcaccatcttccagtcaatttgcaactaaattatttccagggtgaggacactatcactggacaactgggtgcaaatacatcttgaaatgcaatgaagctaaaccattgattgctatcagaccccgcgtaaatatagagtctaggcgtaatctgattgtatgctgtgcatgaagatttatcttgattttttttttacccaatccacatacggttcatataaatgaacaaattacactttattgcaaaataacccagttttaatttaaaaataaggtcatggatgttatgaaaacaacataaaaatgaaccccaaaatagattctttttctctcctggatggagatgcatgttttataccatataaataattttaggaattttgaattctgaaagaaatttgaaagtaagtctgactctaaggagaccaaaattaaaatagaatttaaatgacataatgacaataatgttattccattgaggtctgtgaaaggtatagaattagtgctacaatttcatacaaattgcactgagacttatttctactgatagatatacaaacactagattttatttgaattggtacatttgtcttatatatacagatatattagagaaacttagattctttctagatatttgaaaatataatttactatagttacatttgaatgatttaaatcagagataaactaaagaattttatcacactgattaaacaatatccaagtatttaatatccaaagatatctcaaaaccaagaatgtttattttataattaatccaggtatcaaaatgtttttcttctaaaaggaaaattctcaaagcagaatgtattttgtgctattgttttaaaagtattaaaaacaaatacaagaaaacaatgtcatatataaggttggcaaataaaactgactgcttaaggtgatagatcaagttgtataaaatgattgtcatttaaatcagtgagtgtctatcagttgcttttttcctgtgagactggaaaatttttgttttaaaattccctaataatgagggagaatatgcttccttaagagaataatactatgtcatattcccttatcattcttttgtgtacatggtagaatctgacatgatcagtaataggttggtccaattccatatgctatcaaagactgtcacacagaaggtaaaagagaatttccataattcttgttgcttgcaggctttaggaatatcagaaagaataaactttctggaaacttctaaatctattaaatgtatagctatggattacagcttatttttataagcatatatcttctaatgttagtactataaaggatcaaaaaactgatttcaaggcttaaaacattttactaagactgtacattggtataagtatttgatataattaatccatattattttaatgtatattcatattatcaagaatataattgcttttgaatttagggacatttgtgctgcctcaagaaaagagttaagttttatggtcactatttcataaccactgtggtaactgctggatatagtattctaccctatatatatgtcagcttcaatattttttggctaattaagttaattaaaccatgatcttaatgtaagctaggggctccctaaagaccattttattttaaattgagaagaagttataaaatctagaccctcaaactctagctaggcacctcagaaatacatgctactgataagcagcagcagcagagaatgttaagatgcaagagtgtatgacaaaaacagactcttgaagctaaaataggtcatcatgattatttgcaaaaatgagggaccttatattttatgcatgtatgccttttctacaaaaaggggtaccaccttaggtatttactgcctccctggtgaattataggaaatcaaatctggagtctttctctgaattgttttattctagaaatatattaaataaatgctaattacttttaggaaggttttaagttttctgactactcatagtttatgtcttcaactttacttgaaatgaacactgttttgttaccaaaattttgaaatgagatcataattcattttgtgttattaaggccatcacagtatcttcaaaaaacaatgtcattttaatgtacttttaactaaaaaaaaagaagtctaatttcaaataaatactgccaaatagatgagtcgatgattatctgtcagttatggggttatttaatttgcatgagattgctaatataaaaatgacataattcatttcaattcagatgccgcctacttaataaattttcaatccctaaaatacagaaggttgtaaaatggtttatgttcataacaactaaggaaaatccaataacatatgtattcaaagctaatcttaaaaaaaaaaaaacacagcaaaatcctgggttattacttatgaatcaatgtatttataaagtttgaatactgtaaaacttggatataacactagatgttattcaactccaaataagcctaaattataatgactggtacagtattctttctaatgagactagaatgaaaggataattttaattgcagtaatgaaggttaatttccatctttcctcatgtttactcccttattaaaaagcggtccccttagccatggcagagacatattacattttcaatgcaaatgtattaatctggataaactctatattaattcttgtagtgcacagagctataatttggattataattaatctaaagtggcactagatttaaatgacaatataaatgaggcattaggaggcttttctattatgaatgaatattcaacaaatataacttgcatattgccaagtctcattttgaaagctcccatcctagagattaatgtcagcaacaaagtacaacagcttatacaaacaccttcttcctaacatgtgttaattccttcctgtctaaaaaattctgtgttaaagtgaggtcacactgttttccaatctagcacattcagatagtgattaatgtataaatttgccaggatttttgacatttataattgacatcaggaagaaaaccaatatacacataagtggataatcattagaaatacttacaagaaaaaaaaatccatgtaataattttttcacctgatcagattcaaagtagaaagcagaaaacttttgttaaaagttcaggtgagagtgggcacccctgtcttgttcctgattttagaggaaatgctttgtgtttttcaccattgagaataatgtttgttgtgggtttctcatatatgtatgcctatggctgattcatgttgatcgatggcagaaaccaacacaacattgtaaagcagttatcctccaattaaaaataataaataaaaaaaaatgtaccaagggggttaaaaatgttcatgtgaattgtcaatagtaagaactgtcaatgtttgggacatttcaaagctaaacattcgcatttcagtaattcctttgagttgtgtaaagtacatttttatccctatagatgtagttggagaggcatttctatagggctaaaaatgtgtcttagaaaactatcattatctaatggtctgtatcttctcacatgcctgagtcctgatgagatggtacaatgagatgtccaagaaagcataataactcatcaggccattagggagtgactgagaccattatttatatagaccagtaaaccaagctgatggagatagagcccttgtatctgtggtatgttccaagcaagactccttactcattgatgagattggagccattttcaagagattcccacaactcattctttacaaggtattagttactgaaaaccaagcacaatgtcacattcctaagcattacatgaatactcaacaaacaccaatgggctgtgtgtttgacacattcttctgaatgtgttgggttagggggtggaacataccctgcagtctcttttggtgaaactgtgagaaaatcattactgaaggcagggagaatcatggccttcctgaagtagtcaagcagctagctttcatgagatcctcctagacctaagctgactcccttgctatttccaattcttttcaaatgaagtttagatggcactgcccttgaccttatctgatcacaaggtatttcaaataccttgtcagtaaccccaggagctgtattattatacagctaggggattttttttttttttggtacattctttaggctcaaaaccaaccttaggtcctctttgttaaaatcaaattagaatcatatgctagccactatatgctagatgcaaatttaaatggtaccttttcactggattctggagaaaaattcagcatggaagggtatggggtgggtagcagagaggctcttcaaataatttgcaaagggaatggcaaatttagatttgcaaagactgaattacaaatgcaggataattcagatttaaataaacttgcacgtgaaaatggtatttttttgcacaactcaatgtcttcatagcaaagcaagcttctttagatgcggctgtcactggaattccaggaaaagatagatgactacctgaaactaataggtttgaacccgtttcagcacttcttctgcttcaatgagtccaacataataaaactaggtatagcgtgcagcaaaagtagccaatgtaatattcattgcaaccatagatttccatctcatacatacaaagcatggatgaagtcatatatttgccaaatcaaacacagaaaaagccttaggtatccacaccagatgctggcctagggtttgtttgtgcacaagtaaatgtcatgacacgaaggtttgttttcaaagacagtagctttcattactgggatttgtctattctagaagatcaaaattacccagcacctaatcccttctcaatgatatttcctcttcttaggctgaatcatctgtaaactttttcactggattttgtttgaaatgcctcaaatagatgcccttaaaaagggcaaattcctgagtgtaagttgtaaaaaaaaaaaaaaaaaacagaaagcaaggaaaaataacatttatttttagggttacgtggtttagggagggaggggggtgcatatgattgaatgaaaaaattcaagtgatatctaatcccatgcttatgaaaaattaatatgccatcagaggaatcacaagtatagctaagattaatgaaaggcgcttaaaaaattacaagcacacaaactgatttgattaaaaaataatctcgctggtcgtcctgcaatattcttcaacttatccacatctattctgtcagatggttatgattaaaaataggtcaatgggaggctactgatagaaatcacatgcaaaatgcacatgcagtgagtagtagtgggaacgttcagacagtttaaaatgaataaaggcttttaataagctgggggtgggtcagcaaaggaagggttgatcgctgggatgggtcggggagggaaaggtgaaagattctagcatcttaccagagtctttattagagtttttgccttcactattgtctctctcacttgtgtctttctcatcctcgtcagccccggctataggtttaatggctccttctgtctcctcactctgttcttctgctaagaaacacacaccagtcagtaggatggaaaaccccagaaacacacacccgaaaataaacgacgtgactatttaaaaactttgttacttaggaatcatttgcagacattccttctcaaaaaagaacatgaatttattcaaaagtcactattagaacctgctggctctacaatgcagggtttgttttttatctcaagccacttcttttatttccactgagaaaatgtgcccgtactaaattaaaagaagtcttctcaaagaaatgcgatttgagctagaaaagatttaaaaatgaatgcgaggcgattttgtaatttcaatagtagagccttcgaaactacatgaacccgcttctccacggacttggataaacggcagaatgaagcaaattctcagaaaaatgtcttcataatataatgtgataatgatgggttaaatataagacaggtgttactctcaactttcagtccttagacctcagaggaatcctttggaatttgtcagagtaagatcacaaaacttcagttatcctgggatttttttttttttttttctatagggggagctctacggagtgtaggacagaagaaggtatacttcttctatgacaaccacatcaccccacacctcattcacgggtttcacaccagctagattacatggaaatcctcatagtaactcaaccctatttaattattctgtaaatcttagctacgccgctgctggtggattaatctgtttatgcagttagcctctatgctgggtcggtgtagcactaatccgtgaaaggcccactgttctctttcatcctgcgatcatttgtctctcactgtgctgatgtcacattttaatgaatttttagcaatctgagtaatgccagataaccagacttgcaactccccacagcatggcgtgctgttttcattgcggcacaaaaaataaaaatcctattcccctgttcaggtaggaattacataaattaggagaagaaggtaaaatgggatttgaagcaccaggctcctcaatttcataaaatctttaatgaccatataaattaaccctggaaaggcaaaaggtcattgacatccatttgcatacactcttctatttgcttttgataagcagagcttttatgcagagaacatgatacaattaacccttcaagaaccatacaaaacgcgactctggacattttaagtgtcaagcattaactgaaaattacacactgcataaaattttcattgcaaatgctatagtgattgaaaggggaaatcgtggccctctccacaccccatgtttttttaataatgttctgacagcagaatgaaatatccactgtcatatgtagcagctgagcaccaaaaagaaaaaaaaattgctatttagtgtttcacttgccagccatgctctgccactatgagaccagaagacaacaggatgggggttggttctgggctcagtggcagaagctccaaagaaagactccaagtttaataacaaggatttttaaaacatgtgaaatcagagtttttttcaaccggaagtcctcaaaggcaccatgcaaatctactgatacacttcggtgttgcgccaaaatgcaggggtggtcttcagggagaggtcagtcattggagggttcgggggtaacttccctttcaggcaaatacacatgaaaattgtacttgaagatgaatcgacccttctcctggccctagcctgctttcacccttcagtgataagaggtgaccaaacccaggcctcctccttccagcagggggccaggctgggtggggaccgtggcctggctccgttagggaggctgaaatcataactggattaggtggtgttcgcccctctcccctcccaagtccacacacgtgactcgactatccagtgtcaggcctgcgacctatgcgacagcccgtggcaattccttctcaaactcgtcccagggaaggagtgcgagactactgggagcagatttactagacctttcccccccaggctggaaaacgaagcatcagagtgctactgagcgtccttatcttgaggggacataaaatggaaagggctagcgccactcctgttcataaaacattgcgcgtcaggagaagaaaacgaaaattatgaaggtacgaaaagagaaactccagtacggtctgcgtctcatcagacggtttctgcaggatcctctggtatgtgtcttaagtgtgagagaaattcccagacaagttcttctatacatcacggtggtgtctgaccccagcctgaccctggcaacagtttgagaaatctgaatgtgaacaaaggctctgtgtcagcagcagggaaagattgtgggatagacgctccccatcaacttaatcgcaaacagcagttctgaggccataactttgctcagctcctccaagccacagctcataacctccagggtggatttgcccgcactccctcggcttctgtgacttcgggcccccctccgccttttctggttcttcctttgaagtaggcaggcaattagctctaatgctccagcaattcagacctgttttgtggtttccaaggcgaaagctgtttattacaggtagggctctttggagccatagaacttggcgaatttttaatcaggcaaaaaagaatcaaagagtaacttttgtacgccataaagtttcctccaagtcaggagaaaaaggtcactttcgtttttcaggagagttttcgaaataaatttgacattcgttttataaataggctttacaggcaagagtattagggtggagaaaccactttcccctagaaaaccttgtaggttggatttggggtgaagggcaagagttggctacattctcattttcaagtaccacatttcctcaactgtaaaatgctgtaaaatgtaagatgcttacattttatgaaaaaaggaagagaattttatgaaaaaaggaaaaagtatacagcatgaaatatattaaagcaatgtcttagaactgaggaaaattacagaaaattacaaaataaagatgctaaagcagttttcattttcatcaataaatttcttcaatatattatatgtaataataataaaagtatagcatttcataaaagttatattcacactgtgtatatttcaattattttgcctcatggaaaacagagtattcatatgttaaattttatgatataattcaaatgtgcattaggtccaatagaacttcctgattttcaaataaatgataaaacatttcaaaataagaagaagacaaaataatattatagtcttataacagtacaattaaattccccttgcattgttatagggcttccctggtagctcagctggtaaagaatctgcctgcaatgcaggagaccccaaatctgcttcatgctatctctatgatctaaacaccagtcagttttgttcctactgctttattatacaattgggtttgggaatcctctgagtcttctaaggaaaccaccatatactttttaaacccatggtgtggtgttggagaagactcctgagagtcccttggactacaaggagatccaaccagtccatcctaaaggagatcagccctgggtgttctttggaaggaatgatgctaaagctgaaactccagtactttggccacctcatgagaagagttgactcattggaaaagactcagatgctgggagggattgggggcaggaggaaaaggggatgacagaggatgcgatggctggatggcatcaccgactcgatggacatgagtttgagtgaactccgggagttggtgatggacagggaggcctggcgtgctgcaaatcatggggtcgcaaagagttggacacgactgagcgactgagctgaactgaactgaaacaggaagcgaaggatagcaactgaaacatctttagtttttcacatggagcatcaattctagacacttggcttacaagaattccttcttgtgcccctttttttgtctccctgttcggctctactccctcaaaatctatcctttgtatgacctacttaaatctgacttctctatgcaacatctttcagtgactgccattacataaagaaaaagctcaatcttctgaacagggcaagaatagctagtctctgtctatcactccagtctcatctttcttcacttcctacctggcacttaacttgagaaaagtctcaaatttcagggcaccagagtcacctggaagactggttaaaccacagatcgctgggctctagccctacaaattctaactctggtagtgtagagtaaggtctgagaatttacatctccaagttccagatgatgttaatgctcttggtccaagatcacatgtcatgaacacacaatagtctttgatgcctacctcctttctataagaaacactgttctgtttcttgtcttttctagaatgacttttcttcactgtatttaactcccatcttttctttatgtttagcttggtaaatataatttttatcatatataaaaatggagctaatgctacttacttcatagatttgttataatgtataaaaattagcacagagcttaacccaaaataagtatttaaaatgctagctatattattactcttaatagcttctttttatattagagagaaagtgaaagcgaagtcgctcagtcctgtccaattctttatgaccccatggactgtagcccaccaggctcctccatccatggaattttccaggctagagtactggagtgggtcgccattttcttctccaggggatcttccttacccagggattgagctcaggtctcctgcattgcaggcagatgctttaccttctgaccaccaatttagttatttttaattgactgatgattgctttacaatagtggtttgatttctgtcatgcgtcaacataaattaaccataggtctacatatgtcccccctctcttttaattgcttctttctccaaaaagtcttccctgaatgctgaactaagattagtgtttctggataagtttttttttttttcttgtgcattggtgtaaaacaacttaagttagcacgtggaaatcagtattacctacttcccctaataggtacacatttactgaaaacagtgattgtcttatttgtcagtgttccagaagaaccaaccccagggctggaattatagaaggcaggcagaacttgttacctggaacagtgagttccatttaggaagcaaaactggtaaaagaaaaagacgagtctagactctattgccttcctctattcacgttcaattaaacctaaaagaagcatttgtttggttttagtctggtttgggtggttttgtttcggtttagattttttctgtctactcaatcatgttcattattcaaccatcatcgctggcctgactccacatctatggctcttctcaaagcccctgatgacttccatgctgtgaaatccaatggccactttgcatcttacttgactttgctctgaagatgttagttactactcctttctccttgaaaaactcccttttttgaatttcattgcatcagactattgtgatgccgtacccctctgaaagttcttccttattcccctttgctggggactcctccattaaaaatctaaatattgaaatgtctccagcattggtcctaagtcctattctcttatccacaaagaatgtttgatttgaggaatcttgagaaatctgtatgtaggtcaggaagcaacagttagaactggacatggaacaacagactggtttcaaataggaaaaggagtatgtcaagggctgtatattgtcaccttccttatttaacttctatgcagagtacatcatgagaaatgctggactggaataaacacaagctggaatcaagattgccaggagaaatatcaataacctcagatatgcagatgacaccacccttatggcagaaagtgaagaggaactaaaaagcttcttgatgaaagtgaaaaaggagagtgaaaaagttggcttaaagctcaacattcagaaaacgaagatcatggcatctggtcccatcacttcatggcaaatagatggggaaacagtgcaaacagtgtcagactttattttttgggctccagaatcactgcagatggtgactgcagccatgaaattaaaagacgctgactccttggaagaaaagttatgaccaccctagatagtatattcaaaagcagagacattactttgccaacaaaggtccatctagtcaaggctatggtttttccctgtggccatgtatggatgtgagagttggactgtgaagaaggctgagcgccgaagaattgatgcttttgaactgtggtgttggagaagactcttgagagtcccttggattgcaaggagatccaaccagtccattctgaaggagatcagtcctgggatttctttggaaggaatgatgctaaagctgaaactccagtactttggccacctcatgcgaacagttgactcattggaaaagactctgatgctgggagggattaggggcaggaggtgaaggggacgacagaggatgagatggctggatggcatcactgactcgatggacgtgagtctgagtgaactccgggagttggtgatggacagggaggcctggcatgctgcgattcatggggtcggaaagagtcggacatgactgagcgactgaactgactgaactgaacgatatccctagataacttcatccaggtccactggtttaaattttgcacctccatttggatgtctgaaaggcatatcaaacttaatatgtcaaatcagagctcttgatcacccttcaacgcactctgtttgtccccagtctctaccatctcagtgaatggtaccaccattcaccaaaagcaaggctcatcagtgacttctttctccttcttatgtgcacaccaatctatcagcaggtcttattaattccaattccaggatatcttatacacagtaaatctatgtatttcttttcattttcattaccagtactgttaactgcttacctgtagcttgcaatggtctcattactgggaaagacttgctcttgcttccccacaatttattcagcacaccttaataaaatcaagccattctactgtttgagccctgccatggcttcctattttgtttaaaataacataggaactctccactgtggttatactgatcaggcctctgtctacctctatgacttcacctgacattgctctcctcttcactcttctctctccacactacccttctttctcttcacagtatatgaccgacctcttccctctgtctgtaatgtctttcccctaatttactccttattattttgtactcaacttacctgtcatttccttagagaacttctctgaccactgtttctaatatagcacctcaccagtcacataggtgggggcctcagactttactgggaatcactgtcacctggagggcatgttaaaccctagactgccgggccccatctttagtgcttctgatacagtaagtctgggatagggcctaagaatctgcattctttccagttcccatattgtgctgatgctgtctgtaaggggtccacactttgaaaacctctgctctacttccttcatcatatttgttgaaatctgaaaacaactaattatttgtatagaaataacatctaaaagggcttcccaggtggccctagtgataaagaactcgtctgccaatgcaggagacataagagacttgggttccatctctaggttgggaagatcccctggagaagggaatggcaacccactccagtattcttgcctagagaatcttgacagaggagcctagagggctacaagtccataaggttgcaaagagtcagacacggctgaagtgatttggcacatacacacgaaacatctaaaaatgagagaactaatcagccttattcaaaacttatactcaacagttcctggcaattttgagtaaattgatgattctgagttttcttacttggggtaatgaggactatggtatgatatattcaattaagatcaaagagaagaagaaatggtttgcagaggagagctcaatttggaatttgttatatttgatttctttgtagaacatctccatgaaactatccagaaggcatgggagtatctaaatataaagcttctcagaaaggttgaagatataaattttgatgtctttgtttataaaaccaatatattgacaggtagtaatctctttttagtttgatatgtttctcatagttttgatttttgacctattattttcaacctagtcattaatgcaatttttttttttttggcttgaagtgaggaagataaactgagtttatgctaatttattttaaatatattctttggttttctatggaaaagtaacataagatgaaaaataaataatgatttataaatttaaaaaaagtattcatgagataggcattcagttcagttcagtcgctcagtcatgtccgactctttgtgaccccatgaattacagcacaccaggcctccgtatccatcaccaactcccggagttcacccaaactcatgtgcatcgagttcatgatgccatctagccatctcatcctctgttgtccccttctcctcctgccctcaatccctcccagcatcagggtcttttctaatgagtcaactctttgcatgagatagggataggtgaaggtaaactttacttttaaaaatttttaaagagggaagtcctgactttatattggagggatagtttcacttgaaattttaaaacatatttcaaaaccccattataaatgtgagggactttttattatcattttttgttctgtattgacattattattccagttgtgtaaatctggaaactggggtcattttatagcagaaataaatgaggtgtattatagcaacatggatgaaattcctcttaaactatgtaaatataatgcagctaaaaaggcatagcctccattttttaacacacacttaagcatgcaaatcataggagccagtgattgtgttgacacagttgtaaaaatccaatcaactcattaccaaaactaacttccagcatccaggttgtttgacttggaggagaaacaatacccagcttactgattttcatgttgtataaaaccacccatttagtaaaaaatttcactgtgtataaatgtagatgtgagaaattatccagcagaagttatttgttctctgaaaatttcctttacatatgcatccaaatttgactatatttaattttttattatatatttattatatataatatcattgatatactctatataggatttaaattttttgtgtgatttgatcagttctagctagggcagttccagagagtttatttcatagattatgagagtaacaaacgtaactcatttaagacagacaataataagacaaattacctgaggttgctctcaactgctgctctgtaagatcatcctcacaggtcctggctcccaaagaggcagtttctgcagaggacatcagaatgaaaggtagtcagcacaccatggtcagctctgcagtgtcagtcaataccacagaacccaaaatttgactttcaaagagataagcaccaggtagaattcgctggcacaccttacaccctagtggctggccaaatgagtcgaaagaacagtaagcctagatctcattctcatgatcagccacacacaatcaatcatagagaataaaatatggaaacaggaaaggctcattcagatttttcacatttggttatttggccaagcctacatgttataatgacaatggtacattgcataaaactgggagcatagttttatttctctatcaaaaaaatgaaagaaagaaaacccctcaatatacaattccctgttacctcatatcggaaagaatctgcctgcaatgcaggagatctgggttcaatccctgagtctggacaatcccctggaaaagggcatgggaacccactccagtattcttgcctaaggaattccatggtcagaggggcttggccgggtacagtccatggggttgcaaagagttggacacaattgagcaactaatacaatataggagagatgatgtgagagaccaaaacagaaaacaagtacttgaagaaaactgaagaataagttcaagtcatcaataaatccacatctttattctgatctatttgagccccagagcagaagtgttggctggctaaattcatgcccaaatcctaagttccatctaactctgctctttgagttccctgttgtaggaaaatctatgataagcaagacttcaggaatcaccttcaacaccttattttttctctacatcagttcaacacttgctatttatttcattttacaatgtacctttcatgtctgtttctctatttctctgtcattgtatctttcctgatcatttcaatagcctccacaacaatttccctgcctggaattccatgtctttccagtctaatctcttataatatctcaagaactatctttcaagaaaacagaattgcttgagtaaaaatcagagttctagaactttccaggtaagggaaccctcaagtatattacttaacctctctaagccctgatttcctcatttgtaaaatgcagaaataattacataaataatcagcaactgtaagagaaaataacacaaataaaggtaaaatgtgatatggacttcaaagtaaaaaaagctcgtatattatggagaggataaaaaagttgttatacaattcttacactgcaaaagagactcaagtttatctaatatttctaggcaatagcatctgtggttgattctgaaggttttaattaaacaaataattaaccttgaaaatagaagtgcacaccaaagcactattattacgttcactaattgtttctcctgctacatacaagatctttggcctttgttggtaaactgtttaaaaacaatacaatcataataaatacacagtacccattcccaacaataataccaacaacaacaacaaaaaaaaacaattctcttgtaatatcttaagttagtcttgagaaaaaagaattgaggaataacttccaaatagatcatagcattgatgtctaatcaatagatcactcaagaagcccactttttcctcctggcaacttcttgcttcgttataccttgattcaatattgttcattttattttttgaatgtttttttgttcttctgttgaactctcattcatccctcaaaacccaaaacaagggtcacttcctctttgcttgcataacaattagcttttatacgtctcagcacttctgatgcattgcaataatacgtgatctatgtctgtttactcaataaattgtgagttccttaagaaatttcattttaacatattcttgatcaaggagagagtgaagactatcaaagtcaccttgttgttcagtcgctaagtcatgtctgactctctgtgacctcatggactgcagcaagccaggctgccctgtccttcactatatcccagagtttgctcaaactcacctccattgagtcagtgatgccatccaaccatctcatcctctgttgccccttctcctcctgcccccaatgtttcccagctttagggtcttttccaatgagttgactctttgcatcacctaggacacctttattcaaaatattacattacaccctatatcctgaaacagatgaatctcaagatgagaattttatgaaagcctcccaggagccttaggactctataaattcaaagctttctcaaatataccaaaaacaagtaagtcctcttatatatacatatggagaaggaaatggcaacccactcaaatattcctgcctgggaaatcccatgcataggggagcctggcaggctatagtccttggggtcccaaagagtcggacacaactgggtaactaaaccatcaccaccatatatacatataaatattgtgctgaaaataatttctttgcctcttttctagggaaaaacaatcctattttatcaaataatcttaccattgcacacacatacacacttcagtgtatcaaacagatttgttcaaatagacatcagtagtgactgaacaacaataaacagtatctaagtaaatttgatcaaaggattgctacttttcaaagatttatgataataaaaagaacataataacaaacttattaagtttccatctctgccaggtactgtggcaaactatttgtgtaaaagcagttatgtaaccttcatgtaagctagtgaaggtgatggaatttcagttgagctacttcaaatcctcaaagatgatgctgtgaaagtgctgcactcaatatgccagtaatttggaaaactcagaagtggccacaggactggaaaaggtcagttttcattccaatccccaagaaaggcaatgccaaagaatgctcaaactaccacacaattgcactcatctcacacgctagcaaagtaatccttaaaattctctaagccaggcttcaacagtacgtgaccatgagcttccagatgttcaacctggatttagaaaagacagaggaaccagagatcaaattgccaacatctactggatcatcaaaaaagcaaacgagttccagaaaaacatctatttctgttttattgactatgccaaagcctttgactgtgtggatcacaataaactgtggaaaattctgacagagatgggaataccagaccacctgcctcttgagaaatctgtatgcaggtcaggaagcaacagttagaactggacatggaacaacagactggttccaaattggaaagggagtacgtcaagactgtatattgtcaccctgcttatttaacttctatgcagagtacatcatgagaaatgctgggctggatggagcacaagctggaatcaagattgccagaagaaatatcaataacctcagatatgcagatgataccacccttatggcagaaagtgaagaactaaagagcctctttgttcttgatgaaagtgaaagaggagagtgaaaaagttggcttaaaactcaacattcagaaaactaagatcatggcatctggtcccatcacttcatagcaaaaggatggagaaacagtggaaacagtgtcagactatttttttgggctccaaaatcactgcagatggtgactgcagccatgaaattaaaagatgcttactccttgggagaaaagttatgaccaacctagacaacatattaaaaagcagagatgttattttgtcaacaaaagtccatctagtccaggctatggtttttccagtagtcatatatggatgtgtgagttggactataaagaaagctgagcactgaagaattgatgcttttgaactgtggtgttggagaagactcttgagagtcccttggactgcaaggagatccaaccagtcaatcctaaaggaaatcattcctgaatattcattgaaaggactgatgttgaagctgaaactccaatactttggccttgtgatgtgaagagccaactcatttgaaaagaccctgatgctaggaaatattgaaggtgggaggagaagggggcgacagaggatgagatggttggatggcatcactgactcaatggacatgagtttgaataaactccaggagttggtgatgggcaggcaggcctggtgtgttgcagtccatggggttcacagagagttggacacgactgagtgactgaactgaagtgaaccttcacaagaaaatcaagaggcaatgattaatctttattttacaaatcatgagtctagaggctcaaagaggttaaggtcacttgctccaggtccccaagttcaaaactgacagagcttgaaataaaacccaggtctgcctggtaaaaatgtctgtgaaattttggatatgtccactaccacagtatttaggagtctgtaaaggttttcctatcttcatgaaatctagcaaactaagagtatgaggatctgggggagttgaagggaggaggtaggtaagaaagaaattttcactagtcctatgaaaacgctgatatttcataaaatattacattccttgaatataaactgtaaccaaacactttgctgccacatagaaatcttttcatttgatagtgatttaaggaaatatgcgtgtgtgtgtttagctgctgttgcgtctgactctttgctgcccctgggattgcagcccatcatactcctctgtccatgggatcttccaggcaaggatactggaatagttgccatttcctcctccaggagatcttcctgatccagggattgaactcatctcctgcactggcaggtggattctttatatcattgagccacctgggaagcctttatagaaagtataaaatgtcaaaaccaaaatctgttatttaatctcacaattatggagactgttctgaagagaatggcttgtctaaataattttataaggtaatacaacgatggctacccactccagtattcttggggcttccctggtggctcagatggtaaagatctgcctgtaatgtgggagtctcgggtttgatccctgggttgggaagatctcctggagaagggaatagctagccactccagtattcttgtctggagaatcccatggacagaggagcctagagggctacagtcccatagggtcacaaagagttggacacgaccgttcaagtaacacttttcacttctttcacagtgcagtatgccatataattctttttatatcctcaacagtgctgccttctttatacaaatgatataaatattttaataaaggagcttttaacttatcaagtgaactgattaatctatacttttctgcctgtgtaaaatgacatgtttaaagcttagtaatgatacatagcatctttcaatatttcactttaataattgctctgtaataacaaatctgactgctgttaacacgatctgtctcttttcctggctatttaattagattactaattggtgttcttcagcacctgacctttcttacttaatactatttaagaataataccactgacaattcatctagtattttactctattctgtccatttggtgatgatcacatatttgaaaatgggatcaaattatttttattaacacaaggtaggagtaattactgcattttctgaggaatagtatattgattatagtatgaacagtcagattgtatagttattacaaccaccatcactaccactagcattttacagtatctgaggctgactgacgcccattatatgtgttaggatgccccaagcaaatggtggagctatgatttgaatccatacagttttattcaggaatctgaaactcctactttagcctcctgctgcgaagagctgactcattgggaaagaccctgatgctgggacaaagattgaaggcaagatgagaagagggcagcagaggatgagatggttagatagcatcactgactcaatgtctatgaatctgagcaaactctaggagatagccaaggacagggaagcctagcagctataacctgtggggtcacgatgagttggaccagtaaacaacaacaaaagctctcttaaccaaaatgacatcagttcagttcagttgctcaggcatgtccaagtcttgcaaccccatggactgcagcacaccaggatttcctgttcatcaccaactctgagagccttttccaagctcatgtccatcaagttggtgatgccatccaaccatctcatcctctgtcgtccccttttcctcctgccttcaatatttcccagcaccagggtcttttccaatgagtcagttgttcacatcaggtggccaaagtattggagcttcagcttcagcatcagtctttccaatgaatattcaggactgatttcctttaggattgactggttggatctccttggagtctaagggactctaagagtcttctccaacaccacagttcaaaagcatcaattcttcggtgttcagctttctttatagtccaaatctcacatccatacctgatgactggaaaaaccatagctttgactagacggacctttttggtaaagtaatgtctctgctttttaatatgctgcctaggttggtcatagcttttcttccaaagagcaagcatcttttaattttatggctacagtcaccatctacagtgattttggacccccccaaaataaagactgtcactgtttccattctctacccatctatttaccacaaaatgatgggactgggtgtgatgatcttagttttctgaatgttgagttttaagccaactttttcactctcctctttcactttcattaagagtctctttagttcctcttcgctttctgccataagggtggtatcatctgcatatctgaggttattgctatttctcccagcaatcttgattccagcttgtgcttcatccagcccagcatttcacacgatgtactatgcatgtaagttaaataagcagggtgacaatatacagccttgacgtactcctttcccaatttgaaaccagtctgttgttacatgtccagttctaattgttgtttcttgacctgcacacacatttcttaggagggaggtaacatggtctggtattcccgtctctttagaagtttctagtttgttgtgatcccacattgccaaagtctttggcgtagtcaataaagcaaaagtagatatttttctggaactctattgctttttcaatgatgcagtgtatgttggaaatttgatctctggttcctctgccttttctaaaaccagcttgaacatctggaagttcatggttcacgtgctgttgaaatctggcttggagaatcttgagtattactttgctagcatgtgagatgagtgcagttgtgtggtagtttgaacattttttggttgccttatttaggattggaatgaaaacagaccttttccagtcctgtggccactgctgagttgtccaaatttgctggcatattgagtgcagcactttcacagcatcatcattcaggatttgaaatagctcaactggaattccatcacctccactagctttgttcatactgatcctttctaaggcccacttgacttcacattccaggatgtctggctctaggtgagtgatcacaccatcatgattatcttggtcgtgaagatcttttttgtacagttcttctgtgtattcttgccacctcttcttaatatcttctgcttctgttaggtccagaccatttctgtcctttattgtgcctatctttgcatgaaatgttcccttggtatctctaattttcttgaagaaatctctagtctttcccattctattgttttcctctatttctttgcattgatcactgaggaaggctttcttatctctccttgctattctttggaactctgcattcaaatgggtatgtctttccttttctcctttgactttagcttctctttttttctgagccatttgtaaggcctcctcagacaaccatttttcctatttgcatttcttttccttggggctggtcttgatcactgcctcctgtacaatgtcacgaacctctgtccatagttcttcagccagtctatcagatctaatcccttgaatctatttgtcacttccactgtataatcataagggatttgatttaggtcatacctgacaaaggatgagatggctggatggcatcaccgacttgatggacatgagtttgactgaactccgggagttggtgatggacagggaggcctggcgtgctgcgattcatggggttgcaaagattcagacacgactgaatgactgaactgaactgaactgaatggtctagtggttttccctactttctttaagtttgaatttggcaataaggagttcatgatttgagccacagtcagctccttgtcttgtttttgctgactgtatagagcttctccatctttaacactaaaagtgactttccttttgatactgtaattacttctcatgttcatttgtttctcatttgacctgagttctgctaaccaccttttctcttacaccaaccccaataattacatctccaaaggcaaagcttgaaacctaaagttttagggttcctatttttaattatgagagtaaaagtccttaccactctctctttccttgccttgccacttctactcataagcttatcagtctcattacttctttttcccttcccttatttgaataatatttattcttcaagttaactgataacattcaggcatttaatcttagttcaaaaatcatcaagttctcatatggcaaatcttgatcccaccccctgcaaattgcaataatacttaaaaaaaaaaactataatccatacaaatataatgatcagggaaagatctagaatttttaattttttaaagcaatctagatacataagcagaattctaactttaagtgtgctgggacttgtgaataaatctaatctaatctgcacttagttattgcagcagccatgtgctttttatattcttatcagtaagtttaggaagcacgtgcacatggtcaatggaagctggacttttttaaaataatgggtggatatttaaattgccaagtatactctaagatagtattggcttataaaatttacacatctcaattcctcctgttgatctgttaacgcattaaataatcatgtatcactatttttagtaaaatgtttagcacataaaatgaagaatataccaacaaacagaataaatattaagttaacaggtctaaagtaatggaaagaaaaacactttctgtagtcttagctaacattttgagttccattttactttcatcctttaagaaaaaaaaagaatgttaacccattcttattttattcttggagaaaaagaccaaattctgaaagagaatccacacatgtcaacaacttctctagcccctcccatttcttttgaagcccctcccacctctaacctcatctcagtgactcattgtagaaagtatcttagagaacaggaatatagagaaaatactagaagatactcaagttttaaaataataactgagcaattgttgaaaacctgttaggtgctaagcgtattacatgcatttccttaatcttcacagtgaatctgtcacagaaaaaccattgcttttatggaagagatgagatagcaaacttagatgttttaagcaatttttgtccaaaggcacagattgggaaaaaggtagtaggatttcaactgagtgagtctgattccaaaactctgtcttctcccctggacagagctgcctccaggcagccgccaggactcctgagccaagaagcctaaaaacgtttgagtttcctgctgctgctgctctaagtcgcttcagtcatgtccgactctgtgcgaccccatagacggcagtccaccaggctcccccatccctgggattctctaggcaagaatactggagtgggttgccatttccttctccgatgcatgaaagtgaaaagtgaaagtgaagtcgctcagttgtgtccgactcctagcgaccccatggactgcagcctaccaggctcctccgtccatgggattttccaggcaagagtactggagtggggtgccactgagtttcctacctcctaaaaaaacagctcaaaggccttcaaagcagatttaccataacaatattcatatttagaagaatgtatcaagttgaacatttattactattctggtagtttacattttaataaaaacctctgcactttcttgtacattgcaaaagggaagactgtttccagatgaagcaactttgcatttaaaaatggttgcaaggggtcttctccatccttttcctatgtggatacaaagaatgtgcttctaaaaagctgagcaactcagcatgctatcaaatggttttgagtaaccaggcaacatcatcgttgttgatttgcagtgttttctcttaaatgatttcttctaggcagtaatagactgaagtgcattggatgctctagtgtcaattatctgaatggagttggatttgtaattttttattttctagaaaagtaaagctcctatattctgccttgtttggttttacttacaagttatttttatatggtaagggagcagtatcttccgggacccctgggccagaaacatgcaatcacgtctttctacttcttgaatcatctatgacctcagtgcaacgggacctcaaaagaatttaataagttcctgatatcaggtagtttcaataaattactaatatatcctcttaatgtcttgtactttaaagtactgttactaaaatatttttcttaaatttactagtgcctaatacatctctctatttaagcttctattttatttgattgtttgaaattaaaagatcaaacttctcttataatttagggagaactgaatattcctacatatcaatcaattgcccacttatttaaactcaagtccttataggatttgtcacaatctctctttatattgtctgaaatgattttcattctttagcatactatgctggcttgcctaggttgctcatcaacatgggaacacatttgcttctaacacagacccacagaccctactcaaccctacccagtcattgcctttgttcatgtggaacactggctacttatttcaacctcttgctttctatctcatttgttgctatttaattactaaattgtatccaattcttttgggactccatggcctgccaaggctcctctgtccaagagattttccaggcaagattgtgggtggtttgccatttccttctccaggatcttcccaacccagggattgaagccatgtcttttgcattggcaagtggattctttactgctgagcaaccaaggaagccctagctggtttttaatcctctactttctattactactctgcatttgacaagttttctgaatagcctcatattaggttaaaagctttttgaagttatttaatagaaaaaaataaatgtccagtagtgtatctttatcactctttcctttaattctatcaaagacccctcatgaggatatcatttctgctacgggaatttgcatttctttgtctcagtcattatttggttcttggaaacgtctataactttgctcacacttttacctcaaagttttctgtaatgataggtgctgctccctgaagactgctttgttttaaaattactacaacaattttagagttgaatcaattttgaaacttaaaaaaaaaaattgctttctggaatctgcaatgatttcatcattcccaagattttacttcaatcatattcaatgagtgacttggacaaatgactttggaaccattatgcatgaaaccatcattccctctggctgtggagaaccagagaaagtaactctgttgaaataatagtcatttcaaaaaagaaaaagaaaactatttgagattcattctcttcgcttgaaattttgagcaaagataaaaggtgagacatcagtgacatagaaactgcccacttcagctctagctaagtggcccatagaagcttatattgtttaaaaactatttcattaagagaatattgattatacctttgtatatgtttgtactagggaaaagcaaaaaaaaaaaaaagacaaccatgcacttaagaaccaaatacacctgggcttgaatcccaactccaccactttctaactgtttgaagaggcaagttacttagttagttaagtcgctcagtcgtgtccgactctttgtgaccccatggactgtaggccaccaggctcctccgtccatgggattctccaggcaagactactggagtgggttgccatttccttctccacgggatcttcccgacccagggatcgaacccaggtctcccacattgcaggcagacgtgttaacctctgagccaccagggaagcccaagttacttggcttccctgaaatttaaggtcctaaatgttaaaatggaaacaaaaatacccacatttcaggggataagaggaagtaaaatgaataaatataaagcatccacattctacgtcacttcagtggtgtccaactctgcaacccaatggaccaggctcctctgttcatgggattctccaagcaagaagagttgagtgggttactgtttcctgctccagggcattttcctgacccagggattaaaccctcatctcttgagtttcctgcactggcaggtggattctttaccactcgtgccacctaggaagatcatctagcagtgaataattagtagatgtgctcacagatgattcttctctggcttggtccacactgctaaatagaagcttctcaaagaaaagactgcatgtttggtattttgacattttagattatagttatatatgtaatggactctctgtccatcagttgagttagtgttttaaactttttcaatatcgctattatttgtgtagatgttttagaaatagcaaatgttaacaagaccaaacactggtttcctaaacaatatagtttgcaagttcttattttttttctaaagccctaagcaaattttatatatgctgcagtaaaaatggtatgtgaaccacactgtaaagactgtttgcttcacagtggtttggccatttacaaaagtactgggttctaaaaggaactaaataagttcatttgagttttttggtaagatcctatggaaaaccctgaatgaaccttttggccaaatgaatataataaagaagataaggaccctccgctcccagactccaaactcccactatcagccttctattaagagagaaactcccagatgagccaaatttcagaatacaggtctgcaaatatggcaatctccaaaactccaaaaacctccatttatacacattgagttgagtaattttctagactattgcttatgctgcagtcacctacagcatatgagagctaccaaaaacattctcaaaacaaaaaacatttatttgtttttcctctgaaggaattcttaatgaaccagagataatacgttagagtttgcacaaaggcaagttcactgagaaaggtataaaataggagttagaactctggcctcaagccatgtagatttaaactgatttattagcatcctggagaaggaaatggcaatccactccagtatccttgcctggaaaatccaatggacagaggagcctggcggggtacagaatatggggtggcaaagaagctgacatgactgagcatgcatctgatgtgatgagcatcttggagtcggtcttcccactgtcaagtgaggaaaaagtgatccattctgtctgctacaagaagtcattggaaggataaaatggaagttgttattatcacctccaggtgatcacacaaaagaaggaaataccatctttgtactatactttctaaatatttgatcttgtaaatatgccaacatggaatgcaccactactatttataataaactatcttatacagttatatatatattagcatatatatatatatggaaaattattgcttcccatgtgcaggcttatttattttgtgacttatatatagccataaaagaaaatcctcacatgactagatcaattctttttatcaacaatgtaatcactgaaataaatttaccattaacctaagatgcagaaaagtttcctaaagtgtatgtaaataatcctcaggtttttactgtttggagttttctgcatttcaccacattaggaaaggtcaaatttatatagtcatatagcccaaattatacttacgagaattgacctagggcatggtggatacaaacatatgtaaaataaatctggagagggaaagttagtgaaagtatgcatagtcccagaaaaggaagattagaaaggctaggctggagccaagaatgaaaaatgtactattggaacctaccatgaattttcaagacaatacttatgcatacccatgaaatgtttatttaataaatcattcattaatgagcaaacagattgatgagatttggcacattgcttctttggactgtattagcggcagaaaaaaaaaatggtttctgagtcatagccaagttttttttcttctttgcctggatgcaagtacaataaagggtcccttgatctgggcaaagtgagagttttaagcaggggatgccatgatcacatctacaagtttgggatgctatacagaggatgggatggaggaggaggaggttgtttaaaaaaaaaggacactggaacattcattgtactttcatctgttaccattgaggagaaatcatgaataaaggaagaatagtgattccactggaaagaaaaggaatgtcaaaaagtccaagattgaggtgagaggaaagataataagctcagtttgggacatgaactagaggagacctgattagtaaaaatgtaagtttctgaaactagatcctggaaaagaaatctgagttgaaaatcatttggaagaagtaatagataatacttatgcataattgacaggcttcccaggtggcgctagtggtaaagaacccacctaccaatgcaggagacttaagagatgcgggttcgatccctgtgtcaggaagatcccctggaggagggcatggtaacccattccagtattcttgcctggagaatggagagaggagcctggcaggctgcagtccatgggtcgcaaagagtctgacacaactgggcaactaacagagaatacatgagggaccatgactgaacccaggatacactctcatgcagtgcataaaaaagcagaggacactgagcggtcctttctgcagggtgaagtgctttacctttgaaattgtttagaattgccagtgtgtggtaaaaataataattaagcaggctaacctccactcagttctactactgtttttaaattcctatatgaatgctgcctcttcattgcctgaactggggtggaacattcccactgtgccctccccagataagagaaaaacagtgaagaagactcagcaagagcagtccatgaagcagaagatccggagagaatggtgggtgagaagcctcatgaaagagacatttcaaaaagaagggagacgtgaacttgctacaaggcactagttggtctagtcaaatgagaactaggaattggccatgacatgtgataaagaacgggtccttagggtctttgaccagaacttcttttgtggagtggtgcagagaaacacccactagatgtggatataagagaaaatgaagaggaagaaatggagaagtgacgtatggacaattctctgaggagttttgctataaaaaggatcagggaaatgggggagcatgcagaattggtgtagcatcataggaaggtttcataagtaaaatgatgtagatagagaatgtgggtacgagataggattgggctagtggtgaggagaaactcatgcagaagagagtgaggtagtaacaagggtcagatgatggatttcacaagatccagatggatgtggatttctgaagcaagtggggatggcaatggaagtcaaacatcattgaagtcaatgaaagttagattaggatttatagaagttggaggctctcaggatcatgacaagagttggcgagaagagttggggggaataggaagctacacaggagagaaaagaggtgccaaaatgaatgagaatgatgtaaaacagggactagaaaagtgggccagagagcaaaacccattttactttaagatatgaaattctttttgtcctttttgtgatacacaatgacagaaaccatttttgttgaataaagatttgaccagcaatcctacctaactatgagccaagaccctgactttttccttgtagatatgagtattatggaggccatatacgcattaaaattatatcaagaaaaaatgaaaaaccttgcagaacataaacagttccctattaaatttttggatgaagttttatggcaatactatcacaccatatttttcatcatctttctaatgttatacacatagcagaggaattttaggatttggtacaggtgaggaaaatatctcaaaaatgtaggatgacttggtccattaagttcactgtcatgactaagttgatgaagttattcatgatcgtaactaatgtaaaaagtgacatatatgctggaaccacattattataaacatcttacgattaacaaaccaaaaaaaatctgtaaaaatttaaagatatcactattctaaaatatttgatagtggcaaacagtcagaaaaagtgaactatataatgtgtggacaattcacaaatgatgaccagaattcaaatacataaaggggtaaaataaacaaaaagtcataaatacagtcaccttaagaaaacaaaaggtatgttgggggaaggaagtagaggaatctagtggtaaaagaaaaaaaaaaagaataatgaaaagtaatttatttctctttaatttcacaaactataaataaaaatattttaagccaaatgcagaattcccttttgaggatttttaacattgatatttttaagggtgtatgaaggataattatatgtttgacccaataacataaataatatggaaatgaatttcatcttttatatgactaatattttctttttctatacactatacattttttaacctgtatcaccctaaatactctagaactttctagagtaaagaaaattgacctatatcaacagatactatatcagcctaaatactcagatattatatcacccaaaatactctagaactttctagagtaaagaaaattgacctctaatttatagttctgtgtctgctctttgcagctacactatgaattgcagagaagtatctctttagagtcacaaaactggacgtagggcaaggtcaaatggaatcaattttcatttattccagttcttccttcccccacccccatgaaggggttgcagggtatttatggattggtgttgggacattttgttttacttccttctgccaaatgcacagtggcaattctgtctggctaaaagtcttatgaatggggaccaacgaatttctcctggttattgatttccaacaaaaagtctcacctcccattaatgtcgtatttcaccttgtgtacagttcacctcatgacctagtcctggatttgttttcattcatgcattcaatgagtctttactaaatactgactatgtgcaactctgaagtacaacagcacagtttatagatattttagtttaatcagtcttacttcagttcagttcagttgctcagttgtgtcccactctttgcgaccccatgaatcgcagcacaccaggcctccctgtccatcaccaactcctggagttcactcaaactcacgtccatcgagtcagtgatgccatccagccatctcatcctctgtcgtccccttctcctcctgcccccagtccctcccagcatcagagtcctttccagtgagtcaactcttcgcatgaggtggtcaaagtactggagtttcagctttagcatcattccttccaaagaaatcccaggactgatctcctttagaatggactggttggatctccttgcagtccaagggactctcaagagtcttctccaacaccacagttcaaaagcatcaattcttcagcgcttagccttcttcacagtccaactctcacatccatacatgactactggaaaaaccatagccttgactagacggaccttagtctgcaaagtaatgtctctgcttttgaatatgctatctaggttggtcataactttccttctaaggagtaagcgtcttttaatttcatggctgcaatcaccatctgcagtgattttggagctcccaaaaataaagtctgacagtttccactgtttccccatctatttcccatgaagtgatgggaccagatgccatgatcttagttttctgaatgttgagctttaagccaaccttttcactctcctctttcactttcatcaagaggctttttagttcctcttcactttctgccataagggtggtgtcatctgcatatctgaggttattgatatttctcctggcaatcttgattactcagataccaaactggcctggacttacattgtttcaccttccataaaagagttcctcaaaggctttcctgtggctcagtggtaaagaatctgcctgccaatggaggaaactcgggtttgatccctggtccaggaagatcccacatgcctcagagcaaagaagcctgtgcaccataattactgagcctatgtgctactactgaacagctactgaagcctgcatgttctagagcctacagtccacagcaagagaagccagcacaaggagaggtctgcatgccacatactagacagtacctccactcgctgcaactggagaaaagccctcagagcctcaaagacccagcacagccaaaaataaaaataaaattaataaataaaagtagagttcctcaatgcttattagtataagtaatattaatagactaatataagtataatctttaaatgtgataaataaaacaacccctaacatggttttattaaactacatctttatgtcacttaaaaatcatgttgaaaaatgacgtttttttctagtttaaacaaaaaaaaaaagcttatgaacatattatttcttctttgcactggttgtttaaagcattatgtttgaaaggtggagggttgggcctcactattacagcccctgcttttcgcccctccggccccaggccaagcttgggaacttaagcggaatctttgactctttcgttgcattgtatttagtcgataagtttgctctgtggatttggtttcaatgttcttttctatttgcccacaattccctcagtcataatacataataaaacacacaataacaatacatagtctcctaatgtatccaccacaatgactgaccttgagccaggttctgcctccagattctcttaacattacccgtctgacacactactgccacatcacacttcctaaaccacctctgcagtgatgtcattcttatgctaaaaagcttcgatgccttattttctgcctcatcaaatctaaactttgctcagcttccaaagccttccatagtctcaactatctacttaatttttgtcactttctcctaaatggtcactattaggcactctgtttcagagaaggcaatggcaccccactccagtactcttgcctggaaaatcccatgggcagagaagcctggtaggctacagtccatggggtcgctaagagtcagacacaactgagcgacttccctttcacttttcactttcacgcattggagaaggaaatagcagcccactgcagtgttcttgcctggagaatcccagggacaggggagcctggtaggctgccgtctatggggtcgcacagagtcggacacgactgaagtgacttagcagcagcagcagcaagcactctgtttagtttcttgcatctcaacacagtcctgccaattttctttcatgcctaggtctgaaccacttcgtctcccctctcagccttaagggctatgcctacataaattaccaggcaaataaacagatgcagagacagacaaatataactgtattgcactttcccaatcctattcattcttcctgtcctaatattcctaatatgactattcataatattcataacaaaccactcagatcccctgctgctttgaatagttctgaacttgaaggagttcctcccatgatggtttaccttacttactgtgtcaagtacactggttctgtcttctgggcagcttccatactccttcagggcagggaattttaaatcttctatcaacaccccagggcaaatgctacacccagacctgctgtccagtggattcctctcgaggaggttctataatcaataatggcaacaaggaagaaggatctttttctccacttcattctgattctgattccaattaattcatcaagcatttgttacacttgctatgaggggcaagtatttgggcttctctctctcaaagggaaaaagagtataaaatcctacagagagaggctaaagagggagcaaagttctttgagacatatgccactttttatgagcaatctttcttcctttccttctcacatacgactgttacagtattatagaaatgagttcgcctctgctgttttcctctcactagtctcttcttgtgactggcctatgaatatgtaagtctttatatttaatcctttgaagttcaagcacattcttgcttgaaacaaaagctctagagaatgaaataagagtatacaattattgcaaaaatagcaaaaacatcttcccttgagaacaatggtccagaaagatctggctgggtgctgagacagagtgtcaacttgacttttaattttatgaattatgatcatttggacaagaaaatatctttaaagggtcaatgtcatttctgtaaatgggaagaaggctgaatgtgaaaagactgaaaaaaaaaaaagaaaacttatgagcaaatagcaacagtacgttctccatttctctctctctctctgtttttgttcctttaagaggaattttttaaagtgaggaaattgcagttaaaaattattttatagcctttaaaatgaaaacatttgcctattaagctctaacgacctacaatattctatctgtaaagcatcatttggccccctgctgtttcatttaactttagctgaacctttttttattgcttactaatctaccctaatttgcctaaaccccttatttgccatttctcaaactgtttgtttacatctcactggaaatgtgtaacaataacaaagtgctttaaggactagaaataatgatagatttaggcatgcaatttttcttcacagtataaaagacattcaaattaacacacattcactgagcgcacactaggtgacaagggccatatgtggcaagaagatagtaagatgaaaacaacctctggtgccttcaaggagcttgaatctggaagaggagacaaaatagaaacaagcccacattgtgggaagtgacctgctggctgtaggagccaggtatgtttgacacaaaaggacacagaacaattaactctgcgagaatgaagcactaagcaacacatgtctcattctatattatgtcatttaaattttttttttttctgttctggagaaatgttttatagagaaatggtaagaaaaagacaatgatcagccttcaaaatcgtcccttcagcctacataccaagcggggaaaggtgaggggaggaataaattaggagattggaattgacatatacacaatacaatatataaaatagaggatttccctggtggctcagtggtaaagagtttgcctgccaatgtaggagacacgggttcaatgcctggtacaggaagatcccacatgacacagagcaactaagcctgtgtgccacaactattgagtggtgctctagagtttgggaaccacaactactgaagcccgtgcaccctggagcctgtgctgcacaacaagagaagccactgcaatgacaagtctgtgctctccaactagacagcagcccccgctctccgcaactagagaaaggccatacagcaactttgtcaacaagggtccgtctagtcaaggctatggtttttccaatggtgacgtatggttgtgagagttggactataaagaaagctgagtgcagaagaattgatgcttttgaactgtggtgttggagaagactcttgagagtcccttggactgcaaggagatccaaccagtccatcctaaaggagatcagtcctgggtgttcattggaaggactgatgttgaagctgaaactccaatactttggccacctcatgcaaagagctgacttatttgaaaagaccctgatgctgggaaagattgagggcaggaggagaaggggacgacagaggatgagatggttggatggcatcaccgactcaatggacatgggtttgggtgaactctgggagttggtgatggacagggaagcctggcgtgctgcggttcatggggtcgcgaagagtcggacacgactgagcaactgaactgaactgatacagcaactagagaaagtctgtgcagcaatgaaaacccaacacagccataagtaaataaataatgtaaatgtttaaaaataactaaataagatagataactaataagaagctactgtatagtacagggaagtctactctgtaatgacctatatgagaatagaatcttaaaaagagtggatatatgtatatgcataactgagtcatttgctgcacagcagaaactaactcaacattgtaaatcaactatactccaatatcttccctggtggctcagaggttaaagcatctgcctgtaatgcgggagacctgagttcgatccctgggtcgggaagatcccctggagaaggaaatggtaacccactccagtattcttgcctggagaatcccatggatggagaagcctggtaggctacagtccacgggtcgcaaagagtcagacatgactgagcgacttcactttctcacttacttacttatactccaataaaaattaaaaaataaatacaaacttcccttcaaacctatgtaaacagcagaatatgataaagtacagtgatgctgaattgggaatcggacacttgggttgaactatggtgtagccttgtaaccctgagtaagtcctaaaattaccgagtgacttgttccctcagctgtaaaatggggggtgggacacacatgagttttaaggacccctttggctttcccatgatctgaacatctgcacttacttttgtcaactcacaaggacttgctgcaaggctgaggagaagacctcataagtttggacaatgattcacctttatctgaatatgttatttgtgtgttgatatttacaaccctctcttttcacatttcctttcacactattagccctatggtcctttatattcacataacacttaattattttccaagtagattcacattcactatctcaagcactctaactccacacactcaccatattccaaagaatctttcctctctctatactaagactacatcttataagcttcttgttcactcttatttcaaattactctgtgtctaatgctatgctttttttctttcctttcttctaagaggaaccagattcatcattttctagctcctttctaccctcttttctcagttacccattttttgaaatcactgaagtggatttgttttgactgagtgcttaaagcctcaaggagcagaagcacgaaggtgactttgtacactacttctgtcaagttgatttaggaaaactctggtttcctaagatgatttccttaaaaatatgatgtccctggaagctcttaagttagtggcttgtactggggaaaaggaagtccatctatgcagtcaagatgcctgagcagcacccaccctacacagtgagtggggttagactagtggagtggagtttcagagaaagctacaaacacaacagcaccagagagtggctccatcttgagaaatacagtttttaagtataacccaaagtatgtgtcactagctttctttcagggttgttggaccttagcatttctgattgaggaatactaataatctggtagaagttatggactgctttcctacgaaaatgcacatatggataactccatggggaattacgaagtggcatggaattcccaggcccatggatcccaggttaataagctatgcacagataactcagataagctcttttgggggtgttatgtagctcttagaaaagtaatctccattcccttttattgcattgaaggtgaaggtgaattcgctcagtcgtgtccgactctttgcgaccccatggactgtaatctactaggcttctccgtccatgggattctccaggcaagaatactggagtggattgccatttccttctccaagggatcttcccgacccagggatcgaacccggatctcccgcattggaggcagatgctttaacctctgagccaccagggaagccctttattgcattaatgtacccttaatgtattaagtaaggtttggtcatctaattgagacagtcataactttttagtttctttttttgtttgtttgtttttagtaatgagggcttccttggtggctcagtagtaaagaatctgcctggaatgtgggagacccaggtttgatccctgggttgcgaagatcccctggagaagggaatggcagcccactctagtattcttgcctggagaattccaaggacagagaagcccagtgaggtactgttcatggggttgcaaagaactggacatactgactaacacatacaaagacaatgtttatcagagattatcgtattaagtgaagtcagagaaagacaaatatcatatgatatcacttacatgtgaaatctaaaaaaaaaaaatgatacaagtgaacttatttacaaaacagaactagactcacagatcaataaaactaagggttaccaaaggaggaaagggggagggggataaattaaaagtttcggagtagcagatccaaattactatatatataagacagataaacaagaccctattgtatagctgtactcagtatcatgtaataacctataatgggaaaatatctgaaaaagtatacatgtgtgtgcttagtcactcagtcatgtctgactctttgcaaccccatggactgtagcctgccaggctcctctgtccatgggattctccaggtaagaatactgaatgaagattggtgccatctccttctccaatatatgtgtatgtatagatagatattttttaaaagacagtgttactgaagaataatacaagtaaagaacaactgtatgttcccaataaaagtctttgaaaagaatactaattcaaatagacactgaaccccagatgaactgaatgaagtctgcagcacatttgaacagtcagcgggcactggctcatgccacctatttcccagtgatgtggtcacttactttgtgtgaacaggatcaaaaaaggggggaggggcaatgccaaaccacacagacttgtttacataaatacaaattagctgatcaccgaggtaaaaacaaaacagaactcttcaaaagaaaaactgattccatttttctactacagaaagtctaaaaggaattcaatgattttttagactaaaataattaaatgttttagaatcattggcttacgtattggcaagaggtgttactacagtagcttagaagtgtaatggatctctccaaatacttaactaaatccttatgtagaatatagttgattaagtatagaatgaataacaataactaacagaggtcacccagagcatgtaggttaatcagaagactatccaatgtttctgtattatggctaataaataggaatatctgagctctggatgaataatattttcaaaaaggcattaaaataatacacaaagcagcttcataaaatttaatatgtattctacaaaaagtggtgaaatttttttatttgaaaaccaaactgatgaagaaggaaagattaaaggattcaacttggttttcaaataaagttgatttccagacatcctgtttaattctccaattcaaccacacatttcatcactaaatacctaagtatgaaaactctgaaggatgctgatatttttggctcaccaacttttgtgatgtcctttttttttttctccaataaacttgtaaatattctcaatcaaaacagaaagatctgtcataagactttacagagggggaaaaatgctttagaaaagtttggtaaaatcaagaaatagattgaatacttataatactcatttctaactatcttcatgaatcgaagaagcaaagtaatgttcttttttccccatcaatgtatctggaagtcaagacttttcttataaaacacaaaaccacacacaaaaaaatatttaacaataaacctattttaaaaagttttacttttatctacacatgatactgggggcattaaagatattgagaaaagccaaggagcagttcaaaaactgaaactttcaaacactattactgtacataatcttttctcataggcaccatctttaccttcaatgttcagaataatattttctatttgtaactatatcaatgaagctagttaattgttgggaaaactagtcagattgaatgccatcaaataattttaaacaacaacacaaaaacatttgtctacatttgtaaattatacaacatgttggagagaaaaacacattaatccaaatactgtgtcatgaattcatttatttccctacaatccatattgaacttaaatgtatatctctttgcttttgtcagctcattcaagtgaaaaaagggagacaatgtttaaaatattaaagagttttgaagatacatgccatgtaaatatttatgactattttacctaatatggttgagaagcaaacattccactattcttttcctccaaagtatactgttttctacatttgacttaatcacccaacgctacttactatgaaaaattaaaaacacaagtttatcaaccattcttacactgaaactcaacaaagaaaaagaatgcctgttctttattagacaatatgaagtgaactcagagttctcactaaggttcatagtgcacaactaactaattacaagcctaaaagtttcatgaggttcaccccaggtatcacaagttgaaattccaggcctctgtgtcattctctgaaacatctgcaacaaaatttaacattcttgataaatgagataagtgaaagtatttacttaattagattttaaagcatatttattaacccatacaacaaatactaaattgaaaagttttacatccaaagccaacatggaaacatgcaatggaacttaatattgactttcgaaattgatgccttcaatacggttaacttaatgcaactttcaacatacttcctaggatatttgacttaattaatataagcccagactaaaaaaaaaaaaaaaaaattaactcataaaattaagcctttccatcactttaaggtaagagagatatgtgccttcttaacactgatttccccccagctttgttcttatattctacagattccaaaatacaatatacagctatgcatatctatgtatacatatacacaatccagtgcagaaaagcatctgattctatgtttatccagagtaatctcttttggtttccatcctgccaaaccacttctgttgtgtccagcagggcaatgacaacatacaccttcttgttattatttatgtatggagggccaaaccaaatgtctgggtgggtcgccaaagacctaaaatgggtaggttttttttcatccacaggacccaattacatttaaataaactaactcctagtgaaagattggctccaacagaaaataccaggcaaccacagacactgaaattaaatcacagtcctaaatctagaagccaccaacatattgttaaaaatagcctttatttcatctccatatacatatacaggcaaataatgcacattagtaatgagaagaaatggtctattttattccagagggtgcacccttcactactatttcctaacctgtgaaagttttccatctcaggctaagcatgtgaaaacagaggccgctctaaggatgcctcttgttgcagaggcagaaaaacaactgtcatgaactgcttaggctttaaatggatgagtcctactggttggtcctggagtggcagagacttgacaaatgtgggaaagtcctcagctgtgagatgggggctgaggttgtgggctcctggtcaattgaaaggttgcattaaatgtaaattataggactcttccttagatatatactcctttcaaccaggtggaaggcaaacactgtcgtgctcattcggagatggcctggtgagggcttccaagctgggagaggaagccgggcagccaggaacaattataatctccatctctgaaggacggaaaggaaggaaggaaatatttttatataaaaccatattaaatttcctttttaacatgcctctatgtatttctccttccaatttatatgaaaaagtattagttttaaaactacagcagaactggcagtaaatatcacaggaacaattgttcttttattaaatatttattgaaataaattcctgtgctttctcatttttcttctctagttccaatatttatttacagctgattattaacatctgccagtataactgtttcatccatacagaagccgaagggtaaaaaagtcgcacacacccttctaacgtgacctgtagttagacagaaaacagttttcccagtcactgcttggcttcctgtctgtgacctctgaaaagcattggaggccggggttaatggcctttccaatctctgtgataagaattcattttgttctattaccagcagttatctgaggagcctgctgcatcacttcagcagggttcaatcaatgaggggacctaatgaagtaaccagctgtagctctatttccctggccagctctatcagacaaataagagctatcagtcacatcttcaggctgatcccagacacagcatcttcacaggctgaactcgtatgcatatgaactaatgatactcctaccactttcgtgcagtcgtctcttttgatatagcttccctgacactgaaaatggaatgggatgagttctgagttgttgtagtaagaggacagacaataatgtaagaagaaagaaaggtgggtttgcagaacagtggaaagagtttactctaagagtttaaagttaaaattagcattacaaaggaaactttccatcagctaccccttgaatatttccacttcaggttggcaatttttaatcttcccaaagggaggaggatgaaaaatcattattttcatttttattgatattaaaaatctaatatcaggacttgcattttgagtaagccatcagaaccaaaatacaattacgctgtatttttactttggccaaatatcagtcagtgtaacaccataagttaatttagggctatttcatgttggctgatatcagtaaacccagatagagaaaactgtatgctacagtaaaactctattcttaattttatattttttaatgtttaaattattagtttcattcatctctaattcaaaagagcaactgtttgttagtaagtgctattttcacacatgtaggtttcagaaaggaaaaaaaatcaaagccttgcacctattagtagcctcataaatgtattagatggttatcaggagtcctgttcaaaatgaacccctttatggaaaggggtgctgatgatggctctacagcttttagactatttctctcaggcaatcactgcttggcttataggacgctatgaataggacattcatatttgctgatatgctgaaagctacaagtaccttagtttactttattaggttaatcaagatgaatttcatggaatacaatctgtattcttttaacttggctgctctctttgtcaatttgaaaggaaaaagagcatggctatttgttgtttcgctaaagagatgatttctgagggaagttatatcagttaaaaagtacttgctagccttgtacttaataaacatattcacatagacaagaatattttatttcataagagatgatttttcttcaatcaatattactgacataaaatacctatgtttatgtaaattatttatgtgaatgtatttatgtaatttatttatgtgaatatatatgtacatatttatttacgacattttctacatttgtgtagaaagggccaatcaatatttaaatgactcactttactgacttaaaattaactttcaatgttactaatatattatgatattataatattagcaataatactaattattatgacatatattatgactcatatactatggtgcagtcccaaagactatctccaaatgtctttcagtttttatgggtgtataaaactgctttcttttcatactgcaatccctgagatacctgagtgatcaggttctgatatcagattattttctcatttcaaacctttgagatgtaaatgatagataaaggtggagtagataagtggcttaatgtaacagaaaacacaattgtgatatctaggaaaacaagggaggggtgtgtgtggtgtgtgtgtgtgtgtgatgtgtgtgtgtgtgtggtgtgtaggtgtgtgtgtggggggtgtgtgtgtgtgtggtgtgtgtgtggtgtgtgtgtgtgtgtgatgtgtgtgtgtgtgtggtgtgtaggtgtgtgtgtgtggggtgtgtgtgtgtgtggtgtgtgtgtggtgtgtgtgtgtgtgatgtgtgtgtgtgtgtgtgtgtggtgtgtaggggtgtgtgtgtgtgtggtgtgtaggtgtgtgtgtgtgtggtgtgggtgtgtgtgtggtgtgggtgtgtgtgtggtggggggcattcctggagttttcaggatgtaagtaagggtgaggaggactatctttgctgcgtatgtaaacagataagaatatgcctagcaggcattttgggaacatctgtcaattttttatagaacatactgattgtgggctattgattgcatttaaacaaagttgttgcaaaaaaaaaaaaaatcagctaacaattcgtgtagaaaggccaatcaatatttaaatgactcactttattgatttaaaattaactttcaattaagagatccataggactcttaactgcgacacttatccattcaagagaaaataaaggtacatttatcgatacacttaaacagcagtggctggtttcctatcgactcagtcatttgcgctgggattcgttagcgtcatcagcctttaactcgcttactaggtcttcgcggtgtacaacactgcaagatgtaggaatgcgcaaaacaacacaaagaaaggatagaaatttaaacagaatttaaagatataggaaaaaggtaagtcaatcttacacttccttttaaaattgttttcttttagtatgatggcagcaagactgtgtagatgatgggggtgactattagaaacagaagccttttttaaggggctattttttcaaagccagggctttcgacatggcacattttgtgttgtgcaattgtgtaaacgaaatctttgaacaattgactagtaaaagctttattggcttctattgactcacaagatcacgaacttgcatatcctggttatattataatcaatggcagctaagaaaacaatttatagaatttttccaaagacgataattgcatttcccattggaaatactgtctatgtgtgtttaaagccatatttattcaacagtattgcaaagaaatcacactagactgtgctgtagcttttggatattttaccagatattatatttgatcatttttatcagggttttcatgaaaataaagatataaaaatcaaactgtaatatagaaaatggaaaaatacatttaaaatgcatagatcaaaacatttatccatggatcttaaaaccagaattatccatctaatttcttttgtatttttattacatctgaaggggaattctggatacagaggagggcactgaatgtaaatcctttactgcaatttctaatattatatcagaaaaacaaaactgaatgatctccacagggaatggcatcttaacagagctgaatcttcaataaccttgattgtaatgtgtgtggcagtgttactctttttcaggaattcaaaatgataggtgttcttttttggtttcgaagacaccacattgcctacagtccattgatctctttctcaccttcttcactgtgcaaaactatctataccagaaagaagctgtctcgaacagaacccccagcttattcccttacagataattcctggtaagagagacagaacagccaatctaactccacttgtaccgaaccgaattttaattacgtttacacctgtcattcatcttcattctttgataatatccactatgtttacaaaagatgtttacagtcatttcaaagaccagcccgtagttctttctctgggtaccaagtctagagtagttatactttaccaattctatctttagatttgctctgaacttgtaggaaatattgggaatggataaaaatgaaatagagatgcaaaagctcaggacaaaaacaaaataaatccctcctcaaatagtttaaccacataataccagtgtagcataatttgtcacatattatacagttacacttactaaaaagtgcatgatgtcattattccaactagaaatcagatgatgatactaattaagtgatagcaggtggcagagggggtctgtcaaggtcctctctgatctgcagagagagatatgtgcttctctgtctaaacacccaggagtagtaacaattggcttaagcactattcagtcccaaggtgccccgaataggggattcgctttgatttaacacttccttattacatcaaagaggtgaaaaaggcatctgtatggattggcttgcaagggaaaaaaaaaaaagtttgtctttaacctcagtatggaaactgtctttaagaactctgggggtagttggaaatgacccttgaaacagatattttaagattcaaaccctaagtccatgtaacaaacattattaaaagttcagttctttccaactcttgaaagctacaaactgccaattatagtatgataaagtctagaactaacccaaatctctctttggtggacataactgaaatgtcactccattctacaaaatataaattatcacctcagccaactttacatctcctaaaaatggcttgctaagatttttttttcctttttgtcactaatcctattttgtctataaccaagctcacagaatataccattcttacagtaggcactggcggatatggactatttccgtgaaaataacactgagtctgcactttatatatatatatatatatatatatatatatatatatatatatatatagttcactgatcatacctcaggaattccatagggccatctcattcttcccctacattcacttgttatcatcttaatgacataagacattaaatggtgtggagctaggaatcttgtctttcggacgatcacactacgtgttatttgaatgggatgttgtaatttaacagtgatagaaaagatcggcttgaagatgatgagccatgctgggtgaatcatgagagagcgcagacaacatatgcctaaaaggcaaaccaaatgggtcctataaatgatggaaaatgagtgttatctaatttctgaaattctcttatccagcttgatctgcctctgtgctgcttgtttcaggatcattattgtgtttttttacaatagatcaaagacatggttgataagacttgattctagataaatttgttacattttcagttatcttacaatatatgaaacctcacagcatgcttagtttatttaaaccttttctttcccctctaaaggcttactgacaccatcatttcagaaaggtttcatatcactttacccaaatcatggctaagacggacacaaataattacaggaattagtgctacagggtgtaaaattgttctcttgtagtagaggtgcattcatttcattctggaattccctgctgagaaatgatgtgtgcaaactatctaaggacactgtaatcctctgattttttttttttaaagagtaaagttgcatgtaatctttgactagagaaaaaagtattagcaatgttcatacagaggacaaatgtcaagcatcctctgctgaactcaataattctagtttaatattttaaaaagccagaaatttaggaaaatcacttatttctactttcacggaggtaaacttaatagacttaacagtatcaaaaacagaatggctacttatctttagtgactaatgaaataggtagtctttcatgatctgagttcctttagacattttcatgtatatatcctttacaacatcctcattttccatattataactgaagtgaatatcccttaaaaaggtcagtaactaccatctgtaaaatatgggaaacaaacatggtcatgtgccatatgccatttgactaactgtgagaaatagaacaatggtgagttacatcacctagcaggttacaggcgggattttgaacttcttgttcaagaacagaaaatcaggggcatcaggccccaggcccccttgcttaccctggcataccactgattagttcagccttagtcaaccagaaatccttaatcttctctttttaatattgaagaggtaacccctttcacctacgtgcggagcctgccttttcatcaaagctcgggagattccagccacaaaaatcaatgtatgcatgttcagagtagttttcagggttttgtaagacaaatctctcaaatggggacgagtttcatgctattgagctgggcttcgatccgaccaagggaacgaacagcacaccaacagctcactttcctgggctccagcagcagggcgggggtgggggaccagtatccaccaggaacacagctgtggaatttctccctgacctctcacctcccctaatccgactttaaacctggcagtggactggttaaataaataaatatttaaaggtaaccccaaatcaacaaacataattaatttctcttttccatgttaatgacacttagagaagtttttctgccgctggagtgcttcgcaaagccagggccaatttctggagaatcaggtttcctttttaaaggcgtatgtttgaaaaaggcaaggaaaatgttcatttttttttttttttcctttgcttcaggaaatggatttgtctattgagtcaagaagggcaatttgttttaaatggaagtatttctttcctagtatttatgttactcactaaaagctttgattccttaatactttaggcctcctatctttcaaaaatattcaacagatatattttagctatattttagttattcgagtttctctcttattagaaatctgaaagttatgaaataggtattgccatatagcatttttgaattacaaattaaaatgattcttttaaatctggggcattgtgttacactcaactctcagggtaaaattgactctattacctatgttgcttctattagtttcataacttcccaaattacctgatgttaaatcaatcatgactttatacagctacagccttcctttcataaataatattttatcctggcatgaataaggcatttgaatattttctaatattttagaaacatcaaagggaaaccatctcagattcttcatttcattctgagatgaatattttttcagacattaaaaaaaaagaaactactggacttagtacaaacattctgaatctgaaatgatgatcaaatattacaatagaactatttctgaatcaggtgtaaatcaattttgcataatgataatgtggatgtaaaatatatactgttctttacttcttcatacaaatggcttactatattttcattggtaggttgtcaaaatgagtttttaaaatgaaatgtaatgagattttatgcaaagatgattctaatgatttggggtatatatttataggagatttatttttcttttttatattgagtacaggttctgaatttgcagcatattttaaatcaaacatttcctaaactaaaaaaaaaagtatacaatcattagagcttttttatactttcttagcagcaacccagctgaggagatatatactctgagcattttcataacattacttactctgttatcatcccttactcttaagatgtcacctctggaccatgattcacactttctttaaaaaaaaaaaagtcctattggggcccaactaggaataattaatataaataacttttcaaagtatagttaccttagttgtacaacttcttattattgtataaggataaatattaaagccctggctagattacttaaaaaattaaatactaattttcaaacatgaaatgaattgtttaatatactatgtgatccttcccactccactccactgcttgaatacacacacacacacacacacacacacacacacacactcacacatacacacacactcacacacatacacacacacacacacacatacacacacagtcacacacacatgcgcacatgcacattgtttcatcttccaaaagtctgaatttttgtttcagtacctcatagaggaatctcccttgttcataaatattttaaagtaatttgtgcctttacagttaaatggatattgctaacttttaatcaacagctcaagtgtgctggcagggattagtgaaaaaaaagaaaagaaaagagtgctatcatagaaagttatcatactttttggtctcagagccactgaaaggatacaaaagccttgtttggccctgccctggggtctgggacctcaagtctaaataagtaccagtagacacaaaaattttctcatatttaaaaaaggtatttacctcccaatttgaatgtactaataggttcgtaaggaatgtagtttcattcttacatttcttttgaaaacattatttttactctcaagaaataaatacgtctctaaaagtggctgtccctatggtataaaaataattctgaagcctaaagctgataatcttgaattcaacatactatgagagacctctgtgtacacacagtgatgaactctgtgaccctttggtttaatcccaaacttggtaaagtcatgttttctaactcaaagatgcatttcatactatatcatatagaggacaccccagttaagccatacttctttactggcagaacttcaaatgtcatcttgagtttcagaaaacacactttcttttccaaagtaattagctaaggcagagtgtgtgtggcaattaaaaaccacttgcttgcagaagcttgtaggcattatgtaatttttttatgctacaagtacatatgtgtattcttgcctctagcttaaatacagtgagtgttgtagctggttgcacaggaattgtctcaagaacattaaagcaagccaaacacgattgtattccaacgaaaattgctctctttataccgtgtattgaaacttgataactgttggttataaaattcctttgattttctgtaggtaataaaatactttggcaattactattgacagttctggataatcttgaaggctgccttgcctgcagaagatgagtgttacaaatcactccactgaaagagggaagaacagcagcaggcagcagacaggtttcaatttcacaatgctgattatctcattctcgattctatgcatgcctaaatctgagaatccctcaagcagctatatggacttctacttttaaaatgcctattacgctttcatactttctcctgcttcctgaagagtgccatttcgccaagcttaaatagcagaaaattgcactgcttttcctctgcccatctcctcaatctctattaacctgaacaagaacaaaggagtatgatggtccggctctaggtggagaaataggttggaagttgtttttcatttacggccacgcatatttctgcttcatcaattcattctcaacaataaccggcttttaatgcctcagcaaatgacgacctgtgcaatatttctcccccccagtatataaacgtgtcagtccttgttccatcagtgtgagtacactcacatgcaggcttccacacacaccgacattttattatgtgccacaaccccaaatgaaagtgcgtggttattaggacaggtcttgatttaaatagaagtgatgaaaataaagcttggcccaaaatggaattctttctattttggtttgagggaacaataggctggaaacagaaaagaagagctttgaagcacctggtcctaatgcttgcagtaggcctttattagatgtcataaacagaatgatgcattcctcgatgaaggacttacagcccacagaagtggaggtaaaatggaggacaaagagtcctgctaaaacaatatggttaaatggtccctttcaatcaaacgctgtttattaaaggcagaaatcttaataaccttatggagatgtgttcagtcttctaattttatacacgactgcccttccttttccaagctaaacctttccactggatttgaaccctgaatgacatcttgcagggggaccaccggaagtcagctcgctaattgacaaacatgctgtgagagaaaggagacatctttgtatttttattttgttcgaggaaagttagaaggctcagggacccctctccagagtcggtggagttagaaattcctgtgagctgcctagccagaggaccacaaaggtaatttcggccatcggaaactgttttaaaatcaggtctgttttgcatttaaaaagataaaagaatgttttctaaaatgacaattgctggttggccatcgattcagagctttaatctcatagccggctcaaatttcccattatgtctcaccgaggcttagaaggctcgagaggccgaactatggcctccgacaaaagtggaggggggttgcagcattaagaaacacagctgttgctcgcaaactgcaaatgttagaataactcactgcttgttttttccttgctgctaataaaaacttaaagtgttttgcatgctttctataaacagtgcacttaagttttataatcgagtacatcttattaagcgtgaagtctgctgatacttaaattattcataacgtggtccagactgattaagattggcttgttaaggagcacgagaagcaattaaactgacaaggcagtgcggccttgatgtatacatttattatcacaagaatacccaaagtgaatgcccttattaagcaatgaatttcacctcactggccttccaccacggctgccacgggcagggagagcgaggaacaacatgtcaaaagctaactctgaggaaatgcctatcttcaagtgaaaccgattttgtaatgaacctttcagttggctcctgaggtaataaatcctgactggtgcattaattacttgataacatcccatcaaaatgcaaatactgcacttgagccataggaatggctcactggctggtaactcttcagggtggacataaattgtctgttttctcttatcaaacagggcgtttatttccatcttgctggggtgaatgtcactcctgcccccctcagcccctctgtggcctgacaccatcatttgcgaaggactgtcaacatcctaatggtgcgactctttcacttggtacctttctggagaagctgcccctcccccctgccccttggaccctccttcccctcccctccacacacactctctctctctctctctctgaaggaatccaaggtgtcaaggacaaacagcatcagtgttacaaagcataacctccacctttacaacacactagtctctctcttattttttctctttgagctaacacgccaaaccaggaatttcatttcttgcaatgatcgtggaaaaacgagatgaaccctggatgtccagaagcagggggtctacttaggaagttcccagacaaggccagggcttcctaggtggcacagtggtgaagaatccacctgccagtgcaggagacgcgggaaacatgggttctatccctaggttgggaagacttcctggaggagaaggtggcaacccgatccagtattcttgcctagaaaattccatggacagaggagcctggctgactacagtccacgggattacaaagactgagcaagtgagcacacggcactcactgagcaagaccagaaaatgtttcctgcaccaacatgcaccacgacaacaaagcatttctagatggtgttttcatatttcccccaaataatcaatacttcattaaagaaacagaaatgctccactctaggcctaagagatagagaaataagagtgacgagtcaaaaccaggcttaataaacacttgacaatgtgtgagagaggctcctgttcctgagtgttctcttagcctagcgaaacagatttatttagttatggaaactgtttccacaatgaatgttaatgaggatttgtgttttctattggctccttcgaaattctcatctccatcaataggtctgacgctcccacctgggtcaacatgcctcccagtagtgtttatttgtctcgaaggctcggtgaaaatccttaattcaggttactaggcaaccctacaggtgagaaaatataatgtttggctgactccatttttgaatgcacacggtggcctaatgccttcgaaatagactgcaaagcatgtgctgatcattctcggctacattctctaaaggcgaggtcagaagaaaattaattgatgctgaaaataatgacaggaggagaggcaccactgagacttggtgtgactggcatgtgataatgttagcaagaatctcagcatgtgactggacagtgtgatgaaaaatataccctgtgcgagggaaaaacaagttacaaaacttaattagtttttgacacttcttcataagttattatcttttcatttggaacattgccttgggacatcaatacacaagaagaaatgaaacattcttattgtaaatatgaaagaaagatgactttataccgggcctctcctctttacatgtccttttgaataaacaaaatatcctctgcaggcgaaaggatatctgagggtagatgatgcaaatgtttctgctctgagcttgacaccgtctgagtcgatgtatgattccattacgatggattatgcaattttgatgtgaaaaaaagaaggtggcatccgaattaaatgtggtcaaaataaggctcttagatgggaagtcgtcaaattatatccctgcttgcaataatgcttcctgtacagcaaatgtatttttaattcctttccactaaggtttatacctagaagtaattcacactgattactaaataacccttgtgagttgctttgtcttttgaattttaaaaaatacacttgccgtgagcaatgaatttcataaaccagcagctctcatgcttgatgaatcattcttattttatgcagtgctgtgtgatagagaacggagataaaatattctatccacaagctattcggtacaatttatcatcagcggctcactagcccagtgataatacctggcttgcagattgtaatgatcagattctgtttttatttcaaacaggagcaattccgaataccagagtttttaatttacatacattagtgaggttcaaatgtggcaatagctacaagcaaattcacttgcaaactgaatgctcgccttgcataatgggttccctttagcaattattcaccagtgaagtaccaagataaaaatgaaaacaaagagaaaaaggaaaatcatgatacgtacaccatcgtgtggactaggataattactgaaccacagtgaaggtcacgtttatatctgttttagtaatgatttcatgtacccttcttctgtattgaattcctaatgcaatcttctttccattttatggcaccatcgtctcttttatctgtaagttttttaaagcttcaatgctagcttcctatcatacaaaaatggcaatggcattattaatagagattattactgatattttaaatgataaaatatggaagcatctgctaaacacagtaatcacacatgcacacacaactccacaaatataccaagccaacatttagtaaaaccgacaggcttataataaaatacctcttatggttacatcacttttacactgaccacagtattgagcttgaattcccagcagcatcattactagacattttctgccacctttctaaatctgaaaagcttcctacatttagtgaagattaggtaatgctacacccaatcaatagcagctatcaattccataccttgttcagcagaacaagctgatcaaagtaagtaaaaaggctgactaaatattgtttaagactaggtgattcttaaaactaatctgtagttttgagaaaatatactcttcgcagagagaaacaaacgctaaaatgacaacatatacaatgaaactggcgcatctgctgtctttattccataatattatggaaaacccagtatagagtcccaagtgtagaataggagcttcgtgtttattcggcatttccacagtccggatcatttatatcatgatcttatggttatgtaaatggagtctcattttaggtttatcagcggctttctaaaaatgcctgtttgattatcagagatcaatactattctaatgaaatcctaacactatttctggggggaaaaaaaaagtcatttccaaattcatgctttaggcccaacagagtcagtgttcaatttctagacgagtaaattgtgtaaaaaccactgacacacctcctaggacaagccacgttcccaagacacagagggattgaacggacgacaaaaacagttggtctggttaatctcttggtgctgcccaaaaggtggagaagctgtggtcagagtggtttctggttgctgcctcatataacagtcctagatttggccacttgaaatgagaggaggctcaatctttttttccccactgttatcaagatgcagtcacacattgtctatacatggaaaatactagcttttattagaatcactcagtgaaccagtgcaaggagtcataagaagatgggtaggaagagaaatcagaaactgggggaaaaaaaaaaaacccactctatatttataatgctttacagtgtggtgaaatagtctgctctttcccttcctagttacggaaacattatcagtaggagtggcagtaactcttctttgaaaagttacattggacactttaggtttgcagacgtacccagggttctggttttgaaactctccagggtagtgtggttaaacaattacagttggcactcattcttccaggcagcactcagccactgaaggatgagggtgtatttgtttaaccagtgctgctgctcatccttgtcagcccaaagcccagctgaaggcatgggggtcgtgggaattcagaatgcaggacaaagctggccatacagttgaacagcccaaggacagggcttgatccctatcggacgatacatctataatgaaggatcaaaaatacagatttcattgttacactagagagtttccctaaagtgaacttcctcgaagttatcctacagtgttgatgttcagtcgctcagtcatggccaactcttcgagaccccatggactgtagcacacccagcttccctgtccttcaccgtctccaggagttttctcaaactcatgtccattgagtcagtgatgccgtccagccatctcatcctgtcatccccttctcctcctgccttcaatactatagtgaaaaaaccccaatttgtattaagtgtgtattaagttgtttagtcgctgagttgtatccaactctttgcaaccccatggactgtagcccaccaggctcctctgtccatgggatttcccaggcaacaatactggatcaggttgacactttctactccaggggatcttcccaatccagggattgcacccatgtctcctgtatctgctgcactggcaggtggattctttaccactgaaccacccagaagccctgtattaagtatattcacacatacacacacacacacacacacatacagatcaactgtgtcttctctatggttaaatgatgtaatttctataaatatagcgtatatgatattcaattatataatataaagtgatgtaatttctatgaaatctctatagttttcaaattcattttcattatgtcctgataaaatcttccctttcaagtcaattgctacacttgcctatcctacctaacctttaatagattttccctgactttgataagtccacagcatttccaaatatcctcggtgtaagttagcatttatctccatcttcaagcaacaaaaaccctagaggacctttcccaacccaccactcaattctttgaatccctccttttctaaaagtttccatacttgtgctcaaatggtcggttttattagttttcacagtaagacttagcccttagtgtgtactccataaaaattgaacaaaaggctttaaaactaacaaaacaaacaagttagataacctgtgatgaatttgaatggcagtaacccagggtagaagggatgaattggaagtttggaactgtcacatacacactgctgctactgctgctaagtcgcttcagtcgtgtcctactctgtgcgaccccatggacagcagcccttgaggctcccccgtccctgggattctccaggcaagaacactggagtgggttgccatttccttctccaatgcaagaaagtgaaaagtgaaagtgaagatgctcagtcgtgtctgactcttagcaaccccatggactgcagcctgccaggctcctctgtccatggggttttccaggcaagagtactggagtggggtgccattgccttctccccacatacacactagtactatatttaaaacagataaccagcaaggacctgctgctgtgtagtgcagggagctctactcagtattctgtaataacttaaatgggaaagaatttgaaaaagaataaatacatgcatcactgagtcactttgctacacacctgaaactgacacaacactgtcaatcaactaaactccaacataagataaaaagtgttataagaagaaaatgtcaataataaaagcagttaatacttattctttttaaaaaggcagtaaccagtacttatttaaatatttgaattaggactcccctagtgctcgagtggttaaccactctgtgcttccaatgcaggaagcacaggattgattcctggatggggaactaagctcccacatgctgcatggtgtggccaaaaaagaaaaactatgtaaaaaaacaacaaccaaaaatccttgaattacttttgttgttaagattaagaaggcctaaaattaatcattcttttctgtggtagctacttcacttttttctacattgtcaactgaaagaagagtgtactttgcaaactcagattttcactggtttgtatgcaatgatttgttcttctactatcaggtgagattacagtggatgctgcactcaacagctggaatgcatcttgagttccggttttcctcagagttgaaggcactgctgaagtgactggggacggggagctgcggagcgaggggcggggcgtggggcgggggcggggtgcggggagggggcggggcacgggagggggcgtggagaaggcaactctgtacttgagtctctcctcgcaggctgacagctgggccggtgacagcaggatggtgaaaatgtctgtgatgatgggcttcaacttgggacagccttgatttatccattaaaaaggaagaatgacagaacagcaattctctccagctctttccattttaaaaagatttgaagaaatttggtaaaattgcttttttgtttgtttattacccaatcacatgaaatgtatttctaaaacactctctttaagtagaactactaatctacatttaattctgagtggatggtttttgatacttagcttacgctagaaatttggttcaaaaaaaaactggagagtgttaagactaatgagaaagaacaatcatggtctcctataaaaacatttttcccatttgattttatcatctagggtgtaagagaggagtttattgatctcattgctgctcatgtgttctaaggaccaaatttgtcatttaacaacaggggtatacagcgccatgcagcaggggaaatctgtgaccacatagaaaaacttctccaaatgagagctgactcattggaaaagaccctgatgctgggaaaggttaagggcaggaggagaagggggcaggagatgatgagatggttagatagaattactgactcaatggacatgaatctgagcaaattttgggcgacagtggaggacagaggagcctggcatgctgcaggccattgggtcacaaagagtcagacacgacttagcaactaaacaacaaacattttcttagattctgtacacgagaacctcttcttacatatagcaagtatggaaacgtcttctgagaatagcatccaacacaaaacctgtctacacagcaagaacaacaacaacaacaacaaaactctattttttcagttgacaatttgagaatatgtgtatttatcctttatcactgcagaatattctaaccttctaccaaaattattcccaactcaagaaatgatcattaaatattaatagaagtacttaaattgtatctttccatgccaatttcagtcccatgtaaatatttataactcagccttaaacattggaaatgctgtgctcctaatagaagtaacagccatcactataataggggataaacttctgtgaaagtaaaaacacaaaatgcttaaaatgctagttgtgtttatgacttggaaaagaaggttccagtgggcatcaggtcaagttttcctatttaagaggatcaattttaagtggagtgcattaattacttcaacagtgacttttaaagagctttcctaatcaaaatagtctcatgtactccaaagtatcaccactattttctccctatttatggcttttctttgtcaggtatacagttagttgatacttcagtagtgatgatcttaatactaccatcaaacttattgtttaaaaataaaaagtaaagtaaagagaaggaataaggaacaaaatgaaactaggtcaatctttttaagtctttttacctgggaattcttaaagtccaaaaaataatggcaaatatagtctcctaaattagtattttaggctttctggtcctagaaaaggtgagtaaattgaaatcatttttacagtggccatcatgcatctgaaagttcatctgttgtaattagacagggcccaaagcaaaagtatgtctattttttaagtgaaagtgaaagtgttagtcgctcagtcaagtctgcttctttgaatgcagggctgtagcccaccagcctcctctgtccataggattctagaggtatgaatactggagtgggttgtcatttcctcctccagggaatcttcctgactcagggattgaacctggacctcctgcattgcaggcagattctttaccctctgagccaccagatttcttaaaacaagtctgttttgtaaagatatgcacttgtggtgaagacttcactctgcttacaagttaaaatcaagtagagatttataatatcaaaatacttcatgtcactttaaaaatctgcacttgcagtaagaaaacgctctttaaaaatgtatcaccaacttcacaaacacacaggcacatattggatttatcagtaaaataattttaagtccatgtatttgagaaaatctatatggccccccagcctttttttttttttttaagccatctctacttcacccctaatcaaaggcagaagaaactctgaactgatccttggttggtaaccataattccttctcattctacgcttcacatgaggtggaagcagcagaataatgcctattgttattgtatggttacagtgccctgcgagtctggacaagttattaggtcagacactaacttcctaagtagaaaaatgatgtgttctcctttgtcctctcttcagtaatggctggagtcagtgctaattaaggccccgcagcaatgttcttccagagaggtcagggacttctttctgacacctaaacagtactcaactcaaaggaactgctcctaatctgaaatgatgtgatgtagagctggcctttcagattcagcgtatatttaaaggaaaataacagttaatggcaggggtgtcaaaaaaaaaaaaaagcagatggagaagatagaagtgtcactgggtggctaagtttaccttcaattcctgactccacttacagaccagtagacaatagagccctggacaccttgttacgcccttcctcatcctaaaatcttgggaagaagaaatttgcaccaggcacaccctggagacagatcacctatgacaaaccaaagaactgtttgcttaaggactatactgtatgctggatcctcttttcaccaagaaccacatcatcttgtccaagggttttcagagagattcaatcgtaatctttattagtggttgtattcataatgacacaaatcataaattcacataaagcgaacactctgttaaatttcttattgggagtaagccatggtagtaattaatcttggagtcattttcttttgcccctggaggcacagaacttacaaaatcaaagtgatatttaagagaaaccaaggtttactatcagtgagttttaatagacatctgcactgattacaaattactccaaaaccgtaaaggatgttatcattaatacccttctcactgtattcttccctctccctcagtgagacacctgcatgccatgaattggcatgtatttatttcaggatttcttgtggcccttatattgtagaatcactgttcacgatggaatggctgagggtggaccagagctctagctgtagagcttcagttctgaagtatctgtagctgattctaaaaacttcttccaggtcaaataaatatatcagcttgccaccttcataactaagtccccaaatctcttgaaaaaatacaattcaagtatgaaaattatgtctgaggatttaaaggctccagtgattttatggttaaaaagtagactttaaaatcgtagaagttggagataatctacactccgaccttcattttacagatgaggaaatagaatctctgcgatgttagatgatttcccccagttaatagtaaggctaaaattaaatcctgttttctacgcactcatatagtggagtgatttttcttccttactctgccaccctgtcttccttcaaaagtttagtgctttatacaaagaaataaatgtcccaacattgaaatatagcaaaatatctataaaattatgtcctcaattttgttatgaaacagggttaccattacttataagtgtgctattaagctatatgtaagtgttcccatttatctaagcagttttctatatgagaatgcaaaccttctgcttgaaaacagaagaatgacaagagtttgcccccccaagtttacttaaacatacaaggactaatggtgagttctaagccaccccaggagctacagagccaagtaactgcattcagacaccaaatgactaccatcagcaacttagggtgatctggattcaaagtgaagggaaaatgtataaagcaagattctcacaactctcgaaattcagacatacagctggctgatcaaaagatatcccaatgaatagcaaatagagaagatattttttgctcaaaaagaaagtgtgtggggatctttgtgtttgtgtgtgtgtttaaccaaacattttcagtttgtttctgacttgtctttgtttttgcaaattggaataaaattttaagcaagagaacttgtctgaaatgttttgcttgaagaattctagtatgaaagagacaaccaaaaaaaaccaaaacaactgcaaggcataggcctcctggcccctttaaaaattcttctctggttgagtggctgttactcaaccaaggaagaccccagtaacccatcctcctgtgttcacaggagactgaatggaaacgcaaacttcgcccctgggaaccgaaaaggtagcaggcttctgtaactgaattattccaccttgggaattttgctgctgaatttaaaatgtggctgtcctttacattacaaaaaagaaaaaaataagaaagaaagaaaactaccaactggccaagaaaaaggcaactaatgatatttgttcaacaagtgtccaaaacctggaaccagagatttatcccttttacagaagactaaacctgattcattagtaatgaaataaatattgtcagtgctttagttttataccttaagtatcaaagttttacttcaagttaacatttccttatatgggaaattttagagaaatgttgtatttgccaggaaagtctttattttttaatattggaatactttggtttgttaacttttaaataatatcattttttaataacaattcattatgtgacactggataacaattaagaatgcaggagctattttggataacaactctagtttcatcatttcccaactgtgtggctttgtcagattatttaatgtatgtgcctttgcttcctaggttgaaaaacagatataatgataacttgccctcatttgtctgtgatgatgttaaatgagttaagacatataaagtacatcacagtgcttgatacagagtagcaattaataaattattttaacttttattgcaaattttactttcttaaccacttaattatacataagtaacttataaaaatacatccagatatacagaacaactttcccaggtttttcagcatgcaaatataaataagtaactcatctggacaattcatattatatagtaatgaggaagagaatctttgagaagatgctggtatgtcatacgaaatcaaatctaaaacaaagtcaagcaaatattatattctaagtaaaatacaaatgtttatttacacagtaaactgtaaagtctcaaaagatgcagttgtgcattaggatttgaaaaattatttttctaaatgcatatgaacatatatttacatatttctatgacaggctacaaagacactaatggaacagtctattatttctaaaataatttaacactattttcagttccattaatagcctagaaattaaacttctaaaaccttacacaaacaaatcaagataattccaatctcaaatccacaaagtgaaatggagatttggtaattatctaagtaatttgattaatggagatgaataaactagatgatggtgacccatgtatctgtgttggtcctgaaatgcttactttgactgtataaatcaatttaaactggttagatgctaaatgtactgtcttcacagcacaaagtgaaaatgagattctgcagtcatttagttatctttattaacgcaggaagctaaaaacaattgccttccatgatatgcacatgtttatttcctgacaaaatattgtttttgcataatacagatataatctaaggctcactcattattctcagtaattttgttctatgattccccattagagcacttcatacaaacgtttctttcaaattgctctattatgtcataatcaaaagacggattttagccaaaatgtttgtttaccatcttgcagatagtcaaaacagtctgttggtacactctttgatattcatttctgctcattcacggagtggatttttggccaaaacatctgattgctcttttgaggaattttacaatcgttatgtcggttgagtttaatatgagccaacagctatgcaataatggaagtcactgaatattgagccagctgatttctttgtctgtccacataatgaccaataaattctttggtcttaaattttccaggatacgaaattacacactggtatgaaataaatgtttcaatgaattattttattagcatgtatgatttaaccctcaaggccatgttgacaatacgctaaaagaatccatctgatcaggtcagtcaaaaaataagcagcacagtaacaacgatcaggctaaataatttactcagtgtggtccaaacccagaacctcacatttaagagtttgtttttctccttggatacaaagaaccaaaaatctagctcttgctaataaaatgagattacttaatttgatagtatacagttcacctgataagggactttgggcagcactgatttggaagaaatgcagtttcaactagtcagttctcataggtctccaggctcccaaagtgccatttcagtatccgaagtccacctaagcagaactaacctagaaaccattaccattaatccaccagagtccctactatacactggacactgtaaaacaggggtccccaacttctgggatctaatgcctgatgatctgaggtggagctgatgtaataatagaaatgaaatgcacaataaatgtaatgtgcttgaatcatcctgaaactactcccccaccccagtctgtggaagaattatcttccccgaaactattccctggctatccaaaaaggtagggggaccgctgctgtagaagatatgttagaagcaggaaatatattcaaagacattggaatccaaactgagagccaagaatcaaactagagtgtacaaactaacatgaatacaattctggtgcgtgcgtctacgtgctaagtcgcttcagtcatgtttgactctttgcaactttatggactatacagcctgtcaggctctgtctgtccatgggattctccagacaagaatactggagtgggttgtcatgccctcctccagagggtcttccagggcccaaggatcaaaccctcatctcttatgtctcctgcactcgctggtgggttcttaccactagtaccacctgggaagcccctacaattcaggggggaaggataaatcaagaatttggaattaaactatacataccactacatataaaatagataaccatcaaggactgtatagcacagggaactatactcaatatcttctaataacatataatggaaaataatctaaatatatatatacacacacatatatataaaatatataaatgaatcactttgctgaatatctgaaaataacacattataaatcgactgtatttcaataaaaattttttaaaagaataaaattcaacatgtaattggatgttaagttgtatgatacaattatcagacaagatcactgatgagagatatacatcaattcagattgcaattatgaggaaagggggaacgaatgctagcttacaaaaagatacagagaactgcgcaagaaggaagcaatgatgcttctggaaatatggactatacggtgaagaatatgagaagagtgtagcacatggttcatttttggaaagatttttttctaactggggaagaccatattactgtccaacctaatattcctttaatagtaagattccaaactccttaggtcttcatgagctctgagagttactacttgtgtaaactcagcctagttatttcatctgcagatgccctcaatatcctgatttgtaaaataagaaatataatggtaccccttgcttaccgctactgtaagaataattgagcttcctggtgttaagtatcttaaatagtgatgggcctatagaggttgcttagtaaaagtttgctctcatcaatatcctcctcctcattagtattaatcagtaattagcttttctaagcctgacacgctttcaattatattttccagtcttgtttcctaatcttggaccctttatttcagccaaactgcactactgacgtttccagcacatcctttggttttcaaactcggagtcttcatgttttacttcatctggagtatcattaaccagccatttctttctcctattgagatcttgcctttatttcaaggctctctcatcctgggtgtctgtgttctcagagctctgtttttacccatcttataacacttgatcacattcatcagagttcctccttaaaccaggggtccccaacctccaggccatggaccagtacctcctgtcagatcagtagcagcattagattagaaataaagggcacaataagtgtgtaatgtgtttgaaacatctcaaccccacccaccctgctccagaccgtggagaaactgtcttccacaaaactggatcctgatgccaaaaaggttggggaccactgccttaaactataaatttctgggatataaagacatttttggtaggcatttcacccaatagtatgccaataagagtcagtgaaatttttgctgaatcaaatcaatgcaaaacagttaaaacataggatgtgcatggtatgctaagtttcctcagtcacgtccaactttttgcgaccatgtatactgtagcccatcaggctcctctgtccatagaattctccaggcaagaacactagagtgggttgtcatgccctcttccaggggatcttccccacccaaggatccaacctgtgtctcttaggtctcctgcactggcaggtgagttctttaccactagcgccacctgggaagtcccaaaatacaggatacagagtgtgaatgtatacagttattatgctatttataagaaaacagactgtctaaccctgaatcaatagatcttgactctccatctatagcaaataaataagttgttcatttgatctccccagaaaatgatagcattactgcaatgtttggttgctgccaataaattttatgctttgacaagcctttcttcatcatggtaaacaaacaccccacccttaaaagtgttgtgaacaatgacaaactcttgccatgatgtttctgattttcaaactgcaatttgatccctgcccataattgcacctacagaaatgcaattatccagatttttttggtctttttttactttgatcagattattagctgttgcatgaaatttagctagagaatgatagtatattatcctctacatttcattttattaggatttagctattaggagatactaaaacaaaacttcaggacactataaattctaaaagatagcactattaaaatactgacactttcaagatttggcactttgctatgtctactatttattatattatactacctagaacctagaggtgtctgtcttttcaaaactaatagcctcaaaaaaattccactgaataacgtgttgtaagctcacatgatctctttaccaaaatactcaaaaagtaaaattcatgatcagcaattatgacttcacatcaggtatgcatatgaaactattctgtatgtggttaataatttttccagatgaaaatgatagccagtggaggaaaagaaagagaatgacaaacagaacttttgtcattgattgcacataatgggggattatcatagaaatgctttctattttttcttaagatcagtctcaaaatgtctgatctttacctatagagtattattttccagagtatagttaaaagcacggatcctggagtcagactgctttccaaaccccagccacattactggtagaacagagctatgtaaactgaaaatatacttgacctcacaaagcctcagtttccttgtttgtgaaatagtaatactaatagtatctacaatatagtattgttgaagaaataaataagttgaagaaatcaacggccaacaaagattcgcttttgcttttattctcagtgaacccattcagattcagaatcaaaatctgaattgatttattggcaatagataaccaatttagtactgaaggacatacactagaggacattcaagctaaataaccatttgcatagaactattcacataattgagaaaaacatgccaccttagtctaaactctttgaatgattgcctcaattctccacctcacttggcatctatagacaaggtcttcatgtccagtatccactgaaagtttctgtatttcaaataaaaataatagttgccgtcaagtatgttaatgtccataatcattgtaatttttgtaaattataactgtcagtggtcacaaacctacccaatgaaaacataaggtaacaatttagcctttctattactactctcagaaaagaagagccacttgtaggaaacttaagaaggaaggcaaatttataacatttattctaaaaataggggatctttttcccctctcccagtgggattatttctaaggtaatatttgctagaaaatatctgcagacaaaattttaccactgcttttaattttcattacagagtgatgatacacagtgctactttagcttcggtagacaacatttaaagaatatgcttgaaatatctaggtgtattatagttaatgtaaataaaattatatttttggttccaatgattaaaaaatatgtttgtttatactctgcttttatggttttaaaatttcataaaaatttctccaaataaaatacagtactcaatttaaatattagcatttattagaaatgagatctacatgctattaactatatgttatgtattcatatttattttgttgaactctgtcattttcatgacacaaactctgatcaaggaaaaggatataagataaaccaattagaaaatatattgtcacactgttaaattggggatggtctcagggaaaagtaggaacacaaggaaattcagttattttattgcatttaaatataatacaaatattttatgaattttttgaaataataattctcagtatgcttaaaattggacatttaaaggatgctattttttgttaattacatgttgcttggatgcttaaattaagtcaaagactttaagtctaaaggtaaccctgccatgtttctaactgtcctcaaaataattacagagtggagcctgactgtcactcatgggtatctagtccattgtgtgaggagaaaaagaaaatggcggctcacgcattagcacatcacccatggctagagcaatgacaagacagattaggatgtatattaaatctcacacatgactgcttttctgtatcaaggtaaaaaatccttgctcttacatacattagggaccagtgttagtctgacatctatattaatattgacagtatatcaacattcttttttacatttactgagtcaataactagtctaaacctggtaaaacttagataacagaaatgaaaaaaaaaatctagcaggcagtcttatattctcatatctaaaaaaattcacccccctcaaagtactgggcttttatgaattatcaatccttcagcaatacatcaactggcatacacagctgtgactcagtaatccaatctcatttatcaaaaaaagaaatttggtagataaagaatggttctagaagcagaaactcctgcacagacaataacatggatattatatgcataggggacattattttaaaaagctagattaatgccattgtattgattcaccttctgtacattattttcacagataagaagacattgttaggcagtaaccctgcttccaaaataaccagagttgagaaatacacatggtacttacaaaaataggaaataatcaaattgcttaatttaagatttttaacatctttatctgtagcatatttatctgcatctaccaggttgagaatcagaagccccgtgtgaattggattagagaacggaagtcgttatttacattgtgttaaaatatcacaatactacacaaaaacctatcttcatttcaaggcaatatcttggtttcattaataattaaatgttgttttccaaagatggctactttacactctgctttgaagtatgttacctttactgttattttcaaagatacaataatgcttttaaggtgcacacatattttctatacattactcaagaatgcagcaaaataaaacattcactttttccagtcttagactagcttcaccatatcactgaatgaagagatacatatttttaaaaatcaatattatttttaaaaaagaaaacaagagcctgtattcttctaaagcttatactcaaatggttgacatttcaattttagtaactaagttgtggttggaagcaccatcattcaggaaaaatgaaatcatgaggcaatgaagcaaagttcttttgattttaaatgcatcatgcaataactcttcaagagtcactcatctccaaagtcaggtaagcttttattaaaacatgcctttgataaaaactacctttctcctttttccagcactctgtggaagatgactcgggttaaagtgatgttcttagtaataattatctctataagatccatgctatcatttatgtaagtccttgaaaatgatgccattttgtgcgaccgggacaaaattgcgaccatgattataaacccttccatcaggcaaccccactggcaaacaatggcaggaataagaggcctttctgtgctcttccaccaatgccgccctagactctgctagcaagatgtacgtaaaagaaaagatgtacagaaatactggcataggagagtaacttgcactctaatgctttgagatgtttacagtgttaaagctgcttaattatcaatagaggccctgaaaaagttaaaggagtattttaactagcaataaaactatcatgattaccagaaattctgtccttcactggaggttgtttttatgctcaacaaaatgatgtgaaattaactattttcatcaacagatggtctgtaggataatggcttgtactttttaatttcctttttggcagtacatcatgccaaatgttagcaatgtcaatagtcttcattagaagttgtctgatattgttgggatgttttgtacagacactattttccccccagtattagaaatggaaatcagagaagtttaaggagtacagaaagataaaaaaaatttaatatacttaagtgaagggaaaaggaatctatttcaaattctaagattaaaaatttaaggtttagagtttttattatttcttttcatctccacagcattgctgtaattcagaaaccagtaatctttactctcacaaaaaacatcttttgtccctaacccttattcttaacaaggggtaagtgatgccccatttataacagttttcaattcatagagtccacatgtggccgtgtactagcatagccagacagagtgtacatttcaaaaaaactaaacctcataaatctccagaaattcctcacatctattatgtttaccttctgctgctgatgagcctgttgggctctgtacagaggaaattacaagcgctccagaagatttggcaagaagatgctagaagaaacaatgggcaaaaaaaaaaaaaaaaaaaaaattcttaactgaagcatcatatccagctttggctaccatttacatatttgagattactagctagtaaagtggaaattccactgaaatggaataaattgttttctgaaatccctatctgattattgttggtgatgtctgaaattaaacattttaagctacactcaatacactgtatggaattcaactgaaggctaacattcttattgaaaatctgcctgtttatgcagttttccaattaagaatcaaagtatttgtatctacctggaacttttgcttctagccttgtgatcacttttgtattaatctctattatccaataaatctttatttattagatatttggaggctgttgtaatagctgctatctagtaagaaaatgccagttgaaatattttatattcacacatttaaataccactggaaataagcttaaagttgatgccaagggaaatgcttatgcctaagacatgctgcagaatgttaagaactttgttaaatcaaaaaatattccaccaaaattatgtatacacaatgcaaacacaatcaaagttttaaaaagtacaagtaaaaaatagcctaaccactatgctggcctttttttctttactcattctaaatatcaattttcctactaagttgactggttatcctgaagacacaattttataatccatataagaaaatgttcttaaagaaagcttcattactcttgtgtttgaagatgacttaatttgtatgcttcaattttactaaacatgtcattgctattggctattacattttattcattataaggaaaagatgaataagaatatgaatttaaaaaaagaataagaatgtgcagatccatttaacaggaatcactcttgaaataaagttggaggtaaaactactcctaaagaacaaatagaagaaaatgaaataaaatggaaccacaggatgaagatcaggtgtctatgattccccacaaaaagcaaaaaaaaaaaaaaaaaaaaaaaaaatcacagtttatgtatcttaccaaaaagagaaatcataaagtcatcagttaacctcaaccacataacctgtcaaatcagcaaatacttccatatttatcaattatgggcccaatcacttgtctgatatactaaccattcatctccccttgcaccattcccctagtccttaaaccatcctcaaataggtaaaccaaggtcctgtaagagctatctcccactaaagaaatacatttcattattgtgaaaccaaatctattacttaagaaacttaatatgaatgtctcccacttccgattggaaggaagccaataggattgatccaatgccttccacagaatgtcacagatgcttattgccaataaactgtcccttcagttttgctctttcctctggaatatagtctacctttaactctatctacaaagagtatttttgaaactcataatatctattcttatctctttgaaaatcactacagtgcctttacaaggtttagccccacatgcctttagaattatttggcatttagccaaaacagagctcgagacggctagataagagccaacggttaaaaagaaattagaaaaaaaatttttttcattctaatgaataaaaactgctaaaccaagaagcgttagcaagggacttataaaagatatggcataggttattaaaacaccatccttattacaagaatttttcctcactgatatcatttactttatcgactgagttaacctctttcgtgcactccttcctgacttttctaccaccactgggtagaagctggaggctgactcatgactggagtccaggcagactgagaaaattaattggacaggctttgcggatgtgtcacattttgatagagagctttaccttcccagtaagtaattttaatcacattgtaagacaatcaaaaaataagagtttgacagtcagtacaggcaaattaaaagagtttacctttagcttacactacaggtaaaggttggcatactgaactctccagctggctaccatgattttctgatcttgacactctgatttttcaatcacgagcaaaactcactaaagaccaatgattagtttactctctttcacttttttctttcaccatattcacgcccttggtggataactgtttgaatatatctcattgcttatggttcttaactcaaaattattttcatatagcatgccttagtaaaaatgttcttacccaagcacagttagaggctccctaagactacggttttatgctaacaccgttagactattggtgattaattaacatcaaggaactgctaaactgcagtaaaataaaaatgaaaacgcacatatgaaatatctttataggctcatgattgctggtctctgcagagaaactggtggcacccagcccagtagtgccagacctccttacaccactacataaaatttgaaataagaagggggggaggaagaaatgtctcaataaaaattatagttccaagtgaagaatacaatgattagttcagtattagcagttaattagagcgccattttcatttttatggatgacttttgctggagcagttcggcaaggtttatcacgtgactaaaaagggttacaggtaatggagtgtcctcccgggcttaggactatattttctttcattgataccgatttgatctcccaactggtctacagtagataagaacgctcacttgagaaaggtgaccttgaggctgctcacccgacctgtctaaacttgactttgaagttcccaaccactaattcaagtatatttttaacactggtatatttataaaggtgtactcagtaaatatgtctcctgacagatttaaaacaccacctaggtttgccaaaaggaagaaaaaaaaaaggaaaacggactttttaaatacataataatgatttatctaaataggcttttttatgcacccaaaccctgaaccacctttgatccatttataattaaagccaaaagtacagccgtctcatttaattccaatatgggtagttttaatgcataaagtttcgcatgtggtttttagctcacgaccatctgtttctggatttcatatataaacaggacactttagggaacagagattaattcagttttggaatgccattcaaaacgtgttagctgtttccctgcgccaggtcaaccaaagcaaaaacaagttaagcgctcattttgcaaagtagcattaacattggaattattgtataatggaccctgactaggtcttatgttttaaattactggtctctctcaaataaaactattaatctttttttgtctcagaatgttttacagtcctgttacacttattagctgctggcagcaaagaaacttttaaatgaaagccaaattgctttggtcatgagaaaggaaattaaagctcactctggggggaaaaatttcactgtgagatcctcccaaggtagggtttcataacctcctgcatgcctgctaaagatgtcaccgcatgcaggaccgcgtatggtactgatataaaaagaaagctttaatgggaacaacatgttcatttctgagagattaagagctgccgtgttttacactgggggacaggctcgagttggagagtctgaggcgtgtgtgtgtctgtgtgtgtgtgtgtgtgtgtgtaatgaagtggcgtggagcgaggctcagagacagccctctgcagggtactcaccaagctcatttggtgggcagtcttttacaaaaaagatctcattgaggttgtcttcctctggggccaggccttgttggtgaagctggagtttccgtaggccctcagtctgctggtgcttcactgatcggacgtgctgtaccaggttcaacttgaccttggtggagtaatcgcatacggcacagtagtaatagcaggattcaggatttaccgtaccctcttgcttctgcaagtgctgtaagaaggggaagtctcatgagaagggtgctttcactccctggaggatgacaagacagcactcatcccccacccatggcaagacacaacagttacacagatgctagaatcagtccttcttgtaagaggccaccctacttttgaaaagtgaattgatctcatgaagatgaatttaaaataagctgaaaacctgatggaatgaagactagctgtatagtgtccctcctaataagaagtatttatcaattggtacacccaaagcaaatcaagtctttttacctatctagttaactagttaccacaggaagaaaaacaagttcatcaaggtatgagaatacctgggtaattaggttgacatgaatgaggtacttcctgatgtttaaatgctaaacaaagttaataccaaaaccttaaccataagctgaaatccacaaattgcatggtatttggtattttctagatgagaatggtttcaggtttaattaatattttagtgtagcacaaactagaaaccaaaacaatctgggaatatttcagctgagccctctgtgatagaggttactttgttacaaatactgactcaaacataaatgtttatttaaattttccataaatctgcatgcatggaataaacttacattttctataaacaaaaatgtttctcttaattatatgttagatacactaaaaagttaagtaacttaatttgaagtttaatctaattcaaaacagacactatgatgtgaagctttttcttttttaccattcacagtgacccgcaacaaatttttgctaaaaaaaaatctgttttcgcaagccctgctgactctgatttctgcccacagcatgtaacaggatcctctgaaattctgattttttcaatggaaaaacttttacaactcccaaacatattctgttacagtagtttattttttaaaaaaacttttctcccattttaattggagtggttctattccatacaaacaagcaaactccccgaataagaaaagcaaggaagaggaggaatattaataactgtgattcaatataaactatgagttttagtaatttattaaaatatttttatgtgcttcttttaaaaatacataaatgggcacaggtggtatttatttggtcttagattagttggataagggttagcattctgaaattcaaacaaacaacaaaaaaaaacttcatacacaggatcaaacatgttgattcctaccttccctcccccacctctctcggttttcgcatctgaaaatggttagtacgaaaagaataactagctggtgagcctttccaaataccaaaagacaggacccatatattatatttggttaacgctcatggacagaagttttcgtattttttctttaatcgaaagaagttctgttctatagcgtcattccccaaatttttgtaaaaggttaagtttctgatcattcccagtcccacacaaagcagctcagcacagtgcctgtaagtgatagctcatcacctgcaaaaacaaatgttgcatcgtttagctccgcaaacaagacctggaagagtcaaaagatgagatttttgaatacctggagacaagcttttctttccttaggatggacacttacaaagatactcaagcctggatctaaacaggaacatgcctgtgcccgtcacaacacaccggcctcaattcgggtccaagagggaagagacaatccaggaattgaccttctcaagtcccagacaccgaccagatctgcctgaggccacaggaagcaggagggtgtgtgcccggagtctgcacggtggggtggtgggggtggtatttgctattataacttaccaaaacactttccagaggggaggggggagaaattaaactcttttttctcatgtaaatggaggacccatccactccaattggtattccactagtgccatttctaagatttcagtctttgatatatttattaataaataaatcaccccgcgattttctttcctgcacagtccgcctcttttccatgcctactgggaatccgtatgcttgttgattcgagtgaattaaaaatggcaccaagaaaaaggagcaagggctatttaacaacgtatttccttgtatctcaagtccgcgcagttgcacagaacctcgctccttgtcactccgctgttaagaacagcaggccacagccattcaggctgccccatcaactgtgagttttaatttgagccactttcacattaaaaaaaaggaaaaagaatcttactttttccgccaacccatctttaccccgtgttgcaccacctaaagctttcaggcgatgctctactccggatcaagccaagcatatcaagggtgcctgtaacactcacaggctaatgaacaatgcacaaaaacaaaaggaacagcaaggctcctattatctgatcttccgtaaaacacaaaaaacggcctgctctggtgcagaggaagtgccaggaagcctgcaggtgtgagccggttaaaagaaaaggcttgggctaaatagattctttgactgtcacggattagactcatggcccgagtggtaacacacatcttttcctttaatttacaaaattttctcacgcgtctgcaagagttcaccccatcaggggctttcggaggccattgaaacgtcttaagttttaattaagttggagttgtcagaagaaagcctttttggcacagagtcagggtcattaattactgctatctttgtttctttctgtaaagagaattctgatgacttgttgggttccttacccagcctacattttccaccctgcagttcccattcagttccaagtgggacttgattaagcagtttaccaattacttccatcagtgttaggtacaaagcatttacacaatcttaaatctttaaaaaagaaaaaaaagcatttctcattagtggtttagggaacagtattaataacaaattcatctagtaagtgatcaagcagctggattcttgcatgagtttttgcatttaaatataaatattctcacatttttcacatcattatctattcaactcccctattcatattctcacagcctgtgactttgcctttttaggcaatgctaatcaattttaaaattatttactttacctcataatacagaactctagctggaaacatccaattttgcctgctatcttttcaatcaggccagtgtttttattgtttctagataaaactgactgctactatcactgataatattttgtagatgcaaaaaagcaaaagttttagttggtttgttagtatgcttcatatacctctaaaataaatttgtagctatttggaccaagtatctacaccaatacaaatcttttagaattgattgtcatgtaaaaaaatttccaagttttaaaacactacacagacctaaatacaggttatacacatctaattacatatgtaaaagttaggaaatatcttttaataatttaaaaaatcatgaatttaaatcctgatatttatgggaaagcataatattttgaaaaaatttcctttgaagactctcctttagagtatatatttcgtatgtgtcccttagaaagattatgtatgagcttccccggtggctcagatggtaaagagtctgcctgcaatgcaggaggctagggttcaatccctgggtcaagaagagcacctgcagaagggaatggctactcactccagtgttcttgcctggagaatcccatggacttgagaagcctccatggcaggttacagtctctgcggtgcaaaaagtcaggcacaactgagcgattaacacttagaaagattatgcataatttgttattcttccatttcacagaaaaaaaaatagcaaaagacattaagactcagaagtgagaatgaaattgaataactcattctctcagaaatcagcaaacctataaaatagggtaagtgtgaatcaagaaagatgtatttctattcactgatatggttagaattagtgtttgaacttagcaacatctattttaaaatctgaatgaaatgggtgggaaaagatttacaaacctgggcaaattcaattaccagaatcacccagttcttcttgatgaacctatgataccacttcatttttttttcccagtaatctcatcatcacctgccatgattcacaataacagacgtgttaccaccaaatgtgtgccatttcagaccccgagctctgaatgccgtaatagcactcatcactataatgataataactcatcattatctgatgattctcagatgagaaacttctgagcccagaatttggactaggtttcagcgcagggaaagccaaaacaaccaatgctttcatttattcgggtccaaaaatgggttgctttggaagggataggaaaattcctggtttgactgaatagctgatgctgtcatgtcttacagataaaactatatatttattttgccattatactcttacttattaagcctgaaatgatgcacctggggaaaaaaaaagaggggtataattttcctctagtcgtcaataaaagttctaaatgtcatttctaatccatagcaaaagatataaattcagaagtatagatgaaataaattagatcatcaaatgtaactacttggttcattttttaaaaatctaagttttctaaaaagtagtgaagtaatagtcttacatagaaaatttcaaagccaaatattaaagtgaaattcatcttccagggttaaacagttacagaatatacagaatatgaaggctccattctcccactcattgtttacacatcttttgtatcaccccagagaccatgacttataagactatgtttttcaccttcaaaccacttgtaaaagtgtgagaattaagtaagcacttaagaattgagtcaatgtccatggggtcgcaagagtcagacacgactgagcaacttcactttcacttttctgtttcatgcattggagaaggaaatggcaacccactccagtgttcttgcctggagaatcccaggaatggtggagcctgatgggctgctgtctatggggtcgcacagagtcggacacgactgaagtgacttagcagcagcagcaggaataatttaggagaaggcagtggcacccgcattccagtactcttgcctggaaaatcccatggacggagaagcctggtaggcttcagtccatggggtcactaagagtctgatatgactgagcgacttcactttcactttcatgcattggagaaggaaatggcaacccattccagtgtttttgcctggagaatcccagggacgggggagcctggtggctaccgtctatggggtcgcacagagtcagacacgactgaagtgacttagcagcagcagcagcagcaaacaatgatatatatgatagataaatcttaaactcagaactgaattaacttgctaaatataagtattgctaagtcgcttcagtcgtgtccgactccgtgcgaccccatagatggcagcccaccaggctccgccgtccctgggattctccaggcaagaacactggagtgggttgccatttccttctccagtgcgtgaaagtgaaaagtgaaagtgaagtcgctcagtcgcgtctgactctttgcgacctcatggactgcagcctaccaggctcctccgtccatgggattttccaggccagagtactggagtggggtgccattgccttatttacagatttagataataattctaggacatataacctcatctaataatgttatgaaccaattcagcccacccctggtttatctgaatctggagacctgggttcgatccttgggtcagggaagaccccatggggaagggactagcaacccactccagtattcttgcctggcaaatcccatggacagaggagcctggtgggctacagtccatgtgattgcaaggagtcggacacaactgagtgaccacactttctttctttcatctgactctagtctggatatagtatttctaaatatggctctttcctatattaaactttttctgggttgtctgagtgaacgtgaaatggttagttatgtggagtttggaaagttaatgggatccactttttaaccacgttcagttccacagacactgggtgtgcgcaccatggcaagcgttggacaaggtattaaagatacagaggaggctccgtatttccttaggaagctcatggcctcagaaaaacaaaatgaaccaccacagcctggtgcggtaaggtgtctctctggggagaaacagattgcgcagtaggtgaaaggtggcactggcaggtccacccaggattagccttgtagacagcaggtggaagggtagccgaggcagatggagcgatatgtgtgtcatgcctggaggtaacagaaaatgggacacattcgatacacttaaggacgtggcctgagaggtacatttggacagaatgtgaagtgcctggtatggcaggctgagactggactcagaactgaatgacctggggagtcgctgaaagttaagtgggaacgagacgggcttagtctttttggccatgcagcatatgggatcttcccctcaaagagggatcgaatcccatgccccctgcattgggaacatggagtcttaactactggatcaccagggaaatctgagatgggcttagtcttcatgcttcagaaagaccaatgcagcctcagcagacggggtgagcagtctggctgtatgtcccttaaaacagcgaggaagtagtgacatagctcatcactgttcctccacttggccactggcttttgccctaattctcctgaggtttcttctcagtctcccttacccaacattaatgtatctgtgcctcccagagtttagtactcatattcaggagattcccggatttcaatcgctaacccagatctcttttctgggatctaaattcatttcgtatgaataccatcttgacatatccctttggatgtcccacagcaaccaaaactcaaaaaccacaatgctaaatggattctccattttaatttgtcacctactctttcccatactaacttctgtcaagtccttttttatatactaggtaccattctaaatcgcttatgtatgttctttgatccaatccccacaatatggcctcctacagagtaggtggggcttcccaaggtggctcagtggtaaagaatctgccttccaatgcaggagactcaagagacgtgggttcagtccctgggtcgggaaaatcccctggagaaggaaatggcaagccactccagtactcttgcctggaaaactgcatcaacagcagagcctagcaggctgaagttcacggggttgcaaacagtcagacatgactgagcacagggcacgcacagagtaggtactaatcttatcctacattgtagagatgcagaagtcaaggcaaacagaagttaattagtttgcccaaggtcatcatttgcctaatgttataatgtcagtgagagaggcagtcaggctgaacacctgtactcttcactatgacaccatattccttccccagtcatttctgttagtggcacctcagattcaaccagggacacattccagaaatctggaagtaatttttgatgcttcttctcccttaccacctgcatctcagcaccttcctaaatatacctcatatttctccatctatcaactttcctgcctgttccatttcaggccatcaactcttaacccttctattcaattcagacagtaatcacagcaccttgaaacagcagtctgattctgattcattcactcaacttataagacatctttgttatgtgtcatgcactgttctaagtgctgcaattgcagcagtgaataaaacaagtccctgccctcacagagcctaaagtcaagaatctaaaaagaaataaaactaacatgtaaatatatacattcaggcaatgattggcgctgtgaaggaaaacaaaacaggatagagtaggcagagtgggtaggaatggtggaagaaaatattattggagaagctaacctgataaattcacacaccaacttaacctccttcaatggttttcctttacttttatgataaaacctaaaatcattaacacgattctaaggtgaccatatggcaggcccttcccctatctcttccaatttaacatcatttgccccttcatttaaaaatatttcagctttgatgattaagtacacggtccttataccaaagccccacagtttgtcttcaacccaactggagctttggttcattcatcttccttacttgttcactttagtccaactattccagtttcagatcttgcaagtaaggctcattgaaagggtaaagcttccagaattccctctaccttcaatgctttcctccccattttgtcttactctcattcatcctctaagtcacagcttttcaatttaagggccttttttttttttcttaagaacctgtctgtttttcttcacctcttatactctggattttttctttagaacatttatcccattgacaattaaatagtaatatcattggttaatacgtatctgtcttctgcaccagattgaagctttttggtggtatggaatgactctttcttatgcattgtttgatttccagtaccttaataatgcccaatacataaccatatgctaagtaatatggtcagaaagaacagtgagacagaactagtggcaggcaagagagaaggacccaacagactgaagagttaatcaggacagaatattgaatagatcttcttgactgaatgactgaatacagtggagggcagtagaaagaagattaaatgtaactgcctgctttccccctagtctgggcaagtgaatggaagatgctgccatggacagagatgggagatacaatataatgaccagtgtggtgaaagagttatgctatattttagacaatgagatgtttagagagagatgattaatttgagaaagatgtgttttataacaatgatatttttaacagaacctgtctcaactcaggtccaagaaatcttcacaagctgtgaaagtgccagcaattcccattttcctggcagaaggataatttttaaaattcatagtctttattttgcccctccagcttcaattttggggaggcaagcatcaggtcactgtattgagatagcagcaggaggccaaggtccacacccacaggtttctgacctcacttttgattctacaaatggatatgctattcaaaagtagtttggggaaaaaaaaaaaagcatagaagacctaataagaggacagaagaaagtgtaatctgtgtaaaacattaaactttgggggtttatttggtgttatttaaatagtaatttttaagattttggctccatgcgcttttagtcagtacacactggtacgtatgataatggtatttgcaaatacaatgacatttccaaaaacaatgatatcaagagacccttgactccgaaagtagaatcaagccaaattgattcaatggaaaacctttcaaattctatgatagacaaaatgatatgccaggtatatgagatgatatcacaaatatgaaaacagtttcattctccatgtacaaaagtgatcatggatttgggaagagatcactctcattatccacctccctgggtttcctcacagtgttggacattgctgggtgcctcttctttcttgatatcccttcttttgacttcgttgaaaagctaagttcttatccttctggttgcttctgttttgtcttttttgctgtctcttcttctttatcttaatacaatagagatttttcacgtgtgctctctgtctttcaacagcaaatatctcctgttttatttcattttctctcatagattaatttatcttcttgctgcagaccactcacaaatcgagatacctaacgactccttctccctaaacacacaccatgcccctagcaacccaaaatgcatctcctcctagggtttcttcctttccttcaaactctacagtctacacataagttcatcactcttccttttaaacgtccctctgctcctcctttgtgccctctgtttccaataatacacaagagaaacatggtgtcatctcagacaccttctttccattcctgcccagggcctcgaggaagctggaagtgtttacctgttcttataccatcttcatctttgtctttctctctgctccccctgtccctgccaaagctgtttatttctccctggaactattgtcatcatcccctaaatatcctgcttgacctacaatcacaagatgaacactgagtatcacggcctgtgggtgattatttattaccatttgtattatttctatatcatcgtatgccaatcctataatcaaaatctatcagtggcacactagtgtttatcagattcccaaatccttaacatatcattcaagatttcactctcctttcctgattattacattccttgccttaatgtgccagaaaaactgaactgttcacctttttaattaaataccttcaagctacttccttatctatgtgctgttgttcatattcttcctacttcctactctttccattttgctatatttacatatccagatcccacccattatttaaatccaatccaaatgttacctcaacgatacagccactatggaagttccttaaaaagctaaaaataagagttatcacatgatccagcaattccactcctggatatatatccagagaaaacaattcagaaagatacatgcacctccaagttcatagcagcactattttcaatagccaagacatggaagcaacctaaatgtccatcaacagatgaatggaaaagaagatgtggaacatatatacagtggaatattactcagcagtaaaacagaatgaaatatgccacttgcagcaacatggatggacctagagattttcatattagtgaagcaagtcagacagagaaggacaaatagcagatgatatcatttatacatggaatctaaaaaaaggatataaatgaacttatctacaaaacagaaatagattaacaggcacagaaaacaaacttatgattaccaaagtggaaggagggagggttaaattaggagtttggaattaaaatatgcacacttctatgtgtaaaatagataatcaacaggatctactgtatagcacagagaaacatagtcaatatctcacaataacctttaatggaaaaaatgcaaagaagaatatacatacaaaacactgaatcactttactatacccctgaaactaacagaacattgtaaattgactatatttcaataaaaattaaaaaacaaaaccaagtcacctcaacaaaaaagactttcttcaagcagaaatatccttgtcctcctttgaaccaaaaagcattctctctgaatccctcttctgatgtgtaacatttttttgctttattacacttactcacacacataccttatttactccaactgtgtgttctgcacaggctgtccagtccatttctacaaaatgtggtgctgggattcataatgacccatgtgcttccattcagaaaagtagttcatttttaacagcaacattgcatttttgaagaacaaagttttacagagagttcagagttcaattttgctctaccttcccctatctgtctttcagaagttaatcccttgaaggctttatttcttttgtcaagtgtggataatgttatcagtctcacatatttttaattagagtgagtcaggcaaacacacaaaccactctgtgacgatatctaataaatgttgccttgcttcctcttcccagtttaaagtccttcccaagaaggctatggtacccacgaacagtgatcttacaaagcaacaaagatgtgctcagaaacttccctgggtagtccaatggttaagaatacaccttccaatgcaggggacatgggtttgatccctggctgaggaactaagattccacatgcctaaaggcaactaaacctacccaacacaactactgagcctgtgtgttccagatcccatgtgccacaactagagagaagactgctcaccacaacaaagacccaaacagccagattaaaaaaattaaaaaatgtgctaagagaacaagagcatataagatttgggaatgaagaaggccagccaaccaggaggacccaagctctgtttcttagtcactgggacaaaattgaggaaaacacaaaggtttatagaaagaatttatctaaccccagatgccaacataatacaagtgataaatcctaaaggaaatcaatcctgaatattcattggacggactgatgctgaagttgaagctccaattctttggccacctgatgcaaacggctgactcattagaaaagaccctgatgttgggaaagattgaaggcaggaagagaaggggacaacagaggacgagatggttggatggcatcaccaactcgatggacatgagtttgagcaagctccaggagttggtcatgaacaggcaagcctggtgtactgcagcccatggggttataaagagttggacacaactgagcgactgaactgaatacaagtggtagggaagggattggaactaagttacactgcctggatatgagctgctgtaagatgctcttatgtcacctcagttaatccccattttactggtgtggaaactgaactcctatgatattaagacacttctgtcacctatcagtttataaagttgggatacaagcttaggacatgctgattcctaaactcccatcttgttcatacacacatacacagacacacacacagactcactcagccccttatgagagaaacagagagtgaaacaagggaactctgattctctgaaaagtctgtctttctgctgggttttgactgggagtaactgaggatgcataaggaaaagaaaactacattagtaaaacagctgtgttggtccaacagactgctgcagactcattgttgagaaaggaaaagttccattttcttgagagaataaattattcctttcactagcaatcgaatagcagtcaaaacaccttttggtacattcgaaaagaatttctaaagaattattataaaatgtttcaataaatcaatatttaaataaattgctgtcaaaattttctcttgagcattcttttacctgcaagcctccattctgtaccaaaaagaaaaacggggaaaaataattagaaattttgctcttattttaaatccatagatccttgtaaggtctacaaatcccacaaaatattcattattgataacaagtaatatgcgcattcaatattatccacagcccctggccacagaatgacaagtgttcttacttttcaggcagtaactgaaactggatatttcctcaaagaaaggttattcatatatttaagatgcatatgagataaaaataaaaactgtgcttctatgccattctatacatcactttaaatatacaagttgcagtaagtgttaaataattgttaattcatgaccatacaaaagtgttgatttaattaagctctcagcaacctcccaccacaaaatcatattaaaattgtagaaaagaaacactaaaatatttgtgagaaccagaattaagacattaaaggtgcttcctaacaaaaatccgaattacttgaataaaacttttgacatcaactggcctaaatgatctattttcaacctatcctttttaacatttgtttcacaagatttatagaaaatatggcagggctattatcacaatatggatcatttttcagagttccatcttatttgtgtctaatacttttaacactctttatgttctagccatttcttctatcactaagggatataagaaacatcagaaagatttcttgattcctcttggctctttaactgtggtcgtgccataatgttatgatatggatgaaagcatggtgcttcatcttagggcaccgaagatcagcagtatgatcttaaggcttcccaggtggctcattggtaaagattccacctgccaaagcaggagactcaagttcaattcctgggttgggaaaatcccttggagaaggaactggcaaaccactctagtatcttgcctgggaaaccccatggacagagggcccaggaaggggctacacagtccatgggagttgaaaagagttggacatgacttagtgactaaacaacaacaacaatatgatctgaagtaaattatttaaccactaaatctcagcgttttcttctttttattaagaactgtaataactggcccatgggatggtttggaagataaaataccaagtgtgtggtacctaacagtattgtggctgataatgcagcaagaacagaataatctgttctgttgcattttttatggcagtctaacttctggtatttcaattccttttaacgccacagatatccaataacaatataggaacactgacatcatgccacgtgtcaaactgtcagtgagttttgctcccatgtgacatagaagtgatttctgctgcgattatgttctatggtcgtttattagagaaggtaagttcatttcatgcaagatatatgtgcctatactataaaatattaatatttaagtaaaactacatttcaatatgtattacccaaattactaaaataggagcagacaccaaactatgctatgcaatgaattcattttaagaattttagcacatctaaaattttatatactcgaaaagtcttcatatagaaaaatgtgaggtttagttaacatttataatgattttttaaattgtagtttctgggagaactttgtacaaggatctattattgcatttaagtagtgtcttaaggtctaatttttatggtctattaagcataactctcaagcaccttaaacacaactaaatgaggtggaattactgttaacttgtattttaggttaccaagtgcccaggcaattccaaccaactatatccggaatggtattttatgacagctcatgactttctacattgagcttccttgacttaaaatttttacgagattgaaaactggcctctgagatggtgactaaaagttgggtcattagtactcaccttttaagaaataatgtctcagcaggctgtatttgaaccacttgagctcaaggaggtgttaacagagttgttaattaacccaggtctggaacctattgtgaagaattccagaaagctggaacaatagtgaggtagtgcttaacccacagtagggaagaaatgacttttgcttcaataatacagtcaaaaactttcataataaagatattaagtcaaaaaaagaatggcaacctgaaactaatggtcagaaattaggggcaaacttacactgccttcaagaaaaccagctggagtagaaatggacagagttggacagagtatcagtctttttggaacaatctccacctctgcacatgcatatgaatgcacagtaaaagaaacagcaaaatggcatctcttatatactcacgcctttgatcagatcaaggctttgcttaaatcatccaagatttaagaatccacaaggatagagatttcatggcttttcttggtaagcttcttctaatgcttaattatccacttagagttcggaagatcttaaggtgaaaataatctctacttggtttcacaataaacctcgctgggctatggaatcagaacactgactagcataaacaaatggaaacaagtaaatcaacaaaaaatctctccacttcttggactaaagttactaaatactcctcaattagagttagtcactcagtccggtctgattctttgcaaccccatggatggtagctcatcaggctcctctgtccatggaattctccaggcaagaatactggagtggctagccattcccctctccaaggcatcatcccctgcgatctaactatgtaatgagagagataaatgatgaagattacaaacatatgaatataaagtttagatgctatataaaaacgtgtaaaaattaatgtgactcataggctaagatgaatctttaaatgataaatcatgctcattagagcttttaaaccagagagtttataacatgcattaattattgcacttatccattgtacttggacatacattttaagcagtttgagtaagtgcttatagtcagtatttattagaatcaaaataaattttgatttttcttttttcactttatttcctcaataatggtcaactatgatagttaagagtttttcctagaaacaagcttatttataaaccaccatacggttgcaaagagttggacataactgaagcaacttagcatgcatgtacacatgtaccaataaatcacactctcaatttcattcatcaatgttgatggttctgcaaacacctatcactcccacccaaggtgctcactgctaaagagtctcaggtactagaaactctgagccaaaggttaggaactgcctagtaatggcaggtgggaattacgtgaggtggagtggcagaagagcccctatattttttctttttggctgcatgtgggatcttagttcctggaccatgaatcaaatcctagacccttgcattggaggcatggagtcttaatcactggaccaccagagaagttccaaaggggactcccacattaaaggtaggaatccctagaccctggtaagagaagatggcacagaaggaagagaaaatagaatggctgtccatcttcaacatctggatgtctgcaggggacacaaactgtgagaaaacggggtttaataaagacgagaaagatagaaagagatagaaaggagagccatgagataccctctggtctaacaccccttaagcagaaaagtttcaaggatagatcttgtgtaatattatttccagggaaagaataatatcccttcaaggtgtttgggattaacatatacacactagtatatacaaaataaataaccaacaaggacctactgtataggtagggaactatataggtaggtagggtccagggaactatctcaatgttccataataactataaggaaaaagaataggaaaaagaattttatatatatatatatatgaatcactctgctgtatacctgaaactaacacaacattgtaaaccagctataattaaataatacattttaaaaaatgaagaagaatatccctttgcctttcaaacatctctgtcctcaagttcattactacacagatcttatttggaagtggtaattgctttaattctgttggagaagtagaaggcttaaacttggatttatttgagagaatcaataaacatatgaaaatgtgtttttagacacagtataaaagatgactacaaactggcatcatcttggaggaagattctagactttcttggaagataacaaaaagatgagaccagggatggtaaatgtaaattgactctatatttatcagctgctactgctaagtcgcttcagtcgtgtccgactctgtgcgaccccatagatggcagcccatcaggctccacagtccctgggattctccaggcaagaacactggagtgggttgccatttccttctccagtgcatgaacgtgaaagtgaaaatgaagttgctcagtcgtgtccaactcttagcgaccccatggactgcagcctaccaggctcctccgcccatggggttttccaggcaagaggactggagtggggtgccattgccttatttatctgagcctctacaaataaacagtataggaattgatgattcaaaatttgttactatagcatccttgagaaaaaccaatatgtctagttttatcacaggtttcagacttgctggcttgcacctgattaattcctgttcacacattctagtatggtgtatatttggaagattgtgagcaaatcttatgtacaagttccttgcttagaacctgcaaaatattgttcacatattatctcatttgatgttcacaaaaagtcaataagaaagttaaggaagacattaatttcttctaataaatctgattctctggacttttacatgtcttcctaatactcctagtatcctcagcggtattctgtagtatttgttttgtcaactagacattcctatatctaatgcagccttaattactgtcctctaggtaaagctgcttcctttcttctgacttcatacttcctataatctccaggaggctatccctataaatactaagaatgtaattgggtgttctggaccagaaactagtcatactttctttgtagcactagtgggatggtgtcttactcattcatgatggtatctattaaaacaaaatactcttgtaaagcatctcaatgtgttttcattgaactactggctgtcttccagagtagacccactccaagaaagcattctaaaaatcttgattttatttgtaagtaagttttctctaaatgacctttcaattttagagtattctatccagtgatattagtactaaacagcccaaacaagacaactcagtacaaatattcccaaatggtctattgtagcatatttccctccatatctttttgagtacagagtcaaagcggtgactttcaaaatcaggctagaaagcagtcaaaaaggagatatttgctgctaagtctcatttaaaagtcaagggtttttatctgtgaagcactctaaaattaatttcaaatgatttttcagcctggatattaaagcacttttgcttctattttaaacacacgtattgttgaaaatagtcaatttcatctcttcagatccaagattttctttttataatgtcccctttgaaaagtgaaagtgttagttgctcagtcattttcgattctttgccacccatggagtgtagcctttctcaatttggaaccagtcagatgctccatgtctgattctaactattgcttcttgacctgcacacagatttctcagaaggcaggtaaggtggtctggtattcccatctcttccagaattttccagtttgttgtgatccacacagtcaaaggctttggagtagtcaataaagcaaaagtagatattcttctggaattctcttgctctttctatgatccaacagatgttggcaatttaatatctggttcccctgatttcctaaatccagcttgaacatctggaaattcttggctcacgtactcttgaagcctagcttggagaactttgagcactactttgctagcataggagatgagtgcaactgcgtggtagtttgaatagtctttggccttgcattctttgggattggaatgaaaactgaccttttccaatcctgtggctactgctgagttctccaaatttgctggcatattgagtgcagcactttcacagcatcatttttgggacttgaaatagctcagctggaattccatcactgccactagctttgtttagtgatgcttcctaaggcccacttgactttggactccaggatatctgtctctaggtgagtgatcacatcaacatggttatctaggtcattaagatcttttttgtatagttgtgtgtattcttgccacctcttcttaatatcttttgcttctgttaggtccataccatttctgtcctttattgtgatcatctttgcatgagatgctcccttggtatctctaattttctcaaagagatctctagtctttcctatgttattgttttcctctatttctttccattgatcattgaggaaggctttcttatctctccttgctattctttggaactctgcattcaaatgggtaaatatttccttttctcttttgccttgcacgtctcttcttttctcagatttctgagaaatctgtatgcaggtcaagaagcaacagttagaactgggcatggaacaacagactggttccaaataggaaaaggagtatgtcaaggctgtatattgtcaccctgcttatttaacttatatttagagtatatcatgtgaaatgctgggctgaatgaagcacaagctggaatcaagattgttgggagaaatatcaataacctcaggtatgcagatgacaccaccgttatggcagaaagcgaagaggaactgaacagcctcttgatgaaagtgaaagaagagagtgaaaaggctaaattaaaagtcaacattcaaaaaactaagattgtggcatccagtcccaacacttcatggcaaatacatgcaacatcaatggaaacagagacagactttattttctcgggctccaaaatcactgcagatggtgactgcagccatgaaattaaaagatgcttgctccttggaagaaaagctataaccaacctggacagcatattaaaaagcagagacattactttgccaacaaaagtccgtcttgtcaaagctatggtttttccagtagtcatgtatggatgtgagagctggactattaagaaagctgagcacagaggaatcgatacttttgaactgtggtgttggagaagactcttgagtcccttggactgcaaggagatccaacctgtcaatcctaaaggaaatcagtcctgaatattccttggaaggactgatgctgaagctaaagctccaatactttgaccacctgatatgaagaactgacttacttgaaaagaccctgatgctgggaaggattgaaggcaggaggaggaggggacaacagaggatgagatggttggatggcatgtccactgactcgatggacatgagtttgaggaagctcttggaggtggtgatgaacatggaagcctggcatgctacagtccatggggttgcaaagagttggacacaactgagctactgaactgaactgaactggactatagccctccaggctattctgtccatggaattctccaggcaaaaacactggattgggtagacaatcccttctccaggggaatcttcccaactcaaggattgaacccaggtctcccacactgcaggcagattctttgacatttgagccatcagggaagcctgtcccctttataatacagaaataaaatcacatataacattatctatctacacacaggaattaaacaaataaatataatggcttaaacatacaaggaaagagaaaacaaaaggaatgtaaaataaaataatacatatttcactttggagaatctgaggcatggccacatgtgtaatgaaggaggcatgtgcttgcagccatatgtagcatcattgtggactgacaagcacaaaggcaccctcttataagtgctttgcatggccagcaatatttcatgaggaggcttattagtgacatagtttttcaaaatggtaaaatgtacagtggcaacaccagttataatagacaagctttgaaaagctgactttcagctctcagatatgcagcagaatctttcccatattgcagtgatccagtggacctaactcacacatgtgaaatgtcttcagaaatctatcaccatgatcatcaccatcttcacaaattttcaaaacacccctgggataatactgttgttgtgctgcttagtcactaagtttttagtcgcaaagactcaaagacgcatgtccaactctttgtgactccatctactgtagcctcctggctcctctgtccatagaattctccaggcaataatagtggagtgggtagccatccccttctctgtggtatcttaccgacccagggaacaaacctgtgtcttctgtttggcaggtattctttgcctggagccacttgggaagcctgaacccttgcttaaccctcggaactcaacccaggcttcctactgaaagccaggcttactttgaactgcccatgatcctttctgagtcagaaaagcctcccctagctcccaggactcaggggattaaagtcctctctttatacacctctttcacagcagacttccctggtggctcagatggtaaagcgtctgcctgcaatatgggagacccaggtttgatccctgggttgggaagatctcctggagaaggaaatggcaacccactccagtattcttgcctgaagaatcccagggatggaggagcctggtaggctacattccatggggttgcaaagagtcagacatgactgagtgacttcacttcactttacttcatagcacaggcctcagtttattagatatgtgatttgaaagtgctgatctctactttcaagctgtaagctccatgaaggcaagtcagaatctgtctgtttgactctgtatctattgtgccaaaactgtcgtcagcacatggcaggtgttcaatgataaaggaatgttaaagaaatggataaatgaatttgcaaccactcaaaagtttgaagtcctgacatattgattcactgggtaatgtgttaagatactgatctctgaatatgtttatttatatattggctgaactttaggtgcatctttagaaataataaaaataagaaagagctcttaggagaaactataaaaaccagtcaaaataaagcagttgttccttatgtaatgaactcaatatgtattgtagaatacagcctaaaaacatacgatttttagattcttattagtgaactgggtgattgtttgaattaccaaagaattgccgaaagaatattttcaaggtacttaatgaatatttatggtttctgtaactaaaaatatcttaacaacataacttttaacatatcttaaaaataaagatcactttgtcacattcccacattaatacaatagtttcaaactatctttcatggagaatatttctttattcaaatcctatttcatttctgaagaggtttgaggtctatattgtaagtgactcattcctatccttggtaaacactgaataagttcttttcatttttatctaggaattgaataaaattaacaaaatgagagccccaaatggaggctgaaatatctaaacattataatgatgactttaactatccaaacgtctttccaaaccaaaatttagccaaatgtacaatcatcatttcagtttttccaaatggctgcagttccctctcttagaatgagtgagtgagtgagtgaagtcgctctgtgaccccatggactgtagcccactaggctcctccatccatggaattttctaggcaagaatactggagtggtttgccatttccttctccaggggatcttcccgaccaggggttcgaaccagggtctcccacattgcaggcagatgctttactgtctgagccaccaaggaatcccttagaataatggagtgctcaaatctttgatagttaattgtacaggattactgtctggcaatcgaccaactccctggcgtgggggcacatcattttatttaatggttcatcaccaagaccttactagcacaaaggacaacacagatcactgcagaatcatgacaagaaagtcacagactgagtcagcccatcccacctcagagaaagaggtttcacttaataaactacccaggtaaatggtaaccaacatgagtagctattaactccaagagctgattaagtaaaagaccaaatgggcaaatattttttttttaccttcactaataaacttaatatattacctagttcaacatttctctaaaatacagtaatacagaaataacatctacagtggggcaaaacacaatatcagataaaaaggataatgacatttaaggtctgagagcttcacattttccatcaaaattgaactttaaaattttccctaagtcaaaaacagtcatttttgaaaaatgttttgttttgtggaaaatatttaactcacaaatcagcactgtacaactgaaaattttattttttaaagttatcttcaaaatatatgcccagtgtatttcacatggaagcctggatggctcatgtttaggagaagcagttgtttaaagaaaaggtaccacaggcctcatatcaaactctgttgagctcaaaagttataaaaattattaaaatagcatttacctaaaaaccaacatggatgacagggacatacttgtccttacgcttgatatcaagacagtaaaaatatcatttgtctcttttaaatttacaaatcatttaaacattttgtaccatgttttcatagtgcgggcggctgcgactggcacacatagggcggccaagaggagctaccacacgtctgaggtcagggacagaagccaggaggacccaagtccaggggcagcagccaagaggagttaccccacatccgaggtcaggggcagcagctgagagtgccaggctgcgacgacacaggaacggccaagaggagctaccccgcatctgaggtcggggcagtggccgggtggagctaccctgtgtccgagatcaggggtggcggccgggaggaggtaccccatgtccaaggagcagtggctgcgcacgggcccaggagggcctagaggagctattccacattcaaggtcaggaggcgggtggtgaggagatacccctcgtccaaggtaaggagcagtggctgtgctttcctggagcagccgtgaagagataccccacatccaaggtaagagaaacccaagtaagatggtaggtcttccaagagggcatcagagggcagacacactgaaaccatactcacggaaaactagtcaatctaatcacactaggaccacagccttgtctaactcaatgaaacaaagccatgcacgtggggccacccaagatgggcgggtcatgggggagaggtctgacagaatgtggtccactggagaagggaatggcaaaccactttagtattcttgccttgagaaccccatgaacagcatgaaaaggcaaaatgataggatactgaaagaggaactccccaggtcagtaggtgcccaatatgctactagagatcagtggagaaataactccagaaagaatgaagggatggaaccaaagcaaaaacaatacccagttgtggatgtgactggtgataaaagcaaggtccgatgctgtaaagagcagtattgcataggaacctggaatgtcaggtccatgaatcaaggcaaactggaagtggtcaaataggagatggcaagggtgaacattgacattctaggaatcagggaactaaaatggactggaatgggtgaatttaactcagatgaccattatatctactactgtggacaggaatccctcagaagaaatggagtagccatcatggtcaacaaaagagtccaaaatgcagtacttagatgcaatctcaaaaacaacaggatgatctctgttcatttccaagacaaaccattcaatatcatgataatccaagtctatgccccaaccagtaatgctgaagaagctgaggttgaacggttctatgaaggcctacaagaccttttagaactaacaccccaaaaagatgtctttttcattatagggtgaagtgaagcgaagtcgctcagtcgtgtctgactctttgcgacccgtgaactgtagcccaccaagctcctctgtccatgggattctccaggcaagaatactggagtgggttgccatattatagggtactggaatgcaaaagtaggtagtcaagaaacacctggaataacaggcaaatttgaccttggaatacggagtgaagcagggcaaagactaatagagttttaccaagaaaatgcactggtcatagcaaacaccctcttccaacaacacaagagaagactctacacatggacatcgccagatggtcaacactgaaatcagactgattatattctttgcacccaaagatggagaagctctatatggtcagcaaaaacaagcccaggagctgacagtggctcagatcatgaactccttattaccaaattcagacttaaattgaagaaagtagggaaaacctctagaccattcaggtatgacctaaatcaaatcccttatcattatacagtggaagtgagaaatagatttaagggactagatctgatatatggagtacctgatgaactatggactgaggttcgtgacattgtacaggagacagggatcaacactatcctcatggaaaagaaatgcaaaaaagcaaaatggcagtctggggaggccttacaaatagctgtgaaaagaaaagaagcgaaaagcaaaggagaaaaggaaagatataagcatctgaatgcagagttccaaagaatagcaagaagagataagaaagccttcctcagcaatcagtgcaaagaaatagaggaaaacaacagaatgggaaagactaaagatctcttcaaaaaaattagacataccaagggaacatttcatgcaaagatgggctcgataaaggacagaaacggtatggacctaacagaagcagaagatattaagaagaggtgtcaagaatacacagaagaattatacaaaaaagatcttcacgaccaagataatcacaatggtgtgatcactcacctagagccagacatcctggaatgtgaagtcaagtgggccttagaaagcatcattacgaacaacgctagtggaggtgatggaattccagtggagctgtttcaaaccctgaatgatgatgctgtgaaagtgctgcactcaatatgccaacaaatttggaaaactcagcagtggccacaggattggaaaaagtcagtcttcatcctgatcccaaagaaaggcaaagccaaagaatgctcaaactaccacacaattgcactcctctcacatgctagtaaagtaatgctcaaaattctccaagccaggcttcagcaatacgtgaaccgtgaacttcctgatgatcaagctggttttagaaaaggcagaggaaccagagatcaaattgccaacatccgctggatcatggaaaaagcaagagagttccagaaaaacatctatttctgctttattgactatgccaaagcctttgactgtgtggaacacaataaactgtggaaaattctgagagagatgggaataccagaccatctgatctgcctcttgagaaatctgtatgcaggtcaggaagcaacagttagaactggacatggacaaacacactggttccatatagcaaaaggagtacatcaaggctgtatattgtcaccctgcttatttaacttatatgcagagtacatcatgagaaacgctgggctggaagaagcacaagctggaatcaagattgccgggagaaatctcaataacctcagatatgcagatgacactatccttgtggcagaaagtgaagaggaactaaaagcctcttgagaaagtgaaagaggagagtgaaaaaactggcttaaagctcaacattcagaaaacgaagatcatgcatccggtcccatcactccatgggaaatagatggggaaacagtagaaacagtgtcagactttaattttttgggctccaaaatcactacagatggtgactgcagccatgaaattaaaagacgcttactccttggaaggaaagttatgaccaacctagatagtatattcaaaagcagagacattactttgcagactaaggtccgtctagtcaaggctatgatttttccagtagtcatgtatggatgtgagagttggactgtgaagaaggctgagcgctgaagaattgatgcttttgaactgtggagttggagaagactcttgagagtcccttggactgcaaggagatctaactagtccattctgaaggagatcagccctgggatttctttggaaggaatgatgctaaagctgaaactccagtactttggccactttatgcgaagagttgactcattggaaaagggattaggggcaggaggagaaggggacgacagaggatgagatggctggatggcatcactgacgcgatggatgtgagtctgagtgaactccaggagttggtgatggacagggaggcctggcgtgctgcaattcatggggttgcaaagagtcggacatgactgagtgactgaactgaactgaactgaaccatgtcttcctagcttccctggtggctcagagggtaaagtgtctgcctacaatgcctgagacccaggttcgatccctgggtggggaagatcccctgaagaaggagatggcaacccactccagtactcttgcctggaaaaccccaaggactgagaagcctggtaggctacagtctatggagtcccaaagagtcggacacgactgagcaactacacttcccttttctacttggtaatttctcaatcaccttttaagactaagacccaaatgtgtcatccctcgagttcctctgaaggctctgcgaccatctctgtactcagtgctcctagaaagcacttttcttacccattatctccactccaatcatcgtttccaaacagctgcagttcccgtgttgtgctgtcatttacttgtttaaatgcgtgtttcttcatcagaactccacgaatgaagggactacattccctcctttgcatcttcagcattcgagatagtttctggcacataacaagggctgaatgtatttgttttaaatgagtgatgttttacaggcaaactatgtcccttgactatgatagtaaacttcatgaatgaaaataccggggtcagcatctaaaatgaactgatgtctctgatgccagtcagaagtccctggtccttcgtcacctgcccactcagggtggtccctctagtgaaccctctggctacacagactccctttgccacgcacctcaatgttccacccctggcgtctcgtctttaatctcacctgtctctggggcttctcacatcctgtctgctccaattagaagacacaggcatcgtgcctctcctgtgaatcagatctgtattctaagccaagctctgctcagttatctgtatgtgctttagctaaaatgtccctctctgaaccaacagacaaggaggagaggttagggcgggggaggtcatgagtgtagagtcagacagacatgggcgcaagcctttcatgcctttaaacatatcaaagagcccttaagttcatgtccaatttgtaaaatcaccataacgatctattaatagtttcatcaggttgtggtgaagagcaaacaaaaccatcacagatttagaaactcggaagtgcttaaagacctctgatcttctgtagagagtccatacattaatgtagtgaccactgtcccatagcgatattcctctgtattcttccggaatgcaaatctgactctaccagccccctccaacacacacttcctcttaaaagcctccaatggttgcccatcatgctcagaataaagccttccattaaactcctggtgaatacatctccagagatttgccttctcaaatgatgtctgaccagcctcaaggaactaattccaagtccccaattaccccccttctctcatggctgcacatatactaactcttttccctgacactcactccccaaccccagtacgtctgcatacctctttcatagctcttgccacgctgtactgcaatttttttttgaggggaggctctggcttccacttcagactgtgagaacagaggtggttgtgtatgctgttgtatcgttggtgcccagactgttgcctcttgtgtgtaatgtcattgaataaggtttgcaggagggataaattactgcctggaaacccctgcttgacagctcttcgtgttcctgagttaagagttggccataatgtgtattgattaagtatggttatctcatggtaaattccttcatcattattgaaaaaataagccaagctgtggtcaattaagtaaatgcagaggaaaatatgatattaatttggggatatataatagacataataaccatttttttttaaatttggcaatttataccctgcctcttttcataaaggatacaagaaagcatatttgttgagtgaaaaaaagaaaaggagatcagaaataagcatgcggtgaggacctatacagttgctatagctgaacagtaaatctgaatctgggcttcctggaagcaaaacaacattcatagtaatacatactccagttttgatgtggcaagtaagagggtggagatagcatagaggaatggtttgaaatgcaagcaatttgaccgtttaaaaaaatgttaatagatgttatagtgatatgcatgcatggaattaaaatgaacacaaattaagaataaatattttgtaaggcacttatttttagaaattttattaataatcaacaagagctacattgttgcatctgccatgtaggagcctctctctacccacccacccattccaactccaatcctggccctttctggtttttgctcctgaaatcagataaataacctagtaatgaaaatgtgggttgagcagaggtggaactatgtgatgctttacattttgagaagtgaaatcattcaagagtcaggtggtggagatactatacaaattactctataatataaaataataatttatgatttaaatgaagaacattaaattctcatggatctcaggctgttcattaagacaaataaaataagtaaaagaagaaaatgacatgacatccttccacattggccttcaaagaaacaatgccacaactgcacattaagacaatcacacctaaatgaacatacaccaagaaagtaaaattcttctttgaaatgatttgacattgatacaccttctagcagactaacttaatcctgataatgacaccgaactcataagaagtaaactgatggaaataacattagggtgtggcctctgaaggctggaacagtgctgtgaggtcaagtgacagagagaagagaatgagctgtgtcccacctgttgttgttcagtgactaagtcatgtccaactctttgcaaccccatggactgcaacatgccaggcttccctgtccttcaccatctcccggagcttgctcagatttatgtctattgagttggtgatgctatctaaccatctcatcctctgccatccccttcttcttttgacttcagtctttcccagcatcagggtcttttccactactagcccacaaaagtgaggttattaataatgctaagcttaacctcagactctctagggtccagtttatctatgcaataaatgacacttgctcaaagacagactaaaggtgcaacggctctttactgatgattaaaagcaaacttaactaataacaagtaacaacagactatttctacatactttccttcaaacaatttgtataatgctttgtgttacttaatagaatgctaaacaaatgcacaaatactaggtttaactttcaataaataagtttgcatgtaatccattttgtaacgtattgagtataatgtttaaccaagattttatattctctatggcagtctgctcttctttataacccatgttaatgaagacttgactgaaaggcaaaagggggaaagcaatatgagtttctcaggaaaaggaaaatatgtcctaatacttagatctaaaaaggtagaaatgactaaagactaatgattcatataggtaacaactaaaacacccctgcataaaaataccccataattaaattacaagcaagcaaaaaaaaaaaaaaaaaacctgggaaaatatttacaacatatactataaagggctagtattcttaatatacaaagagctctaaaacatcaataaggaaaaaaaaaaaaacctgaacacctaaatgaaaaagtgtgcaaagtatatcagcatacaattaactaaagaatataaagaaaatctgacctcactattattaaaagtaaaatagcaataatatcttcatttattattaggaaatttttaaaagaataataacccacaactgttggttagggtatgaacattctccaaaattgcttgtgcaatattaatagacccaacctacctggagggcaatttggaaatatgtgtttaaaaatgcatgccatataatgaagcaattctcatcccagaagtttatcataaaacaatcaggaaagtatgtaaagaaatataaacaagtatgtccctaagactaactgttcacatttcctaaatgccttaatcctaatggcattttactgatgcaaaaataagtgacttatgtaggtgaaataatttttcaaagatacaatgagcacagccaaaaatcaataacaatatatcaaaaattcaaagccttaaccaccatcttatagaatgatgttttttattttatttttttttactaaaaaatatgctagatagaaacagaaactaggagtgacgagggcaaagaattgaagatccagagacataaagaggaacaggaaacaagacagacagaaacgaagaaagagaactggaaaagcaaaaaacataggtagaaagagacatgactgagagaagcagcacattttgagattattaatagtgtatcttatttttcttttggctatctctttcttattagtttttgaaacaagtattactaatgtaatacaaatatttttaagaataactgaactgctaatggaggcaggaacacagagttatctaattgggtatatgcctggtagcactactaaagcaaataggttaggaggtttcataaggttgagtcttacaccaaaggcagagggtaacattccaaactgtaaaccaggtaagggagaacaagataaaagataaaagaaaatgttagtctaccttaattccaaagaaggccccaagtgtggttattctacgttgttaatctggggacacacacatagtttatgtcaataaagaaaaagaccaatatcattcctaatggaatctatagcccgtgtttgcaaccctaaagaatgtacatgtgggcatgtaatcactcacatgcacatgtgtgcatgcacacacataccacacgaaaatgaaaataaacccagaaaccttttcaagtggctaggacaatgctaaatggagaagcactaccagtagcagatcaactatgttaattaaggatgcaaagaattatatatgttgctgtagaggcttcactttcttagattacactgcctaaggtttgcagctaaagtaaggtaaaaaactgtttctgccaaaattgtctgaaaccacatatttttaaacagcaaaagatgaaaaatatatgtattcctacacacagtgtttttcattcttttaagtcattgccaaattttgtttaaaaccataatctagagccatactaaatatgactaaatatttatgaatgaaccaacatctttctttcacttgtcttcatgaaggtagttgaaaattctgaataacactgtcaaaactctaagcttcacagaaatttccccaaattgattctgaatgtccagaaaggattgcaggggaggctggaatcagtttgagtatccttttcttaagaattagtttctctctagggacttccctagtggtccagtggttaagacttgaccttccaatacaggggaagtgggttcaaaccctgattgagagctaagaccccacatgcctcaccgccaaaaagtcaaaacataaatcagaagcaataatgtaacaaattcagtgaaggtactttagaaatggtccacattaaaaaaaaaaaatcttaaaaaaaggaattaatttgtttctagtaataataatctgtttttataccagggtgatgcatatgcataatatccatactgttaacaaccaccttaggttacccatcacttgtaatgaccactcctgatgaactcagttctctaaatgctcatcatcagagatagagcagtatgttagaaatgcaaaagatagttaagactttatttcctaagtcaatattctgacctgcatgaagcataaagagaataatattatacataaacacacaaaaacaccaaagacaccaaagacacaaatttatggccaaagtgttcacctagcagcaggtggcaaattacagttttatcttgccttctttgccacctactccccctaaaattagttccaaaggttctgctaaaagccaagtaagaaagcaaatagttttcgtatggtttaactgaacctataccagagacaaaaataaagatggcaaataggtttcaatctacctgccccttctaatcaactggtaagcattgccaagaacactgtgtcaagaaggattctgggtggctttactaattactgatgtcttttgtataaactcaagggagatcgtggagaataccatttaattctcttcttttcttttgtgtctaatatattatacttccactgataattggacttattgtcaaacctcatcctattttcatgtaaatataaaacaactagataggtcagatttttttggcaaatattaattaacatagactttagttaggttgagatgccctctcagcaagatgtgatagatggaaagatttaacaagatagtgaacagagataagaatatacattgcaccaatgcatgtgagtcagaggaacagatctgctgtgaatcccaagggcctctaagaaacattgcaaagaggaaaccagaaattccatatttaagcttcatgtagaaaattgatgatatagagaaaaagtacataggcctacaaatcaatacaaactggttaccccttcttgttaacagtttgggtcttatcagcttctgtgctattaaaaaattgtgagaaaaattattttaaaagataacaaacatttcactgtctgaaatactatgtattattttgttatttttatcatttatcttcaaaataatgttttgaaaggttcagatgagtgtttatagtaaaggactgaaaaggcaacgtttagattctgatttgaacctcagctctgccactgatttttttcattcactactttttatatttgacaaagacttgttaattactatatgtaatgggaaaacacaacaaatcaaaacagttcacagaatttgcaataggaaatagagcaggaaattaaaaagtggaaaatattacaaggatgcattttagaagcagaaagacaagagtgaacacagctagcaactgaatttcttcatatatactgtacatcctgcttctttgcatagttatttcaaggctacaagatcacatagaatttcttttactgtaaatacactaatttacttcttctcccattaaggctgaaaagaacaacagtctggcattttaagtccaggttacgtccctttggtgtcaaatttttcatttcaatcatccaacggcattgttaagcattcacaaaacaaatatgtctttacataaagtcaatatggttttagagcatccctcctagacataaatgcagaaattctccttgaactgtagacatcctcagggaaaactttctgataaccacaagcgtccaagaccctaatcttggttaatcactaacaggttagcatctctgaaaacagcacagcctaagagcagaagaatgtgtggtctggttctcatagaattttaaacctaggacaaaacatagggatttagaaggttatttttttaaaatctgaattaataacacattatcagtttggtacaaaaatatgaacagcaattatcaagcttccagatatgcaatatagctcagaaataggatgtgcttgctactgattctgtagagaaagaatatagaatttttagcacaagcaaccttttgcaatataataaacaatctaccaaatgatcttaaaacactgaaaaatcttatgctattttatttgtactgaattatcaattagctcaataaatcctattctatcctcaaagtaccaataataagatatacaacatgtattgagtaaaaatggaaaataattgtatagcataacatttatatcataatacactttatttcatttatctacattaaaagcattgtaaaaattcaaaataggcttctctctgctctcagctctaagattttgggctgaagaaatgactaacccaggaacttctaccaagttcataaagaatcatgacttttccattctcttcattatagatgaataggtagctagtcaactaacccaaaattctgggcacagaatgccacctaaagcatctcaccgagaaaaatggccctaaagtaatgaggactgagagataccattctttgaaggaaactttaagagctttggaccttggacaagtcacttggttctacacagaatggtgatactcacctagaaattgaaaagcaatcaactaggtaagatcagttacagaaaaaacaacctttcgctagacaattgagatcagaagacttcaaactagcactttatgaaatgtctacattaaattgaagaaaatcataagtaacagaaaatgtcacagcacatacagatggtcacctgtagcggattcatgtcaatgtagggcaaaaccaatacagtgttgtaaagtaaaaaaaaataaaataataataataataataaaaataaatagacatcaccagaagaaagtaaaaaaaaaaaaaaagatattttgatctcccacgttttaagaagagaaaattcaagtgttcaccttagaaagggcaaaatattatgttcaccagttaaattataaacttcatgtgagaaaaaaaaaaagtctaaactaaatagtcaagggagacaacagtccagaattgaactgagtagacatggcatcaattttaaaggaagcctgaaactcttgaatttagctgttcattccaaagtcttcctttaagtactattcattttgctaagtttttttttcgcctagattataatagaagacagcaatctgtcaggtttaactcataatacagatgtgaagtattactattttattgattaataactgatcattctagtcaaaataaattaatttagctttagatttctaatcaaaaatgcttacatgaatgaagaaatagattaaaactttaaacaaggtggcaacaatcgtataaagtaggcaggagaaaaaacaaatagttaagttgagagactgacttggaggcttttagtatggtctaagtttgaggtaataagtaaattcaacaaaaaaaaagacaagacataactacttagaaaagatgctaagtacaaaattgcaaagtttggcagttggttgggtggaaacacatgacaggagtaaaaagaaaatttcagagttcagcaagaggaagaatagacattgcgctaacaaaacataagacaataggagtagttggttgaataacaaaaaaactaaagagtacgtggccatctgtaaggaaatgtaacctagaattcaaaagcgtgcttacataacagagaaggacttgtagattacaaacatcatgtgaatagataagatgataaaaagtttaaaaattacagtaagaccattgatggaattttgaaaaaaagtgatgtttgaaagtgatggaaggaattttattcattctttgtttctattactgtgttaagtatcatctaagtactgaaaacttaaaaactaagaaagagaggcgtgatggatatttgaagaccaaaagaaccatgttttcctttgtaatacttacaagtatatattcctcctgcaaatatctcttgagaaccaactccttgaaaggaatttaccaaatgctaaaaaaattgttattcttggtttcagaagctaccgtaatatagtaatcatttttccttggaaaatacagtgaattacaaaacaaatgaaaaatctacaagtacctaattcagtgcatgtgtgaagttctgacaagactgttaaaaaataaaagtcaagggttttgttatataccatgccataattaggtgaaatcaccattgttgtgtaaacagagtccactcacagttaactgaaagtccatccatttagtgagatgacactcaagcagtgcgaaaatcagttggggtgaaatgattaaaggcaacaactgcctctctttttgacattgaattctgctggtctcctgaatggttttttagtcttcatttccctctcaaactttacattatcacattttacagtaaagatcctttcattttctagcatatgacaagaaaatgttattcctagacacgtaagaaaataattttaaaaactggtatttattttacatagtttgaacagaaaaatacagagaatgtgttattcaaaacagaatggtccagagcttactttttcttttttaagcataaagtgaatgaaacctttcatatcaaaagaatgaaattttgaaaatgataattaagggtggattctgctttcattttctgcttagaatatctatcacaaaagcagaaaaaagaggtctacttttaaaaacaatttatacatcaaataacattactttgattgtaggcaggttaaaaaattctgtgagaagtgacaccttacaaagacatgttaccagaaattgccgcctcacctaaagaaataaatgtttaacgctgaacactagcaatgctgtactttacctattgtcaaaggctcctactcactttaacgctcagatcagcccactacattaaatgaaacttccttattaaaaaaaaaattgccttatataattcaatgttctttgaatactatgttatcccaaagctgcaaaaaactattactactttaatcattaagaaaacttcctcttatctatacaccatgactttcaccaaagtcataagcttgtccgtgcatattacttaagtcttactatcaaatgctctaattaatggtctttaacactgactctgctatggactccaaaatgtaccctgaggttactaccattagggggaaaaattaagatttaaatgtatatctatctatcccttagaatattttatgtagcaaaattcagaaactgacttttcaacctttcctttattccagggctttaaaaggagaaaaaaatgaagaaagaaagaaatatagcagcctaccccacaaaatgccactattcagtatgtcagtacaaatctcccatttgtaatcaatcacccaagaaaagaaaagaaaaactatagctacacatttatgtgttgctacaatttcattttatggacatttgcatgtacatttgcaaactgtggcccttactatgagcaaggagagaaagatctttcaactaatgttcatttttcccaatctcatcgaaagtcaagtgtttcctggatttccccgggggtctagtgtttaagaatctgccttgcaatgcaggggacacaggttccatccctggtaggtgaactaaggtcccgcatgtcctggagcaactaagccagcactgcaactacttcagcccgagagccacagtgaaagatcctgcacagcgcaacaaacatccttcgagccacaactaacacccaaggcagccaaacagataagtaatttttgtttttttttttaagtgtttccaagaaaggagagtcacagaccattccagactccaaacatgggtctgactgtggacttggtgccccagcagagctgactttacagctgagccttaaacgatgaatattatgtttcttaaggaaagatgaaagagcatttcggactgaagggacagtctgtgtaggagcaccatggctgaaagtccacatcctggtgtggagatggcccatactccagagtggagtgagcaaggattcctggactgacttggcatcagaaagagagtattttccccaaatcagatttctaggctcttatctagaaataggaactccattgtggagctttagcatctagatttttaaaaccctttagaaaagtacaggacacagagtgagtcttattcatcactggagtaagccttaggtggtatatacatcattagacatgactacacactttcagtagatgctttgccaacagcaaagaaacctacagaaagtatggcatgaattgtttttgctgtcatcaccactgtttttttaatggccaagaaaagccagaggaagggcatgggtactcacatttatactccttaaacaatgcaggagttaaaatatattcagccaccaaattttaataaaaggtctgagtcttttatcaaaccaacagtaatggggttcacttgatggactacagggctcaactgtctatctaacattccagaatgactctgatgcatcataataggcttggcctttagaagacactaaaataatgaggggcctccctggtggctcagaggaagagaatctatatgccaatgcagaaactgtgagttcaatccctgggttgggaagatcctgtggagaaggaaatgcaacccacctcagtattcttgtctggagaaccccatggacagaggatacagtctatggcattgctcttaagagtcccttggactgcaacaagatcaaaccagtcaatcccaaggaaataaaccctggatattccttagaaggactgctgctgaaggtccaatactttggctacctgatgagaagagccagctccctggaaaagaccctgatgctgggaaagagtgaaggtaaaagaaggaggaggcagcagaggatgagatggttagatagcaacaactcaatggacatgagtttgagcaaactccatgagatagaggaggacagaggagactggcatataatagtccacggcatcgcaaagagttggacatgacttagtgactaaacaacaagaaaatactgagtctctagatttaccagttccttaatacaactgatcattactgaaagcatttgcatgcagctatgttgacagtgtattaacagccaatgacatatttctaatgcctgcggagactccttcttctttaatatttcttactcagcactatttattaaaaacattctagatgaacagttaagatgaactatgacttaagttccttcatcaggtttcatctgatctgcacagattcttaccccaggacccatagttgggaattttaaagcagtttagaatttttgcatgaaactatgaattaatttggttgatcaccactgaattttatgtgttccaaaaaatatacctgacttaaaatggctttcataggtggcagtcatgttaatgcaaagtagaaacatcttagtggataccagagacagaccaggctgacagagaagtctgtctggcccaagtctaccatgcagtctgcagcccgatgtttggacatgcagcatagatttttgtcatggtaacttatcaggtactccctctagaaattcagagaaggatagaaccccattatgggtgcaaaacaccaccccacctccaagattcaatctaaaaacctaaaatcggtgaccactagcagcaagctccatgttttattttctttcaacttcctctctgtcttctgcatctcctttttcctattttgtggcattgcacgtacaagcaggaaaaacagaagatgtaaactgtttaaatgggaataaggtaaaagatcagaaaatgcaattcttacttaagtctttaaagaaatacccttctttgtaaagggtgcacatgggtatgtgcgtgttgtcagacacatggaatgggaaaaggaaatggctcgtaagatgtcaggcggtaatatgcctcaggaggtcaagctgggttgcctgacaagggccttttggtcactgccagatccgatttatcaggtcgctattgatggccacaccgaagaggcctgaaggaagtagagactattaaatcacttgtttacctcaagtgagcaccagtggtactcagtcaatgattttattgatccacaatactgttcaattaagtgtgtttattttgattctgcgattaacatgcatttgcagaaggaatactcacagtggaataaagtctaaaattatcccttctgctccctcacttcttccttgtgtcattttgagttaatggtttacacattaaatgaacagatatgatcatgtttaagggtagagttgagggcagctctcagaccttctgagatttcacttcctcagtgtagtcagtgaagagaagaacagagcaggagttagaaataaagcttaaggggtgggtgcctcccagacaacaggtaaagatctggttgcatggctgttgagaaaagagacaagattgattttgctgccaaaacatcatgattcaaatagctaaatcaacaggctaaagaaagaaaaaaatgaaagcagagtatatttagtcaaaccagggaggaaagccgtaactccaagcgtgtcgtggtgagaattggtgaggcttgttcacgtcaccaagtgaccgtaccaataacatccaaatgcttgccccttttcctaccagctcctaacacacaccatcttcattctctgcttattcctcttgtatattctatggtaacaaatatttgggacaaatattctaggcctatttatatggaagaaactttaactgtaatgcattgtgcctgactccatcaagcatctattcccacataatacaactgaagaagataatatttctgagattctatcaataactttgatgtcattggaagaagcttggacactatgaccaaaatacaaaggctgcagttttcacaaactattctgctcttgtcttcactagaagtgaagctgagaacacggtcatttctgaaataagagaaatgaaagaaagtcttgccttctcttgtccccaaaataagtccatctgaaataactgccttttagaaagaacgatataaggaacagaaagctctagaaataaaaacttttggattattttaaagtgtctccatttctatttatactgcaaagcccttccagattgcttacattgtccagaatgctactgccagggcacctgtcattgtccttaccctcatatatgaacttactttgttttctaccaccaaggacacacatatcttctgaatcttggcccacaaaagtacagattgaataactcatttcagttgtctgtttggttcatgagattttatatttggaaatactgatggagagtgggtttgccaggtggtgcttgccataaagaacccacctgccaatgaaggagatgtaaaagacgtgagttcgatacctgtctcgggtaggtactctagggcctggcaacccactccagtattcctgcctggagaatcccatggacagtggagcctggcaggctatggtccagagtgtcacaaaaagtaggacatgactgaagcaacttagcacgtacgcatgtaacgatgcagagtaaaaaatattatagaatctggacttggcctggctcttggccactgaaatgtggtcttcacaccttttgcctgagttgatattgagaagtaggggtttcaagttaggatttctctgtttactcttatttctgccccaatggagccacagttttaaagtcggtgaatttcacagaatttaaacacatagatctcattcatggaaacacagccacctctctctggcatctcttcatggcccaatttccctagagggtgatttatattccacttctggaattccatgcacatttggttttactgcacactctcctctcttagaaatttcatccaccctcattattctacctatgaattcaacggatatgattttcaaatctacattggcaatccctgatgtctactgtattacttcttctccttgatatcctataaaaaactcaaacacaagtgtattaaaaattgtactcagcacgctttttctttcaagtaattccccctcttctattatcaacttttgacacaaacatcctctaccaccctgtttcaaaaacagcttagtcacctgagagagtcttctactttctttatgtttaccactctgctaagcagctttcaagttctgtcagttctatttaggaaaaatcctttaaacacttacttcaagattctacatttactttactcgagtaaaaagtaatgatttgccttattttcctggagtgataagggtttatgtccttgatatttgggcttcccaggtggcgctagtggtaaagaacctgcctgccaatgcaggagacataagagacccaggtttgatccctaagtcaggaagatcccctggaggaggacatggcaacccactccaatattcttgcctggagaatcccatggacagaggagcatggtgggctacagtccatggaatagcatagagtcggacacgactgaagcaacttacttagcacacacacatgtccttgatactaatatcttccccaaccaatccatcttacactgttcctttctttcctcttttctctgtgatttcgttccctctttcctttcctttcttcctttctcctttttaaaagtattatttatttattaattgtatttagctgcacttgacctgcctcttgagaaacctatacacaggtcaggaagcaacagttagaactggacatggaacaacagtctggatccaaataggaaaaggagtacatcaaggctgtatattgtcaccctgcttatttaacttctatgcagagtatatcatgagaaacactgggctggaagaagcacaagctggaatcaagattgctgggagaaatatcaataacctcagatatgcagatgacactacccttatggcagaaagtgaagaggaacgaaaaagcctcttgatgaaagtgaaagtggagagtgaaaaagttggcttaaagctcaacatttagaaaacgaagatcatggcatctggtcccatcactttatggcaaatagatggggaaacagtggaaacagtgtcagactttattttggggggctccaaaatcactgtagatggtgattgcagccatgaaattaaaagacacttactccttggaaggaaagttatgaccaacctagatagcatattcaaaagcagagacattactttgcagactaaggtccgtctagtcaaggctatggtttttccagtagtcatgtatggatgtgagagttggactgtgaagaaggctgagcgctgaagaattgatgcttttgaactgtggtgttggagaagactcttgagagtctcttggactgcaaggagatccaaccagtccatcctaaaggagatcagtcctgggtgttcattggaaggactgatgctgaagctgaaactccaatactttggtcacctcatgagaagagttgactcattggaaaagactctgatgctgggagggattagggccaagaggagaaggggacgacagaggatgagatggctggatggcatcactgactcgatggacatgagcttgtgtgaactctgggagttagtgatggacaggggaggcctggcgtgctgtgattcatgggttcataaggagtcggacagggctgagtgaactgaactgagctgcgctgggtcttcgttgggcttcccaggtggctcagtggtaaagaatcgaccggccaatgcaggagatgtgagttcaatccctgggtcaggaagatcccctagagtaggaaatgacaacccattccagtattcttgcctggaaaattctgtaagcagaggagcctggcaagctaaagtccacggggtcacaaaagaatcagacatgacttagcgagtaaacaacaagggtggtaatgctgaggcacacaagatctttagttgtggcacatgggatctagctccctgagcagagatcgaatccaggctccctgcatcaggagcaaggagttagcccttggaccaccagaaaagtccgtttctctctccttttttacctacttcctttttagtttctctaacattaatatgcatgttcaatgtgccagacataggaatacaatgccaaataaaacaaacaggatcctttgcctcagaggcctactagacaaagctctcttactcacataatcaccttccagataactttctcctatccaaaactaagagaaatctccccaacaaattctgagaaaaggtctaactacttacctcaaattcagcaattcacttccaataccattacatttcaaaattaatcgaatcttaactaattcttgagatttaactatttcattgttgcaatacaagtagttttagattgaaccttataaatccattttgtttcaaaagagaagggaaagaaaataacatttaataattttagaacctgaattttttctcaaatagaggtcagaagctataaatataagagatactaaattcatatcacttatgaaagatactaaactcaaaatattaacttttaaattttattgtttttctcctaagcatttcatttaaccatgattggcaagaatgtctataagaaaatgaaattactcttgttctggtagctagcattcctcttcctggttacctccatcttggcatgtgtcaatcctacaaatcttctagggttcagttcaaaaatcatttccataatgcctttccagataacttgagtagaaagaattctctgttctctagcttgccccactaaatttccccatttcagttatgttattattgtatttttttttaaatcacagacttttaggcacacttaagaatggatacattcagtgggtacatggaaagaaattttgttttttgacttctaggtaatattccaaagtaaccatgaggctgttatattataatctcctacaagaaatgttatcacagtttatagttcttttcttggtattcccaaggtgcaagatgaatagaaagagacaaaaatcaatgctgaaggataatagtttctaaatttttgaaatttaagatgtacctaaggggatttccctggtggtctagtggtaaagaatctgccttgcaatgtagaggatgtggattcgacccttggtccaagaactaaaatcccacatgccagggagcaaataagcctgtgtgccatagctactgagcctatgccacacaactagagagaccaagtgccacaaggaaagattccacatgacacacggaagatcccacgtgtcacaattaccacccgatgcagcaaaatcaataaattaaaaaaaaaaagatggacctgaaaaaaaaaaggtataatcaaatctaacaggacagatcctattgcctatgacagagtgacaaggtcttgagagcctatactttagtctccgctgatctaaagattcagactgaggacgaccttcctaaatcatgatctctgtatgaactgccttacgtggttctataagaatttggttataagagaaataaatcttgttctgctgatccccttggatttttatttaagaaatatggataaactgtgactattagcaattaagtcaatcagtggcttttgtttaatgactacatttggaaagcatatttctgaacttataaagatccttgagatggcccctgcaacttcatcccacttagacaatccaaacttgctaaatgaccagaaaacattcagaacttcacccattccctgtcctgtgtctaaaagcaagtgaatgcacgtcacgtagggcttccccaatggctcagtggtcacgaatctgcctgcagtgtaggagactcaggttcgatccctgggtcaggaagatctctggaaaaggaaatggctacccaccccagtattcttgcctgggaaatcccatggacagaggtgtctagcagaccgtagtccatgcggtccaaaagagttggacatgacttagcaactaagctacaacaacataggttacttagctgatctggttagatcagcataactatggtgagagccatcagtagacacatccgtaaacccccagatcctggaaggcaaacagggaccaggggcaaggctgcctggatgtcctaaaacaatgcctcccaggaggtggtttttctttacctatccacaagaaaaaccaaacttctgacaaatgtgacacaaaaataatcttaagtgccatttttgcaaaatgttcctttcatttgcaatttgtaattaatttgtaatactgtaatactgtaacattatctttatatgtgaccaaattgctaaattttaaaaatatacaatatttcatctcttcatctaagaagccatgctagattgtcctctttcagaagcatctctgtcctgatttttaagtggaaatctgtaaatttttatctgatgcaacttcatgtgtaaaaatatagagttaatttcatagagcatggaaaaaatcaaattttaaaaaaacaatgccacttgcaattggctaacactgacgataacaagttacagtgggttctagcaaattcatggtggttctaagagctttttagaaatagcctgtgctcaacacaattacaattagcctgtttcaatataatagcataataggtaaattcatgaaaataactactattttttagcattcactatgttccaggcactaggcaaagcagataacattcattattgtatttaatcctcacaaagccttacactataggtactatgagaatcctacattataagtgaagaagctgaaggtctggaaaagttaagtaattttccccatgtcacacagcaaataagtgacacagctgagacttggatccaggattctctgactccaaatctgtaattgctatactatgtgacctaataagcaaataggcaaagtacagcaaatcttcaaaaatgcgaagtatcatgataatattagtccatgtagtaattgtttatttggctattagtaaaattatctgttacaatgaaatgtattctggccctttttcacaatgagataacaagagtgaaaatgcacatgaatttgtaatgccttatcatttattcttatagtcagaattttttaaaaaaatatgtatgactgtcataatcaagaagagataaaactgcattaagtatctgagaaaaaataagtttacttgtattaatagtagtcagggagatgtaggtccatagacacagatttactttttgtttagtcattcagtcaggtccaactcttttgtgacccaatgggatcctcagtccatgggatttcccaggaagaacactggagtgggttgccacttccccctccaggggatcttcccaatccagagaacaaacctcatcttctgcagtggcagctggattctttaccactgagcaccagggaagcccacggatttactacttagggtgtaaaatgtgattctagatgggggtggggagaaacattgctgatgttagcttcatcagtaagtccatttttaggattcagtaaacaagtatttaaactctaagagtggttttgatcataaaagcaactgtgtatttgccggaagtcataaacttctgaggaaaaaaaagtctatgtgatatgtacgtgtttgcagtcgactgtctggtgttccacgttccttttatattgctgcatctgggggcctgagagtaggttcaggagtacacctacaattaatcaagggttttttagccttcctattttgaaaaacttggacaactcacgatctgaaattatctgcatttttggcaatacacgcagccattaatccattacaatttactctaaaatcaattgtatatggtagacattcaagttacatatccagagatctggtagacttttgtctatagactggaaactacctagatgatgaagtcactgagccaagctaagcagacggttctaactccattcttccagtaaagccagaggcatataaagagactttgtttctgtttttcacactatatttcacttttttatctgcttacctaatatagctcttatgtttatttgtctaagaaaatatggcccagatttttatatcaatttaatatttcatcctaataaatgttttatttagaagacattcctgtccatacactgaaattcaaaccacagaggaaaagtttattaagaacaaagtaaacttgatcagaaatccactaactgattttattaatagaaattcaatttactgactttttaaaaataaatgcaaaacaaaagtttatcatgtatattttttccagagctggtctttgcaacttagccatttatttaacacaagtaattccaactacacttttacatcagacacacatgccacttctcttgatagaaaagtgttgttaggttaaagtcattttttaaaaaaattatattctaagccctaaaggataaacatttatccactaagacagaaggataaagattttaatggcatcttgctttaggattcaaaataaataaggcaaagatgagtttccatcttcttaagactaaattacagagattaaaatatataaacacaaaatgaatgtgttccatttgcatattatatttcgctcttaaagttgattttgaagattaagggtcagcatttaatcctcactatcctaatccctaaaattacaaagacaggcataagtgcatgtctgctgcactaaattaccttgaaagaaagcaaattccggatgaaaagggaagcatatttatattatggtgatttaaaatctgtcgcctaaacacatcttctcccctcgatccattgacctaaattgcacactaaaagcttgtttgtctgcaaatgggcagctaacactttgagacaatccagagattcttcacttatgcagaatcatgccaacaatttttctgactacaataaacactgtcttgttcatattccgcagaaacaggaattgtgttataaaacagaagactttctttgcagtgttaaaaccatttcctggatagttaattatgaaaatttagaactctggatgcaagaagttgtgaatgcaaaactatctaccaaaaatttcattaaagtgtttttatatctatcaaaatattgctagttctattgaattttaatgcttttttcatgaagggagaaaagatgggtaattttggctcaaggtttaaaaaatactttctagagaaggatttacttcctaaatattctttataacactatctaaaatctgaaatccagtacaatgaattttcggagcaaaataaatctgatgaataaattcacctaggggttcagaaacccccacaattcttattttctttcaaaatattacattcatatcaacatggatgtgtacaacaaaaatatcataatggcaaagcaggaatagtatacatttgcaaaggatcaaattctttcctaggatatattccctagttttgtcagatatgcatttattttagaagataatttcctgaaatcacattatgtacatcagtcagattttaacactgaaatagatttagttcctctgtaaatctgctccatcattaatccagtgtcaatagagcaccatgttccttcctttaaaatgtatttcaaacaatttcacatatctctaaagaatggaatccccactgttaaaatctaggctatttctgtgcatctgtaataattggtatatattaaggaaattttcctgtaacatattatataacactgaagactaaaatgtacctctctctgtgaatatgtttaaaagactacaccggataatggtaaattagtataacactaactttactactgtgtaaacgtatattcaggaatattttcaagtgcactgaaatttttcatggagaagcctcattttatggagatgtagaagctacaatgaaaaggtccaatcatcttaaaagggagactaaactgcaaatgatacagtgatactcagcgtttcagggctaaacccctgctgttcagccacagtggttacaaaagcagactaatgaaagctgcaaaaattataattaattttcattctaaagaaatcattctgcgctaatcaactgcctatcaaacgtcattgcaaattatgctaaagaaaaaattattaggccagatttccagggtaaaattttccatatactgtatcagaataaagaatgcctgtgtgggaattacttttaatgaacaacaaattacaattactaaactaaatgaaccatctgcctttttttttgttgttgtttgttttcacggcctcactggtgcagagtgcattgtcagcttaattcccattcaaaatggcagactgcctcatcaccagggtctctcgtccataacattttaacagaaaatctgtaacagatgttttcaattttaagaagaggacaagtatgttttataaatatgttctaaacattaaaggctggcgtttataataataaggtacatgcctttttcagactggagagcttggatgactaagtactcctaaaccctaaattagcacataaagtattcatagaccaataccaataaaaacaaatcctgatgtactttattaaacatttcattcaagtaaatgtgttttgtctctatcctctaataggtgatcatttgtttccaaggagcatgcgtgaggacattcaataatgacatctattatcaaacctttactgaaaggtttaaagtggttagctggatacatcatctggcatcagcagaaaacattaaaaatggaaaaatcagtctcttattagcatgtgtctcatattagctgggcctttccctcctgaggtttagggaccatgatactgtaaaacacttggaagattgactattctcggggccatttaggaaaaagaaaatctgatctgggcatgctcttaaaaccagagcacagcatatgaatatatcttaatatagtgcaaaaggaatatttactaaaattaatgactgttttttttttctttccacttctatttaggacactgacaagtagcactgacttgaaactgcaatgaggacatgttttaaaatagttctttaacatcccttatttaacattttttttcctcctttaagtgaaagtgaatatcctaactgcctaccatcccccgacccctggactctgggcctccactgatcactttgcaggcatagcactgactgagggactgtgaggccccctggacaccagtgtgtctcagcccagacccggggaatcagctctgaggaagtcaagagagcagttttcatatattcacccagtccttcctttctctgtgatgacaaccaaaagggaaaattaaaaaaaaaaaaagactggtaaagctatgagagcttactccccacaagaaaaatgaactagatcgcttctcctggtcctaacattgcttcactttcattttaatttaaagtttggtacactgctatttttttccccttgactatccccggacatccagattcctttttgcaattaaaaaaacaaaaggcaaattgtattagattatttcatgagctagatatagagaaggatatatgattccaggcctctccacagactggatgaatctctgtctaaacactctctgctttgagtgcatatttaactatcatgcgctgctttagaaaagcggcttccatgccagggtccactcagtgtaatggtgtctgcttagaagattatttaaatctccccccacccttgttctttaggcaagaatgaagaaaatgacagctccattattagaaatgtggcctcagaaacgatccaatggagaagtctccaaagggatactgaggcaaaagcacagcttgaaaagcctttccttatttctgtagttgtgttttttgaaagcaagtcatgactgaaaaatacggtttttcatattttcctaggctttattttgcatttgatcatgaaaatatactaaggcactaccattgtgttttatttctttagttttacagtacagttatggccaacagagagaccttggctttgcaagaaatccaaaggaatgcttaattttaggtaaaaatcgtttttactcaaaatatacatgacattgataatggagcagttttgttcatttttaacaactttttgaacttataaaatattatgaatgtgaataatttatcaatcaatactcctttaacactgatacacttaaatatcccataaaacagcctgcccttctaaaaagtaaaatagttttgaaaaaaagttactttaccagaaaatgcctgtgtttatactgatgacatccagaataatactttgataaaggaattcaactcatgacaaaatattcttttatgaaaaaacagcacttgagaatttattaggaaccattaccatatattttactcattaaaaatttgatcataagtgtgctacctacagttattacatgaagtaaaaactgattctcatagtccatttgaaggatgttggctaaaattagtaactcctgtgtgaccagcattcatttctttgattttcagaaatatacattgacactaactttgttatagattgagagagcattgttctactttactgatcttgaaaatatgaaacaacggactgacggactttggaaacttggaattttttcagttatatttgaagcaaaatatctgctgacatctacagatcagtgactgaatgaaagaggagttacagcagcttcagtattgattcaaactcatggattccctgggcatgtaccactgttgctgctgctaagtcacttcagttgtgtccgactctgtgcgaccccatagacagcagcccaccaggctcccccgtccctgggattctccaggcaagcaccctggagtgcgttgccatttccttctccaatgcaggaaagtaaaaagtgaaagtgaagccactcagtcttgttcgactcttagcgaccccatggattgcagcctaccaggctcctccgcccatgggattttccaggcaagagtactggagtggggtgccattgccttctccatgtaccactgttactagcacctagatcacagtctcccattactgaggtaaatatcttcactgatactcagttataacttagggaggaagcaagcacctctttcctgactcagacaatgggcttctttcccttccccctacctccagattcaaccaccacctttccaagtcccataaggctccatccaaacactacccagttagccatactctcttggactcgtaaaaagtctgaccaccttggactggcgtgctgcagtccatgtccatagcgttgcaaagagttggactcgattgagcaaactgaacaacaactttggagctgtgtccactctccaggatgtttgcacttaaatttatagggtcagagaatcttataaggggtatagaaacactcctcagtgggaaaatgcagatttttttatacatccacacctttcaaaagctcactgatggatgcccagtggtccctggacctgactgagaatgtcagcctgcagagaagctaagcggtgaagaacaatgagtaaacagcacagcctctaggcagacaagtctgggttcattctcacctcctcaccttttctgtatgaccttgggtaagaaacctgaccttgctaaatctcatcacctcatccctacagttgcaataacttcctgccccttgctgggctgtcaggaagactaaaagatacagtagatacaaaatatcccttggtacatagaatcttcactattctgtggtgacacaaaaagtaggaacttgagatagggtgtgatctagtgacagttactcagttttgtcccactctttgtgaccccatggactgtacagcccatggaattctccaggccagaatcctggagtggatagctgttctcttctccaggggatcttcccaacgcagggattgaacccaggtctcctgcattgcaagaggattatttaccaggagccacagggtgtagtagttgtttatgtgtctctccccagccccaagtcaggaaccatgtgttaactaagtctgcacaccctggggaatcctaaaaagtggctttgaaagtatactattaggcaaaactcttttgcaaaacttaagaatttttgcaacagtgtattatgtgagcaaagtttgcaggatccatgcatgtgcttcacagttttaaactcttcacttattatctctttgttcatgtggtcacaaatcattccattggcagcaactaaaccagttctttctctttaaaaataatacagatggacttccttgggagatggttttaatattgcttgtctgccagggaggagtctcctcaaggtctcctttgtcccgtcgaatctaagatgaattagtttttccagaatcttctaactcaattattccagaggtaaattacttgttattaacaaatagaaaaacaaacatcaagttctcctttgtcactttgaaatgtgttcactcccagtgacacggaaggatttccagttctttctgacacacggtacaaagatgcacatggcctagcttcacgtctctttattatttcatagactccagtaaattctgctcctattcttctccttctgagatttattaataccagcttttagtcatctgtaaacccatccatgctggctgcaagcattcttgttaccctggtctggagcttttcaatctgttatatgtcttttggggtgaaaggttcacgtctataatatttctgttttgttcatgctgatgcaatagaattttataacatacaacaaagaactggaatctcggcaacagcatatgtaaaagcatgtcaggagaaaagggcaactccaagagactgagtctaagaggccccatccttcagtcatccatcccatgggagcccttttgcaattaattggaataatatgtcacctaaattgaacaacagaaatcatcttttgctctttaagaccaggaaaattagatattttgtacaaaaagtaactaaaatggaggattgttaattaaagatttgccagaatcatttcaagtcacaactctccatttcacagcatctctttactctctaccaaacaaaaacaaaatattatcagagcagggccattgcttcggccttaatctcatccatttactcacggatttattttgaagttcttacaaaaagctaagcttcaaggcacaaggtacacaccatatttctcctcttgtaatcttgacattggctgtcattaccattgcagtaaatctgtagggtggggaatgtggtaaagaacagaaagtgcttccaaaaattcttcatagttgtcctttattgtgattgtatttgttctactaaaatgttttaataaaaacaaatgtttgctctcatcagaccctttaagaaccactagcaaaagatatctcaggaaaggaggggtacggaccaaagctttagcatgaaattatctctgaccttgaaatatgaccataggtgattgaagtcatagtcatcatcacaacatttttgaggtctcaaataaaacttaacatttttcttagacctgtgaacatggtggggaatgttctaatcatctacaccagaatcacttatttcaataattaatagaactagttgtgaatatgaatttttaaagcatccacacagaaagacgtagatgattcagggtaattactttcataacaattggtaagggggcgggggggggtctcctggactgtgtcccttgtcactaatcactcatttcaaacttgtgactgtttgagggcctcattttgatggcctaatactatcaggagcaaatttcaacataaattatttaaaaaccatgataaaggccagcctagccacctgcgctggaagagtatgtgtccttcctttcatctcttgattaccacggggctgactttccaatttatggattataactataccttttactagttcttttcaaccactggtttcctgcctcttggccatttcttagctcattttcatatcacccagaggagaaggagagaaaattaaacgccaacctatagaatttgttctaatgaaaggaaaaggcagagattggaagccactggctaaaatgaggtttggggattttcatacttgctgtggttccagttaacctagagtaccaagggcccactttctatgaagtcatttacccttcactttcaaagatgattttaccatgaccatggtgagaaagctattccacaaacccagaactttccataaagtttctgaaacaaaattatatgcaaaaagataaagtaaaataaaactcgaaatatatatttaagatgcaaaattttggaaaaatcagtgtagaacacattggtcctcacttacaaattattactatgctttgctcaagaagtaagctgtaatggcttcaaatgtattaataggtttctgcttattgactgcttttactgatagagcattccagccccagtccccaaaagggttaatgctactgggtgagcagaattcatgaccataatcctaaacaagtgaggtgaagttctatcaggtctatttcagcgtatcagggattaccgctagctgtctaatcctgctgagcctcagggaggaacgttctattgtatttgaaatcctggccaggaaagaacagaaggttaaatgggtgccttgctctgtaatcaaatatcacaggcactacttatctattcagtgaacaactgacgtagaaaatcaattaggaaccaaatggcttcttaggaatttttacccagaaacaagcaagactttttttcccccaaaaggagtttatctgatatgttttatagtagaatactacaaattctggagcttccagagttttttatctggttcctaaaatatatcttaccccatattctagagctcctgtactaaattacttgcaaaaccgagggagtgcttcagggatgaagatagcacgctccagcatggctgcctcatttacctaaaggtaaagccgtgcaaaattaatccatataaagcagtgtcaaatctgaatcaaagttctgaacaagacttcaaataaatatgagtgcttttatggagctgattttaataatttacctcttctgaaacattccttcaacagtgtatcgtgtgggaaaatattatgagcatgagggtgggtggtaggaggaggcagccacaacctcccggggctctttgttcccagcatgaagaggctcctttccgtggcctgaaggttaacaccctggtccccctgcccccatcctctacctgtcactctgagtcgatgtcacagttcctgcacacagacaaacaggctgccctggcccgtctgcctgaccttggacagccctcagatcaaatctggttattaatattggggagagtcaaaatgcaatcttccagacactggagaattgagctagaaattatgcagtaggcactccctgtcaataagaagcatccagatgctaaggcttaaagtggtcacctggacctgtgtgggagttaagagaaactttttttttttccctgttccatgaatgctatggagagaagtttgcttagggtctttatatgcttagcttatctatccttacactttcaattatttttggactctttgctttataagagttcttatacagtaatccatttgcaggctaaagcagatataattggaaaaatactgccctttcatagtcatggaaaatattttacaaatgggatgaaatacttttaataccctcattgtagttcaatgtgcatataattttaaccaggggttctcattctttgtaattgtccctataactttctctcggaatatatccataatctagactaaaaagggagaaatatgaaaaatcatttaaatgcctagacaaatactaaatgtgctacagtaataaatgcattactctttcaaatcactacaaaaattaaagaggaaatttaatcttatatttcttccataatttacccaatcatttccatattctcaggtgaagggtctcttgataagagagttatgtgcctttcatgatagtatcaatattaatgacttggtcaaaaatcactgtcacaggagtctcaatattccctataaaaatatattttgaaaaccatcattaagctttttatttaagtagagacccaaaatgatactaatgtagaaaaggcattttttctggggaagaggggtggggaaaggatggactgagagtttggggttgacatatgcaaactattagacatagacaaaaacaacaaggtcctactgtacagcacagggatattatctgtattgataattatatatttgatattatatataattattaaatatattgatattgtatatttttcaatgttctgtgataaaccataatggaaaagaatataaaaagaatgtgtatacacacacacacacacatatatatacatataactgaatcactttgctatacagcagaaattaatatagtattataaaacaactataatttaaatataagaaaatgcacttcaaatgcagggaagaattttttgtctgcaagacagacttttttttaagtggtaaaatccttttcagtaaaaaaaagggtatcttcttttgatttttgttgtcttctggtcgccacatttttttcctttgaggatgtatccagactaatgcatcttaatgatatatttttttgcctactgaactattcatttgcgctgcctgtgaaggtatgttcagaggcgtcatgccacccaccggcatggagactccatggtatgtagaattatgttacaatcaacaacccgactctttcagcctcctggtattttatatcagttgcttcctcaagcaacacaaatccactaatgctttaatttgtgacactgctaactggtattaacagattatgactatggaatgcctttgcatgcaaaccggcatagacagataatatgtctgtcatcataaaacaaaatgctctaggtcacacaaacatataacgctgtcctacatcttttactcgagcacaaacctccaaaggtttatagcacgcttacgtgtgcttgcagaaccttactcttagataaccaagtgcccagggcttggtccaggcagcacaggaaatttctattctgcattgatctacatgtgtcagctggacccaagtgactgatcaagctaatcaagttattagcaagatcttgaaataatcagcttgatttttttaagggaataactcaagttatttcattagcctgctctttcagtttatgagaagggggatttttttttttttttttttgagggacacaggctacatgtccagtggaactcagatacaatttggtattggcattttatagtagatcaggggtcagcacagacttgattatttcctgttgatcgacaaaaaaaggaacttctttatgaaataggcaaagacctaatcttcaacgtgtaagtgaagtaacttttccagttagtttcactggtttactccagttaatacagtaacttttccagagttacgtgttctgacaatgtagagtctcttgcttatgaaattgggcaccatatttatttccttcttttgagcaatggttatcattgtagctgccagtgcatctgtattagatgccatattgggagaaaagaaaagtacagatattaaaagaaaattgtcaaattatagaccatacaaaatatggtctctctcataaacaaaataaagtgatatatacacacatggtcgcgccaggggtaaagaacctgcctgtcagtacaggagatataagagacatgggctcaatccctcagttgggaagttccttggagaagggcatggcaatccacttcagtattcttgcctggagaatcccacagacagaggaacctggtaggctatggttcatagggtcagaaggagtcagatacgactgaagtgacttagcatgcacacgtgtccatagggtcacacaaagttggacacaactgaagggatctagcatgcacacacatacatacttacatctatacctacacacacacatccttcacacataccatgcacacatttatttatatccacctctatggagagaaaaaaaagagggaatttgctggtatgaagtaaaactctaaaaacaaacctcagaatctgccttcctagaatagcaagaaaatgagaaattgcagaatcattacagtgaactacaaatgaacgtataacccagcaggcctgtggaagccagccctcgggagacctataagattcctgttcagaaaatagactatatatctgctgcctggggatatctttgtgtacaaggagagtggatttctgcaactgtgatgaggcaaagtgttattccaaaactttaccagcaaagatatccctaccaaattcaatcaaggggccttagacttttttatttttttaaccaacatctggagagtggtttcttggcccgacagttcacaaaagtgccagacttttcaacaaaagaacagctgttttgtgaagaaaggttttctttataaaggtttgccatttttcctactgaaattgaatttttttttttttaatatcaaaagaggtcagattcctgtccttagatgcaaaaccaggagcaggacagagggcaatgccttccatgacttgctcagagtatacaggatcgacagactctagcaaagtctcagtgtgggaatggagagaacacaggtgaatacacaggactgcttcctcttctgaacatggagggacagatgctaacagagctgaggctggtacaaccaccacagtcactgctgtctcaggaatcctgtccccagtgacctgcaaagcgtactagtttcgtgatcctcaaatccaactgacaatcagcatcatccattcaaatgaagagatttctggctgcaccccagagagggtgggccttggtaccaccatgttttaaaagtgctaacagggaatctcatattcaactttagttgattcaacttgtacagacattctgcacaaaccagtcaactggatgtgcagctgtttctagattgtcttttcacaaaaacacttcatgagccccaaaagtttgaaagcgcttacattctgatcaaatctcactggtaaataaatgactttttctataggacagtcaatatctagtgaagtcaactcagttcaaggacttcccaggtggtgctagtggtaaagaacttgcctgtcaatgcaggagacataagagatgtgggttcaatccctgggtcgggaagatcccctggagaaggaaatggcaagccactccagtattcttgcctggaaaatcccaccagaggagcctggtggggtacaagtcaatagggttgcaaagagtcggacatgacagaagctacttagcatgcaagtaattcagttccgccctggctactttcctaactgcctcaatacaggttctcattcaaattcttcactttcctgtggtacatatacacaatggagtattactcagccataaaaaagaatacatgtgaatcagttctaatgaggtggatgaaactggagcctattatacagagtgaagtaagccagaaagaaaaacaccaatacagtacactaacgcatatgtatggaatttagaaagatggtaacgataaccctgtatgcaagacagcaaaagagacacagatgtatggtcttttggactctgtgggagagggtgagggtggaatgatttgggagaatggcattgaaatatgtataatatcatatgtgaaatagctcgccagtccaggttcgatgcatgatacaagatttttggggctggtgcactgggacgacccagagagacagtatggggagggaggagggaaggttcaggatggggaacacgtgtacacccgtggcagattcatgttgatgtatggcaaaactaatacaatattgtaaagtaactagcctccaattaagataaatttatatcaaaaaaattcttcactttcatccaagattagaagaagagtttgatttacataaatacctatgtactaatgacacaaatgcatgttccagatcaaaaacaactacttatttgtttacaatggtaaataactatttctttacatcatgtgtgaatatgtgtttaatgtttgtctactactctaaactgtaagttccatcaagcaaggcctctgtctgtcttgtttgacacaacatccttactttccagcaaagggcccgacagagtggtctctcaaatgaataagagacatgattagtcaaataaataaataaaccatagggcgttcagagatgtgattcagttatttctctatatacaattactgagaaatatcaacaacctcagatatgcggttgacaccactctaatgacagaaagtgaagagaaacttgatgaaagtgaaagaggagagtgaaaaagctggcttaaaactcaatattcaaaaacgaaagaagatcatggcatctagtcgcatcacttcatggcaaatagatggggaaaaaatggaaacagtgacagactttattttcttgggctccaaaattactgcagatggtgactgcggttatgaattttaaaaaaaggcttgttccttggaagaaaagctatgataaacctaaacagcatattaaaaagcagagacatcactttgccaacaaaagcctgtatagtcaaagctatggtttctccagtagtcatgtatagatgtgagagttggaagaactgatagcttaagaattgatgcttttgaacttaatgctcttaagactcttgagattcccttggatactaaggagatcaaaccagtcaatcctaaaggaaatcaaccctgaatattcattgaaaggactgacactgaagttgaagcaccaatactttgggcacttgatgccaagagccgactcattagaaaagaccctgatgctgggaaacattgagggcaggaggagaaggggacgacagaggatgagacatgactgagcaactgaacaacaacaacagtacagttactgggtttcccaggtggcactagtgataaggaacccgcctgccaatgtaggagacaccagtttgatccctgggtcaggaagatcccttggaggagggcatggcaacccattccagtgttcttacctggagaatcccatggacagaggagcctggcagcctacagtccacaggttgcatgactgaagcaacttaacaggcatgcattcatatgattactacactacttcaagaaaaattcaagaaaaatttgtaaatatatacctgctgattaaccaaaaccatggaaaatctgaaaccagataaatatgtgtaactatctctgcaatttaagatgaaatactcattacagctcaggaaaattcagctctgagaaccatggacatgattacctgtaaatcagatctcagtgatttgttaatgcctactttctaatcatcatggtaacacagagcccattttatagacgaaaaaactgtggcagcagccaaaagacagaagcaaaattaagaccagacacagaagctttaagcattcggttttcagctgtgtgagctccgcttactactactcatttgcaaattcacacttgccagatttgaaaagtggtatttaaaagtgtcatacacagttccttttctgtgggcaaacttctaagaaagaatgggtattgaatttaaagcacatgaaaggatatacaaatagttattttctcggagctgtatatacccattttcaagtggatgagtatagatacattcttcttcaaacaaatttcaattgaaggccaactggagagagaaagttaagaatggcttttcaggaatgacaagtcctggatataacagtgtaactgagtgcgctcacagaaattaaaaaggaaagtatcttaccgataataagaaaagcagaagttatctccaagtacaaaaagcaatgccgatggagttgatgtgctgacaagacctgagtaatattttccacatataagaaaagctttcatctcagaatgcattttcaaagctatttttgtaccttaattaagatctccagaactcactggagtgttttttttctccatttactaatatattaactaaggcaccaaaatgcttgccaaaaaccacataaagagcaagaaagtcagctggacacttgaagacagaaaatgcgtaactcttttaaacttttcttgagttatagaagactacagggagatagcagaagatgaaagagacaggggtttgatccctgggtctggaagatctcctggaggagggcatggcaacccactccagtattcttgcttggagaatccaatgcaccgggaagcctggtgggctacaatctataggtcacagaagagttggacatgcacttacgcacagggagatagatgggcatatcttccaccgcctttctctgaaacatcactccacacctcccaccacactccattcccaatatactaatagtaggaaggcatcaaaagtgatacccaccttgtcaagacttattaagctcatcagcgttcctagacataaatgccaaaacagtcatccagtctttttagtctcactgtgttttagactcaagaaagtagctccagggaatcttaagcctgagataacatgggagcttatcatgctttcttgcttcatttttctttaaagacttttttttttggtcagagtaaaacagaaagaagaaattatgtaatgttatgttctaacagtaggaacactggcagctcaagccctgacctcaccctacccatgtcaataggctttatgaaaagcagaaggtctcaggaaattgaaaacgccaaggtcaatttcaaatgtttaaataaaatagggtgatgcttgaaatagctacagataaaataccaaccatttccactgattaattagattagcttttagagacaagtatatttatgcttttacatcaagaaagagaaaaaaaatccttctagttagcaaaaaaaaaaaaagtaatatttccctttgtccatatatctaccactctgaaaatgtaaacttcatgctcacaaaacatcatataagtgagaagagggaggcaagagggagaaaaaatttaaattatactgtgattgtgcattatttttcaacaatgggacatcttttacttgagaagaaacaaatagccactttatcacagttctgcaaggcaggaatctaatttcttccctaaataccacaggaaatctaaatattaactttctgaatgacacagaggagtaaacagtgctaaaatgtgttacacagaggactaaaaatgtccctacaaacttctggaatccagaaaagctgttaacagagacaattcacaagggaaaataaagcacagataaaaagcggtgtgtattttcttctaaaaaacctggagagcttcttgcagacagggatggcttcatatagcctctgtctgttttattcatcaccacagtgcaatgaggacaagcaagcttttgtgtatcactagaacttcagtctagtcctacttccctggtgatgctgatggtcaagaatctgcctgagacctgggttcagtgactgggccaggaagatccccagaaaaagggaatggcaacccattccagcattcttgtttggaaaagcctatggacagagaagcctggcgtgctgcagtccatggggtcacaaacatgactgagagacagaacaacagcaacgcaggacctcaatctgacaaaatgtgtttcagtaattatcattaaatataccagttttcactcagtatggagaattcaccaccaaagaacactgtatcaaccagataaaggcttatattctgacatagaaaaaaaacctacatatggctatcagcgatttttctaatttgccatccctcgctatctcctccccaaatctctaaatctctatctatctcatcattacttctcctctcacaggctgcccttcccaaagatcaacggttacagtcactcttacattcgtgcccttctgccacaaacaaggccttcttatccaggcattcttctcaaagtatcttcactgtaacagagtgactgtgggtgctggagtcagtcgatctgagtataaatcctgacccagctggcactgttaccagctatgtaaccttggatcaattaattaagtgttcattgccttagtttcctcatcttcaaaatgggcataattatacaggtttactgctagaatgaaaagagttaatatatttaagaacttagattatctgccacctagtaagtactcagtagatgttcaagttaattttctcactggacttttattggccatggagaaaaagatgaataaggaaaagtttatcactctcaagtgataaacgtttgtacaattctttaagaaaagggaaaaggagctgatcagatacaagtaagaagtgaccagcagtactgagtccagttaataccagtgactgttgtttcaggaattccacttgtaggtataaaaccaagagaaaagaaaacacatatccgcaatatccatacaaaaacctatacataaatgctcacagtttcattattcataatagccaaaaagttgaaacaactcaaatgcccataaactgataaaagggtaaataaaatgtagtctatccacaccatgggaattccataataaaaaggtatgaaatactgactcataccacaatatagatgaatcttgaaaacactacattaagtgaaagaagcccatcacaaagaacaacatataggatgattctagactatatagacagagtgtaattagtggttggaaaggccagggctggggaggttgggattaccaggcggtgggaaggggtagagataaatagcataggatttcttttggagtattgaaaatgttcaaaaatcaattgtggtgacggctgcataattctgtgactattctaaaaaaacaattaattggatgctttaaacagatgaattttgtgatacgtgaattatatctcaataaatgtgctgaaaataaaacatcaccacagccaagcagaatacaatggcctcaacattcactgccctgtccacatggtaggttgggcttccctggtggctcaaaggataaagcacctgcctgcagtgtgggagacccaggttcgattcctgggtcaggaaaatcccctgtagaaggaaatggcaacccattccagtacccttgcctggaaaatcccatggatggagaagcctggtaggctaacgtctatgggcttgcaaagagtcggacacgactaagcgactttactttcttctttcttttccattagttccttccttctctattttagaactgatttcttgagacttttactcacattttgctaaataatttcaagcttaattattgagattgctgtcttatcctatcatattcccctatggacatctgagagttcatcaatttaagaaggtatttgttctgattacctaattcccagaacttcaaggatccttttgagtctaagtgtcttgctgtatctgttgtgacttgaaggcaaagaaaagaacagagtactaattagatagagattactttaagaaactctttgcattaaaagatgatttttcacaagaaagtgctcaagcctttgtaaaaagatacctgctctaatagtggaaccaggagctcccttctgtaaggccttctgaatgtgcctcccacatcaatggaggccattgactttctggagcacctaccacctatcacttttaccaattcacatcctgttccctggggcttcctaggtggctcagtgggtaaaacaatctgcctgcaatgtaggagatgtgggttcaattcctgagtcaggaagatttccctagaggagggcatgacaacccactccagtactcttgctgggagaatcccttgggcaaatgaagtgactgagcatgctgttccttgaaactttgattagtcatgtgtacatacaaaactgatttcagggcttgttgacgaatcttgcacaacatcatcaaaggtttattatctctagaaactgagaacacttacaatggacaggaagagatttctgtgatctactttaaaacaaaataagtgggcattaatgattaactcaaaatctccatcagtttttaaaataggtcttaggatactgtattctgactcctcgctctctgtctcttcaccaccccacctccccgccacacacacacgtgtgcatggaatttgttccagtgtttgagcaaaataggcataaataggtctccttggatacatactgaaaacatcattggaatactggcattttgcctttttaatgaccaaacacatgagaactgaaatatatccacattcttctatactcactgctaaagaattaaatgattcactttttagaaaagtgttaacagacttgaaaaaaatcaatttcaatgtacttctgtatcagtgcttttacaataagttgcaaagccattacatttaaagaggtagccgtgcttctactggaagaaatggaatgacctagtactcgctacaggaacttgaaagtaaatattacacctgagagtctattttgaaacatgcgtgcgttcacgctaagtcacttcagttgtgtctgactcattgtcagcacaatgagtgccctctggactgcagctcgccagactcctagtccatggcattctccaggcaaggatactggagtgggttaccatgccctcctccaggggatcttcccgacccaggcgtcgaacctgcatctctttatctctcctgcattggcaagcaggatctttactactaccaccacctgggaagcccttttgaaatatacatctaagtaaatgtggacacaatgaagcaataggaagagatttttgcgtttatgactttaaagatggcaattctattgccaagttaagaatggatactgcttcataaaactcatcttagtttttctaatattgaaggaattaacagagtcaaagtctatttttctgggaaaaaaagttatttgtgaaatctctttggatctatttttaaggaatttggttataagcctggggagtatcttctcaggaaatattcatcatggaaaaacttggtacaattgttccatccaaatgtgtttttttaattacttaatttgctaataaaaattacaataaaccacaaacaaataaattaaaccagaacttgcttttatccaaattctttctcaaaggacactgagggacctctgtttacatagtagtgatagcatctcatactaagtaggagagcgttttctctcttccaaagtttgtatagtaccaattcaccaaatgaaatcaattctgagaggtatattccactgtttatgtatttcccattttagcatattaattttatgttttaaaagacagaggacaaacttacagacataaagagggaaagcaagagtgggatgaattgggagatttggactgacatatatatactattgataccatgtgtaaagtacataactaatgagaacctactatacatagctcaggaaactctactcagtgctctgtgttgaccctaaatgcaaaggaaatccaaaaaagaaggtgtgtatgtaaacatatagctgattcattttgttgtacagtagaaactaatacaccattgtaaagcaactatactccaatttttaaaaatttaaataaaaatagaaaacaacaatatttatttggtgtaaattggggaatcattctccccttccatcgtgtctggtgtccctcacgctgttattcagtggtaagtgctaagtttcaggtatgatatgttgagtttaaggtggctcagatggtaaggaacctgcctgacaatgcagaagacatgggttcagctcctgggtcaggagatcccctgaagaagggaacggcaccccactccagtattcttggctggagaattccatggacagaggagcctggcggactacagtccatggggttgcaagagttgacacaattgattgaggaacactttcactttttcactttcactttaaaggagatactttgtaaaccaacactctttcagaagtgatggcaattagacttgttatcagattccccacaactgaacaatgaagacttcaggccctaaggacgcatgctagtgttctctgcaggcctgccaaagcaatagtgagaaatattggaagtctttgaaagatactgcccaccataattatcaaaatgtccttacatcctttacacacactggctaccgatattgggagtctctcctgccaatagttctgtcacttcaacaactgaaactattcttacttttcattaaaagattattcatcactgaatatactcaactacagtgctgtcaatgactgagaattttttttgcaggattggaagccagattcaggaaggcaaagatttcctcaagcatctttcaggtcagttcagttcagttcagttcagtctctcagtcgtgtccgactctttgcgaccccatgaatcacagcacgccaggcctccctgtccatcaccaactcctggagttcactcagactcacgtccatcgagtcagtgatgccatccagccatctcatcctctgtcgtccccttctcatcctgcccccaatccctcccagcatcaaagtcttttccaatgagtcaactctttgcatgagatggccaaagtactggagcttcagctttagcatcattccttccaaagcaatcccagggctgatctccttcagaatggactggttggatctccttgcagtccaagggactctcaagagtcttctccaacaccacagttcaaaagcatcaattcttcagcactcagctttcttcacagtccaactctcacatccatacatgaccactggaaaaaccatagccttgactagacggaccttagtccgcaaagtaatgtctctgcttttgaatgtgctatctaggttggtcataacttttcttccaaggagtaagtgtcttttaatttcatggctgcagtcaccatctgcagtgattttggagccccccaaaaataaagtctgacactgttaacactgtttccccatctatttcccatgaagtgatgggactggatgccatgatcttcgtgttctgaatgttgagctttaagccaacattttcactctcctctttcactttcatcaagaggctttttagttcctcttcactttctgccataagggtggtgtcatctgcatatctgaggttattgatatttctcccggaaatcttgattccagcttgtgtttcttccagtccagcgtttctcatgatgtactctgcatataagttaaataagcagggtgacaatatacagccttgacgtactccttttcctatttggaaccagtctattgttccatgtccagttctaactgttgcttcctgacctgcatatagatttctcaagaggcagtcaggtggtctggtattcccatctcagaatcacagtttattgtgatccacatagtcaaaggctttggcatagtcaataaaacagaaatagatgtttttctggaattctcttgctttttccatgatccagcggatgtttaagttcatgtcaatggttcgaaaaagatgtggaccagttctctggaaacattagcaagttctcaaggaggagaaagaggaagcggggagtgcactagaaacctacagtggaggactccccctggtgttcttgtgattaaggatccatctgccaatgcagaagacacaggtttgacccctggtctgggaagatcccacatgttgcggagcaactaagcctgggagccacaactactgagcctgcatgctgcagctactgaagtccatgcacccagagcctgtgctttacaacaagagaagccaccgaaatgagaagcccgtgcaccacaactagaaagtagcccccactcactgcaactagcaaagcccgagtgcagcaacaaagacccagtgtagccaaaataaataaataaaaataaaggataaagagattttaaaaagaaaaaaagaaacctatggtggaaagaaaattcctggaaacttggaacaaaagggatcaaagtaagaagtagaagatacaagttaaaaaaaaaattcaaaacaagattatcttttaaaatgctaggtacatagcaaatgaataggacttcctccagtagttataaggatgttgggaaaaggaaagagaagactggggtcctgggtagagactagactgtgcttttacttgttgctctggaggaagttaaatgcttagggaggcacattccctctttcaggtcagcggggtaccatttagtacattactgctgaagtaccctggtgacctgaatgaattaaggcagcttctgaaggtgcttaacttgcaagcactgagagctcaggcactcgaagtgataaatattctatgagtcctttctatttaatataccaagcacccccaaaatgtcaggaaaaggaagtttctttaaagagaaagaattatgttgtgacagtaaacaggtaacagttttaaacagctgtgtctccttccagtttggagatgctcccaaaagctgtaagttcatcatactgctgctgctgcattatgctagctgactgcttttgtgggtgtaaaccctactactgagctcttttgttacatcacagttactgctgctgctgctaagtcgcttcagtcatgtccgactctgtgcgactccatagacggcagcccaccaggctcccccatccctgggattctccaggcaagcaccctggagtgggttgccatttccttctccaatgcaggaaagtgaaaagtgaaagtgaagacgctcagtcgtgtccaactcttctcgaccccatggactacagcccaccaggctcctctatccatgggattttccaggcaagagtactggagtgggtgccatcgccttctccgtacatcacaattacaggatcttaaaaatgatctgtcacttgaagggataaaagtggactcccaagtgaattttttttaaagtcactcagtgctgtccgactctgtgtgactctgtggactgcagcccaccagctcttctgtccatggaattctccaggcaagaatactggagtgggtagccattcctttctccaggggaccttcctgactcaggaaaagaacctgggtctcctgcactgcagacagattctttaccgaaggagctaggagggaagcccaacagtatggaagattcaacctgaaagtgttagtagctcggtcatgtccaactctttgcaaccccatggactgtagcccaccagactcctcagtccatgggattctccaggcaagaatactggagtgggttgtcatgctcttctccaggggatctttcccacccagggactaaacccaagtctctgacattgcaggcaaattctttactgtttgagccacaagggaagcccaaagacagatgaagtgatgtgaagtgaaagtcgctcagtcatgtctgattctttgtgaccatatggactgtagcctgccaggctcctctgtccatagaattctccaggtaagaatactggagtgggtagctgttcccttctctaggagatcttcccaacccaggagctgaacccaggtctcccacattgcaggtggattctttaccgtttgagccaccagggaagcccatagtatattctatgcttccaaatatttccaatgaaagtaagtctttagaaaaatatgtatcaataaaataataatatgatctcaatacacatttatatttacatatacatatttaatataggtattatattcaaagctgcaaaagtacttttcctttaaagaaacctagaatattaataaagtattataaaactaagtgaaatggaatgttaaccacatacagtagttactatcagtgacaacagaactgtcatcacaataatttacctttaagtagaattctcatcaatagcattgtaaagggaactcacagtctccaagactctaagtaagactctaagttacatctttgttctaaaagggaattgactgaagttttaatttgacacattttgcatctttagcatcctcatgtttaaagaaggatgtagcaccatcctcatgtttaaagaacaacatgaatcttccaactaaaagagaagctctagttcgctccgtaattcccaccataacctttgtctgaaactgactcacaaagtcttacattgcaaaagagcaatgagtcagccaagacatattgttctacagctactgatgatccaagaacgcagtcacacctagccttttgaccaaccattgatgaataaaaacacggaagcttttgagggctcgtatatgattgttgttgtttagtcgctaagtcctgctcgattctctgagagcccacgggctgcggcatgccatgcattcctgtccttcaccatctcccagagtttgctcaaagtcacgtccattgagtctgtgatgctatctaaccatctcatcctctgccgcccccttctcattttgccttccatctttcccagcaacagggtctttttcaatgagcaggctcttcacagcaggtggccaaagtaatggagcttcagcttcagaataggtccttccgatgaatattcagggtttattttctttaggatttagtatatggattcaacccttaatttgattaaaggctctgccacattggaagaacagagtcatctaggaagcatcaccttaagagaacatggtttgtatccttcctcattaatggggctatctccataaacagagacatttaaaaacccagtccaaacaaagtgctcaatgaatgtttctgtatttatcagaagtaagacttgggatgtcatttgggtattctgcaaacagaacatcaatcacgatgttcctccttggttacacaatctatgaagatgtttcccagcaggttcttgggaactgccaactgttgctcttcttttgaataaatcacatcaccataaggtctctggaaatacactgataattcaggggtgaaagaagtgccttttgaaggcttgaattatctgaataatgaacaaatctccacgtctaattgaactcagcctgagcacaggctcagacttcaagcaaacttggtaaagcatttccagtagaactcaggcaggccagatgttttggaagcagaatcgcagtcattatgcacatgccagttcctcctcgctccacccggggccaagaccctttcagcagcatgaggcctgcttaacgtatgactttggccgccttactgcatggcatcccagcacccacgcaagcatttcggtgattttaaacaagctccactaacaaggacaattatatggaagccacagaaactagtggggagagcacattcatcatgagatataaactctgtccgcatttcctaaaatgatctcagggtgggagatacatagggatttacaactctgggttaaatgcaggagacatgggttctatccctgggtcaggaaaatcccctggagaaggaaatggcaacccacttcagtattcttgtctggaaaatcccatggacagaggaggctagtgggctatagcccatggggtcgcagagacagacattactgagtgactaacactttctacacttcacatgagacaatgagcacaacttatacaaacactgtaacacaaatcccaaagtctgagttgacatggtcctggggtaaattaatggtagtgccagtttttactacttttctgaggtggaggttgggtgtgatatgtgatgtgtgtgtgtgtgtgtttagaaggagggagatgaaggaagctgttagagtcggccaccaccctccatatccccatacctgacataaaaactggttccccctcatacattagaaattcatccagattaagtggttcagttaaaacgaaatgcactctgggaaaaaacctgagagtcatttacaccttttaatgcactactctgcttttacagaagggtgtccttcccccttaattaaaaggatgctcgttttctttggggaattagatgggtgatctctcaacacagagttatttccatgaagagaagatctaggtaggagaaaacagtaaagatttcagcaaagagagaagaggataacagtgaatgcctgatgtgtggggatatggcaggaccagttaaggaaagacatgtcaaaaataaaatcagggagtcccagtgacacgatttgctttctttaaattttatttgggtttggtaacagttccacacatgcaatactgttttatctctcctgacatggacatgataagttgtgaatatctggcctaaagtcatccttctacagattggcatgtatctataggtgtgtgtatctatctatattaatatatagatacagaaatataaatatatatatatagagagagaggtgtgtgtgtatttggataaacagatattttttatccttttttccctactggaactcaaagagagttctcaactcatactgtaatatatatttcttgctttgtgaacacagtgagaacatccatatttgtgctagagtagccatgttttaacacatggtgtgcttcagtaaatatcaagcttaaaaacagaagtagacaaagtagtaggtctggccaattacattgtgatctgaaaatactagtgatttattagttgctattagctaaccagctgatctctatttgatctgtgtatttattagttataagtattaagccagcatgtattgttctactacaggaactttttcagcctctgccttgctttttatatgaaaatacaataaaataatttgagttgtgattacttaaaaaaaaaataaatcctgcagctggaattaaatttcacactgaaattcaaccttgaaaggaacagaaatatgaaactaatgcaaaaagtgcaaaaatttccatattcaggttaatgtttagcaacagaaaagaataacttttgtttatctctgaaaacagctttctttatctaaacaaatgactagaataagattaagaaaaacctgttttggttttttagatacacacacatattccaatttccttttacacaatgacttttatgcaaataggtaccacacaatctcctgacctcttttaccatcacacccggacaatgacagttcaataattgaaatggtacatatcgggtatatttgattttaatttgcaaagttggtcttaggcctattgaaatgaaaatgcttatgattctttgttaattccaaactgatcagattattatacttcctaccagtttaataaaaaaaaacgtaaaaggcaagtgaagctaattataccactttttatttccttgccatatacattgcccaatgtgtggtgtttttttttttttgcattctcttctgtgaccctcccccacaccttgattttagttcttaacctggattctttcatccacaacatggataatgagaaaactccaaacatgttccttgggggactgttacactaaaagttacgtaggactaaatcccacgtgtcttcctttgctcaccatggagacgggagattcattcaccgccctcagccaatttgaaatccaaatatgaaaacagccttatggaattcagacagatgactctccttcacaactagcagatgcaagaagaaaaaaaaagactagtataattaagcttttacctttgatccagtgaagctgtgaacacctcatttaaaaatacatataaaagcagctgaagcacaggtgtggcaagcatatttgcacacccagcacaggatggcagtcaaccaatcagctggccagaaaagtttcagccattctaaggcaagaataaggtaaactgtgaatctgaaatattaccagagtcttgtttgttctcagttggaatgtggagtgctcagtggttttcactacatctttctactggacactttagaaaaggattgagatcacttaaggggtagactaaattgcagtgcattttttaatgaggattggaagtagtttctttaatacatttctcaataaatgcattagtccattattcatcttacaaatatttattgaggactcattatgtgaatatcaattgacaggaatttgtagaggatgcaaaggcgtgaaattagaaaaatataatcaaatctaataaagtggttagctgagaatactgttttggcattatacagatatagatacacacaggggcttccctggtggctcagacggtaaacaatctgcctgcaatgtagaagacctgggtttgattcctgggttgggaagatcctttggagaagggaatggccacccactccagtactcttgcctggagaatttcatggacagaggagcctggtgggctacagtccatggggtcacaaagagtcaaacacaaacgagtgactaacactttcacttcatatattcagtactgattaacctcattttaaatatactttcagacattaaaagagaagattaagtgcaatctgcagtttcaatttattgtttaaatttcttagcccaattttgcttcatcgtttaaatttctggaggaaaaataagatcaaaatttgaatagtgcctaatgtttcagagacgtttgcttgaagaaatgagcaagcttttcttcacaacaacaaaattcctttacaaaaaatcctaaggaaaagaatactgccaagaaaacgaatgcagctttgtttgtttttgtagtcatcgttagcaatagacataaagttattcctttcttttttttttggagcccatatggaaagatcatcaacacattctgcctctgggttctttgccaaaataccataacccacaagccttctaccttaaacatgaaaggaaaggtgttgttctggtcaaataaagaaataatttttactagcatacgtctaatgttaaagctgcttaaatcctgccaaatacattaaaacaacatctgtaaaacagattttcattaaattgatcaggttaaagttaagcagctaggcagatgatgcttttaagctaccccttaacctttaacctctaacctccttaaactggaataaggacacacacttctctgaggtaagactgtttcaggttgaccatgcaagaggtaaagtggcccattcaaattgccctgacacatccccacatttgggagtgttatgaatcaatatgctgtcaatgagaagaactgtttttctcccagccatgtatttatctgtcttttcactgctacttgtcactttcccttaaagtctgaataattcacaatgcaaaatgatgtataattaaactcctaatgaaaatgaattttatataagcaattattgtctagtcattagctcagacactgttttaagtccaattttaatattttcaccatattacaaaccatcattttttccaggcctaggccaatttgttagggtctcatttaaaagcaattaatgttacttatagagcaattttattttgcctacacaggctgaccaagcttgctaatgtcctcattactgctcttgaaaatcctctggatctgacacacagtttctgtgaatcagtttaaaaactgcatcctcaacacattgctactctggaggaattttttctagtgactgctagaatgaataaatgctctttgaaggctgatgcaaaataagagtccagctgcccaatactgagtttcagtagctccaatatttatctctttaatctttttaattcaaggtaagcttgttcacagtgtgtttttatttgtttgctgaccatttggagacattaccccacaaggacacttaggtatttaagagataagtaaataaagaagatggtggggagagttaatttgtatatgacacaacattttgaaggtaagagtatatatagctgggcttcccaggtggctcagtggtaaaggatctgcctgcaagtgcaggagacacagggtcactcctgatacaggaagaccacatataatgcagagcaactaagcctgtgcacctcagctattgagcctgtgctcgagagcctgggagccacactactgaagtctcagcaccctagagcctgtattccacgagagaaaccactgcaacgagaagcctgagcagcgcaactagacagtagcccccactcactgcaactagaacaaagcccacacagcaatgaagattcagcacagccaaaaatgaaatagataaaaatttaaaagagagtacatatagcctttggttctggtatctcaagctctctctgctttaagggcctattcataaccaagttctatctcatctggttgttatacaatcaaagacaaaatccagccctctctgaaggggaacttcaagggtaaccctggcacctagcaaattgctctgcagacagtgagggtggtcagtccatattcatggataaacttaacacacacatacacacatgtaaataactgtccagcaatgagactaaatagcctttcctgggaaaatcaacaagaatgctctacctttctttagcttcccacatgagattaataaagcacaaaattttgtatatttatatcttctattcacaacatgttaatttaaagtgttagagctgtgtgaatataagcacagttcatgaatattctatatagctcccagggtcgagatctattatttatacaaacttaatgtgttttttttttctcccaggtattctaaaagttttaatagataaggaatcaacagaagaaaagttgacaattgaacagctgtcagctgtggctgtaaaagcgaagaattataatcattctattctgttttcaataccatcaacttagaagttttccatcttatgttgagggcctgcactccccttaaattgtgtaacccaaatctaatgctttcgttattgatccatggagcaccaacatcacagacacaatgttacaaattctcacaccacgactttaggttttcaccctcggtacatcaatccagcatttgaacttcaagaaacaacccaaacaaatagtggcaggccaacccgaataaatactgcctgcacctgccccagatagtcacattctgctctttttgtggtctgtttatagtttgaaagcatatttgaagagtcgcaggtatcataatcgccgggtgattcctgatagtatagttatcactgatttctagtataaatcaatagataacacttgcaaaatggattttgcaatcatattagagcttgttacagtgactaatggtttgcaatattttctgaattttaatatcctctggacaaaagaagtttttaataagttaccaagttattcatcatagaaatcaatctgttcccactgtacatgaaccaagacaatcaggccaatccagtacacaaactgcagaaaataaattatccagtaattagggttcagaagaagtcaagtcaaggtatgtgacaaataagattcaacacttggacatattcattacatctgcaaagcttcttcccctataaaagtgttatttgccatttaatgaacacttttacctgtgccacacccataaggggacgggataaaaacattactagcttgggaagtcaggcaaaataacaacagagttaagcagaagactttcaactgatcctaagggagggtgtctttttactcagtaccaccagaaacttacaggaaaacacacacacacaatgtttggatcatccttgtcaccaaacaaaaggtgatgcattcacaaggcagtgctgtttttgtcctctgctccctgaaaccattcatacttagccaagagtggcgctcggttgttgtttttaatcattcaataaaaagaggtttaagagtattattttataggtggaaacactcaaaaaagtgatgttatttcagggcaaccagtaaagtgatcagtcccacagagacaggtgtaaaagggacatacagcaaatcctttaaataaattctccaattccatctatttcaatagactctgcatttagtaacgtgaagcagagactgtggctcttgcccttctatttttttttctcctctctcctttttccttaacttgcagatctgcgctccaagctccgaaacagttaattccctcctccactccgtgccaagagaaatggatgtcactgcttaccttgtagagcttcagggccgcctcgtgcctgtgattggtggtgtgcaagcgtaatttgtccacgctgttggtgtagtagtcacaggcattgcacttgaggtgaacggggttgccaatggcaatgcacttcagcctccattcattacttttgcccccttctttaatgtgagccaccagttgatatttctgcatatgtttatcagtcttgcagtgaagctggaagttggctttgagctgagtgttgtagttacagagcttgcactggtagatatctccaattacagccctccattcctcttcagggagagagcgctcgctgctcacatgcacgcttagggcctccaggctgtcagaggtgaatttgttgcaaacagcacactggaatagcttcagcgctgggtcactgatataaggtgacagctctcctgcagtaaggagggacaggtcatcacctattagctgaccactggcaagccggatttcaggcggcagctcattatttactacaggaaaaaaaaaattaaaaggaaaaatagagactggaaaacacagtgcgcacaaaggaatctgtaaaataaagtcttgacaaggaatgtgctttctctagagcttaaactataaaaagccgtaataggattgaatcaggatcaattacaatcatccctttcaacttctaaattccctcatcagatagctttaattactcctactgggcatgatgtcattctgaaatttgtattttcgagggcaggaaagtggatcaataccataacaaaacagtcacgtgcttgcaatttaagcgcccagctaaacttacacaagcgctaattgttatttcgcaatttgttgaaaagcttgatgagatttggctaatactgtatgcatgcctgtaatctactgccaaatgtctgggataaggtaatggtattactgttcctttaattatcttcaatcacagacacaaaaatcttttttcaaaaatatttcatgaaaaataatggcataccattcagaagctcaagtttgatatcttagggcataattgacgctataaacctaggaagctatagctcaggatgccaggcaattaatgccaattagtatttattcatcagcctattgcaggcagacaaagtttgctaacttcttttctgctctcccggatccctcaactccttcctctctcaagttaattcaggtttgaagcgagacacaaagggtttgattagccagctgaaaggggaagtcccttccagtaaactgtccccaatttgtcggcactcaccactttatcggggtgcatcacgtcaaatcaaaaacgtgatgagaaactaacagcagtgcagaaaagcagtaaatactgaccaagtcccggggccagagcggccgccgtggcagggtccagctggaatggattgagcatcagctgtgggtcgccagggttctccaacttcatccccgtcaggcctatgttctgggccaggtagtactggtacagctcggcctcagcaggggcgaggcccaggtgcaggttatgctggatctgcttcatgttctgttgcagaagcatcatattgtgcatgtgcttctcgctggtcatgtgaatccgcaggttccgcgccacgttggtctcgtaatcacacacctcgcagcgccacgtgggtttctgcttaggtttggatggagagggggtcccgcagccaccgaggctgctgttgggggctggggccgagtggccaaacacctgctccccggtgccgttttggagattctgcacgttgttcaggtgcttgtccgactgcatatgaatactgaggttgcctttggtcgtggtagagtagttacaaacctcacaacggaagggtttatagccacatgtgtagctctcaccccgggcgagcctagggtgaggctgtccagtcttacaataaacacaggagcctcccggctcggggtgtttctccttcatgtgggcttccagggtctgctgatacttgtagtgccagttacatttgggacacttgagggttttgcatgagttccttgagtgcatcatagtcatgtgacccccaagagaccgcgaggaccccaaaaccgtgtcgcacttgggacactcgatgccactgcctggtgagccatctcccccgggcccgggagtacccggggcactcggggtgaagccatgctggtgaggtgcagccgagccgtcttcatccccccgggctgtctcgctcaggtgagtggccgtggcaccctctttacttgcgctggcttctgccaagtccttgccactgatcccatagctgcctgacacacccccaccagccctgacggcggcagcctgttttttcttttctgggtcatcagagacagtggccgaggaggacgaggggcccttttcaatgaattttagcacactggatgataaaggagaaatgctttggtttaaatgagggaaatctttgttaccgatactgtcggtgagttcccctaatacttcctcgtcgtcaagttcattggagtatgcatcctcttcgtcctcatctcctgcctcggtgggttcgctcttgactgggcactccccgttggggtgtaaagcgttgctctcttttggcctttcacagttgttctcttggtctttgctctctgacatcttgctagactcagacgatgagtggctgagggagacggaggtaattggggtgttcactactaaactagacagcccccccagagtcacttcagcctttggcatttgggtgatccccagcggctgctcggcggagccgggggtactcgggctccccttcaagaaggcaaagccagccggcaaagagtcaccattttcaacatgaaaagcgctccataaaccgcggaaggttgggtcgggtcctatgaggtttgtagtagaaaaatggggataaacagaagtggatttttttggttccagaaagcttataagaggttctttgtctttgccaatcccctgtattatggccgagacgcatttgttactaaggagtttctgctcctcctcgttaagggtcatccgatggtcatgcacagcatgggttacaaatgacctgatataaccgaaagacaacttgcacaagaaacacattaaaacaggtttccttttcccatcgctaacacaaccatcgaatttggacaagtccacattattggggacatctttggacacacaggagtttttggctgagccatcactggttagatagtctttctctctcttgtgtcggagatcgtagacacggaaactgtgcaacacaggaccaactcctgctagtgctgaggtatttgggaaagcctgatcggctgtaaatggtttcccgagggatgaagcgatatgaaaagtgttgatgatctgtgggtagaacgacagaggcgcagaagcagactgatcacccttctctccggcagacgccagggagtccaggaacatcgctgtagagaagagtctgctgcttgccccactctgtgcattctgcccactttctttggagtcctcgatgatataagctgagccatcaggctggtaaacgatctcccctgtgagattttccacgtcactatcctccaactcgctgatctcgctctcgttgtcatccttcaggccgggaaggcgggcattcgggcagtggtgttccatgtatttctgtaaactgggaaaagaggtggcacattcgttgcacgggatctccttggctgagggaacctgagtggcagccgcattctcgacactgaaactcagcaagacttcactcttgcgctcatccgttttcaggttgtcatctgtggagctgtttgccctgtcgggctccattcctgcaactttctccggcacctcattatcgagttgtgccgttccacatagctttgatgtgctctgcccattttcctgccttgagataggaggggagtcacaggtttccatggcaattgctacatggggatctcatttcatccagcctgtcagggacctggataaaaaataaggtgagaggagccatttttattaaataatgacacagctcactaatagcccatcactaatttacagctgctgtaaacttgactatctaaaaaggtgagggggaaaacttaaaaccagtgtacctatctatcacagacagactttgtataaatgtagcaaaataatgtagatagctatcacagacatgcctagacatccggagtgtttttgaaatcactcttgagcattcatcacaaatctaaaattcgtatcagtaagctgtatacttttttcattcctgttttctgaaaatggatataatatatgtaaaagctttaaaaccccctttactctgatagaaatgtaaatggctttcatagacaacagcaggaataaaaagacaacacaaataacttgtaatttaaaatttaccttttactttatcaggcagtgagtagaag

SEQ ID NO: 120 - DNA, 37021 bp, Hippotragus equinus
  source 1..37021: mol_type = genomic DNA
accaatccatacatttctgccagaagtcctactttaagctttatctgtaccaaagactgccacgtgtgttcttaaaatcaaccaccaagatacaaattaaattgcctgtgtgatgccatcaaacgggtgtgatgccagaaggaaaaaaaaacagaccaaccaggacgtttttttctgtcccttttagatcactggatgacaagtttacctgaaaaaactgatgtcaataaaagaatgcatcccctgtcctgacacagtttatagcatttagctgcagaattcctcctggacttgagaaacccaggtagcacacttggtttttccaagaggtggaaccacacctgctctccgcccacctcccaccatctctgctaaagcatcaagggtgctaggagcggaaagtgtgggtacatccactcctgtatctacagggggcggagtcttgggttgggggcgtggccccgggcccggcctctcggcggcagttggctccgggggcggggtcgggcctaggcttcctgtctgcgcctgcggaatagctgtttgaccccggaagtgcctgcgctctgggagctgtcaccgtggaccgcggcggcggcggcggcggcggcggcggcggcggcacatcgctggcataggagccgccaaggtgagtgcgtggctgatccttgcggatgtggggcatcggacctgggaggggctgcagccgttcctcacgcggcctcgggcctcccgcctcgatggcagggccaaggcttaggctgccccaggggccatgaatcgccccgttcctcctatctctccaccccgacccggagtcaggccgccagaacttagtcttaggattcgaggatcggccccagaatgaccttggccttgggcgagacgctgccctcctaccctcacctcgagcttcagtttcctaggggttcattcattcgttcaacaaatgttatgtccagcgcctcctacatgggcacagatctagctaggtactggagatataaacagagcaacagaggaagttcctgccctcatagagcttacagtctagtgggcggggacagtcgacgacaaagaaatgcactgggtaattaaagatatgactgcaaccggaggagtgaatactttagatagggcaatctggtacgatctctgaggagggtaatattgaagcgagaccagaagggttaagtcagagaaactgagacaggagtagccttggggatgctcccaggccttcttgcacttactccaagctccccttcaaaagaaagccctttcctaaatttttaacttctgctgccctgcttgacactgaggatccactgtggggtggggcacagatatcgtcatgatcactgaccttgtcatttttagagtccagttattgcctagttaatttctactcatactgtagacgaaaactcaaatattccttgacatcctgtctctgtcgagtcagttctctttgttaaatgctgtcatagcctcatgggccttgcctgcaaagcatactcacagtattgaattttccttgttcatgtggctgtttggttcatatctgtcttgttaaccatcaagaccctaaactctgtgaagggcagaatctggtctgttatttgccagccttaggattctccaggcttcagtgcccggcacatagtaggtactcaaaaactatttgaagggacaagtaaggttattaacagtttttgctgtccagtagttcatagaaggtctctcccgccagcaggctgttaccttctctttctgattatgtctctcctctccttacatgactcctcgcttcgtcttcagatgaaaagccaaaatctttagcacagcatttgaggctccttttaaagtggctccatcttttctagccaacctcttctctccacttcttgtgttttcagccacaccaagtgtctcccttatccttcaaagccacaggctctgagtctttgctcatgcgtgctctttgcttagaatgttcttcctttccatctttttctcctgtccttcaacagccaggttgtaggtcacctttcctgtgacattcttcctttctgtgctgtgctcgtcttggaaatttccagttacagctctaacgacacggattaatagtcatttacgtgcctaggtcccaggagataattgagtaaggatttgctgagtaattgaggaagcccaaatgctcggcttatgattgggacttgaataataataacaagtgaactttaccgggggcttccttggtggctcagtggtaaagaacccgcctgcaggagacaggagacatggcttcgaaccctgggttgggaagatcccctgaagaaggaaatggcaacccgctccagtattcttgcctgggaaatcccacggacagaggagcctggcaggctacggtccatggggtcacaaaagagtcagacgtgacttagtgactaaacaacaaactttaccgactgcttattatgtgccaagtactatgctgaccgcttagtattgcttacttcttgtgtcaaccctgagggattatgagattatgtactgttctcatcccgattttacagatgaggagatcggagcgtaaagaagttaaggaactgctcaggtctcaacatgggtaggatggagccaagacttgaacccaggctgtggaactataaacttctcttttgaccgtcataccagcctgagtctaaactgcccttacaggctctggcctgtaggaatagatttcttctaaaagcaggttgctgtccgttcctgtctagacctggactctgggaactagaatttacagtgtggaaagccgcctcctccttatgactctttacccatcctaggtccccacactggacactcctccagtctttggaaggtgagcatggaaaggactgggcccgggcttcatttcgacttctgcactggtgagctgagcactgatgtttccagctgtcctcccagcatctctcagggattaggaagggagtatttttagcatactcagcaccggagacgcaggtgccaaggcacaagagctgggcttcagtttcaacttggctactcaggtatttgcctgagcaaatcagggcccctctttggacatctgagcataataatccttgtcgctcttaactggactattgtgaaaggctagtaagacagtagctcaattagaaatcatgtattgactcaatggacatgagtttgagcaaactccgacagatagtgaaggacagggaagcctggtatgctgcagtcgatggggtcacaaagggtcagacacgactgagcaactgaacagcaacgacaaatatacagcagatggtgttatctacatttcgctgaggtgaaaggtgaaagctcagtcacagggaccatgtgtttgatccactgtccactgagatcctagtgctagaatgggtctcggggactaggcagattagactagggactagttccttctctttccaccccatgtgaagatgggtatcttcacagtctttacagtagcccctgaaccaaggttccttgtgcaccaagctgcttcccacctccttaccttcgttcctgctgtttcctccacctgggacacccttcttcccagtctccactatcaagactcaactcaagctctcctgagcctttaggcgctcctctagaaatgctctccctacagccacaagcccctgcccccagctcaactgccctagactcagcacagcaaatggttaagagccagtctgcttcatcagccactaactctgagacctaggggaaattttttttatcttctctgagcctctgcttcctcactggtaaagtgttagttgcttaatcacttctgactctttgcaatcccatggagtgtaacccaccaggctcctctgtccatgggattctccaggtaagactactggagtgggttgccactcctttctccaggggatcttctcaatccagggactgaaccagggtctcctgcactgcaggcagattctttaccgtctgagccattagggaagctcattggtaaaatgaaggtaatgagattaatagcaccaaccctggacttgttacaagcattcatacatgtgaagccagttagggtgtctacaagcgagtgcatgctgagaaagtggcccagaagagcagcagcacccgagaggcatgtttctgctgctattattgtcatcattattactgcatcggagctcccacagagcagagaccaggccttatcagtctgtcttggtaacactagggcctggcctggtatctgagaaccaggaccgcagtgtctcatggctggccatgtccctcagcacctcagggagggctcaggaggtgatggtttcctcatcctacccttcatacatcttcatgttgtcattgagatgtgccagccttttgtggcatgtcttcttaagagcccagagtcacttctgttccatgattcagccaatatgcacatccctcctgtggatcaggccaagtggcattaagaaatgagtgttggactggaagacaggagacgtggggtctgcccctcactgactctgcggcctgtttgggcctctctaagagaggaggtcactctggcaggtttccgtgaattctctgtgaaaaccttctggcccttctgtttatccatatccttcttccctgaagcctagaaagtttgtaaaatcttaacaccctctacaagggaggaaagtcccatggcttcaacccgcccccccccccccaaatctggttaaaatggtaagaaaagtgtcatcatattcagctgttcatcaactatttcatgaagccacctctggaccaggcctgtgctggtcacagcaaaggtagcaagagaaggagaacccaggcacaggctccccagagctcacaggccaaggagggcatggagctggggccatgagaaagataatctagttacttttaaccagtacttcacgacttgggtgggaattggagaaggaactgcagcccactccagtattctcacctggagaatcctatagcagaggagcgcggtaggctacagtccccggggtcacaagcgtgggacgtgacttcgtgaccagaccaccaccgtatcaggtgtcacctggggagtgtttccctcctcagctgggaactgccactttaggcaaaaaagtcactggtctaggtgagtagttgtgggaaccaggcctttgaggcccaccaggagccccctgaggccggaggttgaagcttgtctcctggctctggggtgagccccagagcaggcccctgcccccggagcctctgcatctgttctcttcctcccatccgtattcctttcaggagggccacgcagcacaatgcccgccttgcccctggaccaactccagattacccacgaggacctgaagacaggaaagctgaggacttcgcctgcactggtgagccagtgccttgaggctgttcagcccgatattgatattattgaacttgcaatctcagaagcaaaaaagtaaattccttctttatcagttctatggtcctacaaatgacctgagggccacagtctacgtttcaggagccaggatgctgttaggtctttccagccccagtgcaggagttttctttcccagcagtagcttgagtttgagtggtattttccatgtcaccaccccataccttccctgcaaagcatttcattttgaatcaaagtctgatggcagttctgactcagcccgagctggccgggtcacggggctggcccaaggctgctggggattggaccctgcaggaggcactcagatttcagatgggcgtttttcagagctgtcccagctgcggtctacttggcggtggggggcggaggagggggacactaataatgtcagaggtcaggtctgaatgggctacgaagcactacgtgcagacgcagcagggctggggagactgagaacggaagtgagcatgccgacgaccggctgtgggggagatcagagccgtggagaggagccaggctgctggaggagacagacgcggggacccgagaccccatacccccttgctgtttccccaggaacattattagcttacttgaacaaggtgggaggaagtattttctgagtgcttgagtaaagtcgtgggaaacaagagcttggtgttttatttcctgctttctggatggcttcctattgcttcctgactactctctaataatagtgcttaatatttatagagcacttgctctgggccaaagctttcacctggattatctcatggaagccaaaccacagccctctgagtaggcattttggtcgcccccattttacagatgaggacactcaagacctcaaggtcacaaaactagaacactaggggagtcagaacaggaccccagctgagctgtccctggagtctgtactttcttcaccttcctactgtacagcctcttgtttctttttcgtaactttttttaaaaatcgaggtagtgttgatatccaatgttgtgtgtttcaggtgtatgacatagtgattcacaaccataaaggttatattccacttataattattataaaatgttagccatgttccctgaatatatcctcatattcatagctcttttaggtaaagaggatattgattagaaaatcaggaactgttctgtacagtatgttagccattcaccacatgtggctgtggcgctcttgaaattgggggtgattcacccaagggactgtatttttaatttagttttagttagtttaagttaaaatagtcccatgtggtgagaatctgctgtcttggccagcacgggacaggtctggagcggttccgtctctgccgaggttctgttggacagtgccggtggagactggttccttgggcccttccccatgtcctggacaccaggctgttagactgcgggccctctgggagcagggactggtcccttcccttactctggttttccagtgccaggtgcatcataggttctcaggagacatccagtaaatgagttaaggactcttgccgcgctttgggacagggcctggagctacagagtgaagagactgccctggtggggcccacagacggagaggaagcagactggtgggttctctgcagcatgcatgatcaggatgtgatggaaggaactccacgctgctgatcgagaccagggaggggcgcatggaggtcttgggtggtgggagagctcacgccaccagggacgccctgctgtaggagggagatcctgaactgcatgtggaagggtgtataagcaccagccgggcagagcaatggagaagggcgggcctggcaggaggacctgggtatattgtccccgagtcctgagagcctggttcctacaccagcctcctggagtggaagcggtattgcagagttaaggagcccagccttgtaaagaaatcaagtttggcacccaagtggttgaatgggctcttgagaaagataaggatcatttaaggggagcatttggagaacagtacagaatagtttcttatcaagatgaacagggcacaagtttgatgggcagggcatgttcaggaagcttcatggggcaagtgggacctaggccaggcctgaagagtgggagatacagcgagagactgcagctcctctccctgggatcctccatggcccctgctcttgggcgtggcgtcggaggtgtttcaaagaccttggcaggacctggtccttcattacctctgtgcattcctctgatcaacctgcaagtgtgtatggagggagtgctcaatgccagcccggctccaggggctgggactgctgtgtgagcaagactcagaccccctccagagacctgcagggtagcggggaagacagaaggcaggccctccctttcaataactttattgaggtgtcactggaggacaataaactgcatatatttatggtacacggtttggttggttttgacatctgtaaacccacatgaaaccgttaccataagcaagataatgaacatttctgccactcccagaagtgtcctggtgcccccccaccccctattatagtctaccacttcctctgtccccatccaccgcaaccaaagatctgcaggcacttctgatgcaggtcagcaagtgctgcagtcagggaagcatagaatgcaggtgttgagggagccagggtggacccctcacctaactgggagacttcctgaaggaagtgaggtcagagctggggtcagaagggcgagcagtgagaccagggtggcctgcggcaccataggtcacttagcaggtgcacagtgtcagctttggctcagatcctgcctcagttgcttccttagccctgtgaccttagctgagttcctaaatctcaccaagtcttggttttcttctctgtacaatggggagaatactctttccctctgagacagttgtgagttaaaaagaaatggactgtgggactggcctgctcagcagcccgcacagggcagtcctcagtgagtgatggcttttttctatcctttcagcatctctccctccaactccacctcccactgcccagtgcaatctgtgcccccgtcccctgtttttttttttttttttaatggcccgtctttatgcctccataaatggactctgtcttccatctacaaattctgcttcacctccaaggtccagttctggatgctgcctggcctgggaagcggcccctcgccccccaggcgctcccacagtgcccctgccaggtttgagctgtctgcgttgtgctcgtctgatgacttagccgtgcatcgtcccctctgcagagtgggctctgggagcacgccgactcccttctcgtgtgtgcccccacacctggcagagcagggtgccagtagatgttcgaaggatgggttgcaggaaggtccagtctcaggggcatgcacatgtgtgtgtcatttgggcaaggggggtcggtgagcagcctggcctgagaagtgacctaagtgagaggtgaggcatccaccggtagaggaggggaacttggaaaccacagagaagaacttaggcccttgagagtagttttgagcttgtttcaatcagcaggattccttttgtataaattgtgatttaaatgggcgggggcccctgtggaggccctcaaccccccaaggagccctgtggaactcaaaatcttggcagtttgcgttcgggaggcttaggtggttctcgaagaaactgacccgtcagccgtgacttccctgtcccccctggactgacaggcctggaagtgggtggactgtggttgacaacagctgagacgaaaacaggtggcctccttcctgtcaccacctcccccgcagaaagtcagaggggagaaccgagctcatcttttctttatgcgaacaaagtaaggtttgttcccggcaaggtaagggttagaagagagcacttgtgaggctaagccgagacctgcaattacttgattagcatctttaccaaaaaattactgaggtttttctctgattatacaaagggaacagcgcagtgatatgtacagtacgacattgtttgtgtcagaaagatgaaaatgggcccaaacaaatgcctcgtgtggctacattttaatgtaaatgcctagaaaagggcagtgaggatgctcacgggatggggaggggctccctctgggtggatgctagacccccccccgccccgccccgtggtggtcccaggggacttatctttctgtactgttgtgagtttttgaaaaaaaaaagaaccctcctgcctcacttgtgtaattaaaaaaaataatacatgttcttttttaaattggaaaatatagtcgagtcctaatcctttctattagagatagcaactgttagctttcaggtgtcccccaacccccggcccgacactcttttaaaaaataaagtccatagcagtgtgtgaatgtgttaaatatggcaccttttttaaaatcccaaaaacggtcatacaaaatagaggagtttgtgtcttgctttttcttcccttaacctctccctgtgtcattaaacattctccagaaaacatggtatttaatgctctcctggcgctcccagactgcggccaagcctccctctgtcagagacactcggttctttatgcctgagggtcaccggttggaagagcccagggttgttgctgtgggttggcagaggggccctcgctgactaacctctgccacgttaacacgtggtttttggatccgtagcaccccgagcagaaggcagaccggtattttgtgttatacaaaccgccccctaaagacaacattcccgccctagtggaggagtacctggaacgcgccaccttcgtagccaatgacctggactggctcctggccctgccgcacgataaattctggtgccaggtaacattctaccaccattcccgctaagaccaggcacgtgccatgccgttggttggatgctgttgtttttctccccaggaggtgctttttcttcctctgcttcttacactggatccctaagagcaaattgtggttggaattactgtgttctgttatcagcatcttaactatgtttacacaaacgccttccgccatggcatttttagaaactcctgtttagctcacttatgcctcttcggtcccttggggttggtgggcgtgtttgccccaggccagagctgaccgccagtgaggcctgcaccggcccccccacaggccctcgggcctcagtggcgcagcctggctgttcctgtcgcctggcctaggtcatcttcgacgagaccctgcagaagtgcctggactcctacctgcgccatgtgccccggaagttcgacgagtgggtggccccggcccccgaggtcgttgacgtgcagaggcgcctccaccgcagcgtttttctcaccttcctccgtatgtccacgcacaaggaatccaaagtgagccccgggtcctgtgataggtcgcccccgccagctgacgcccctgggaatgcaggctctggaagtatcgagtttcccccttgtctcccgctttcactcctgccgctggggaagaagtctgtgccacctcccccatcctttgagccgccaggtcgcctgcgttacacccagtatttccatcagtggggagctgagggccctgtgccaggggacacgtgactctgcctttccttgcgcgtcagagggcgaagcatcgattctgattttttttagaggaccctggatgtgctgtctaaaagcctttactcccccaccccgggtttatttttgttcatttatttatttggccaaatcgtgtggcatgtgcaatcaggctgttccccgaccagggactgaaactgtgctccctgcagtgggagcgtggagtcctagccactgactggactgccagggaagtcctgccaccccattttaaaaataataacactgcccttaaacaaacgtaacaaaaatattttgcagacaatgagagtcgcccacaaaatttccttccctcaaaataaccactgttaagaggcctgttcttcagggaacttttttccttccaatgtgtttgtgtctgtgtgtgtggtgcccacatatttactttaaaaatagtatcttttctgtttttttagcttgttagcatggaaactgttaaatatacacagaagtatcacggctcccacgagcccattacctggcttcaacagttagcatcttgcctatcttgctttccctcccccactgagttttctgtttttcttggagtattttatttttgtccttttgaagctgtgccgtgtggcatgcaggatcttagttccctgaccagggatggaacctgagccccgctccattgggagcgcagagtttcaacctctggactaccagggaagtccagtcttgtattttaaagcagtcccagtcatcatggtagtttacctgtaaataactttagaatgaatccccggctgatggtttcatagggagcgtctgcttccttttacgttagggtgagtgactgtcgctccaggtcagtccccttggcttgggcgcatccttggtgtggacggagctgcttctattagccaggcccccccgatggacctgaaggttatttcctgtgagcctgctattaccctgccacgcacgtgtttggggaggtcgctcatcctctctttgctgttccttaggatcacttcatttcgccctctgctttcggagaaatcctctacaacaacttcctgtttgacatcccaaagatcctggacctctgcgtgctttttggaaaaggcaactctgcactgctgcaaaagatgataggtgagtaggatgtggggcccagggcctggggtggggcatgggtggtgcagaggtgacccccacgtgtccacaggggcatcagggcagtagcagtgggcggtgcttggaagtggcctagcggatgtgtgtgtcagctccgaaaggagtgactcagtggctgtgggggaggggcgacagacaagggcagacgagagctcctccaggatctcggagccccagcgtcaggctgggtgtcctggcccaaggaggggggcatttgcttccgcggtgacagctaaccgtttgcctgagtgtgcactggtgactctgccgatgccccacctgtgtcatctcgggcgatcctcatagccgccctgtgacgtcagcggtgtcaccacccccatttacggttaaggaaactgaggttgaatgttcgggacttgcctgcagggtcgtgactgatgagtggccaagctggggttgatgtcacgtgggcatgaggctcacactctgggcctcggtcactccctgcctcacgggtgacatggccgcctcagaaatgttgagctttgagttgcttctgaaaatggacaggggcaggggtcagaggggaccccctggggttgtggagggaacggacatcagcagttggagcctgtcgggaggcgggggtgctggaaagttcacacagaagctttgttgggaagcgccagaggggacagtggcgtttgccttagaagaggagattgtggcaactggcccagctggtcaccctggacactccgtcagccctcctcaccctgagactgtaggagagggtcttcctaatgcccagttacagagctcggtcaccccttgaaatggtttccttcctccctttcccctccaaccccagtgataaaggtaatataggttaatttagaaaattttggaagagtataaagaaggaggaaagtaatgatcaaattcctgccccccaccccccacccccagagatgatcatttggtgattattcccttctagtcttttctctgtattttttaaaactgtatttagggcctaatgcatatgaaatttcacatccagctttttcactggcacaacctccggtttctcattcaggtctaatcatcggcctgatcatcagttaagggaaaagacccttaataattatactatagaacgagaggatggggtgagtacacagaagcagcatggttagttagagaaataattatcaggccagtctagttggagcagggccttctgggagggagcgtgggggcaggggaagaagctggcatcagatggtgggggggtgtggggagggctctgagccagggacctggggaggggtacattgctcggtagctaaaagggaaggccctggagtcaaaccgcccggtccacagctgtattctgggctgtgtccctctgactcgggcagttagctgctctaagcctgagtcttctcatctgaagaaagggaagactgatgatccatccagcctgtaggatggttgtgggttgtgaatatgaggtagggcgcagcacagagccttgcaagttacagacactcagtaagtgtgagctcgtattgtgacgaggccgtgggagcctctgggagcacggagcagggcggggagccatccaccgacccggtcaatctggcagcatgcaggtggggagggtggtgataggaggccgtggaggaggccgggctttggcgtgggctggaaggggagagcctgggtggaaaaggacatccgagaggagagttgacggggcttcgtgaggttggctggagggagtgaactggggttgggaagcaggaggcagtgggggtgtgtgctatgagtagagacaaggtcagcgttgggtctggaggccatcaaccgctccgaggatacaggagaagaggccgtctagccacagacgggtgaggctggagcgagagagctccgcctgctgccggggttccaaatcattcagatcactggactcctctgagaattggacgaaagcttgtctccaggaagacatagcccctcatagattttgagctgtttaagaacgttctcatccccagattaagaatctgaaatcggtttacgaagggaagcactgtctttggctcacggaggctggttcacagacaagatggcaggatcaggcatcaggcgccccttcttattgcgtgcatgtctgtctgtctgtcagtctgcaggccccttctccacaccctccaacacatgcattagctctcttcccaaacccttgagcagaagacaggagacacagcatggggcagcctctgctttctctgccccagaagctcttgagcaaggcagatcagctggaagagggttgacaaaggagacagggggtgggggtggggggtggagcataggaactggccgactgtccttcgggcagaagcccagaccttgccctgtccccaccccccactttttttttaacctcaaggctggtgttgtgaatcagtgagtgtaattgtgaaagctgggcctttcagttagtctgtgagaccttgaccccacggaggacagccctggtctccttggccatacctcgcattcaccctgggtttctgaactgcttcagtctgaggacgggtgccatcgctttggctttctaattatttctttaggagatcaaaagtcagatcttccctgtcattgggatcagataaaggaaaagaaagagactccaaagagcccgagggtagactgtgaaatgtgatctattttgaccctcatagagcatccctgttactcaggcctgagcgtggggaggatcctgagagagtgccttcccccttacctggcactccgggtgtggtgggcaccgccttgtggcctggggattgtgggaggaggcctgctcccgacaactgggtcgggagactctgactgcagagggtgacacctgccttctggtggactcggcgctgggaggtcactgcaggcagaggggaagggcagtttcattctgtgaggctgaggatggtgtgagggaagaatgcaattctagggatgggagagggtggtgggagatgccaggagaagccagatcttgcaggccctttgtgccacggtcaggagttctaacttgaccttgagggtgttgctaggaggattcaatgaggaagagcagaggaagactgctcggtcactcactccccactcgtcaggagcaggaggtgggcacagatgatcagggaaaacttccttcacaggctgaggggtcagcacccatctggagtgggagatgccaagcaagctcctgccagtaacactttctggaatcccaggaccaagtggcctccagaaaagcatttagagaaagtccagccccctaatgactcgcttatacacccagccccatctggcctctgatctcattcattttcaagccctccgggatggggtgagggctgcagggttatgttgaaggcagccaaggacaaccctgcccaaggacggaggacacctaggactcagagcgtcctgacagccagccagccttcagtgccaggatcacagtgggatgaggaagccaggccccttttcgaggcggtgccattttgcacggtcctgcccctcaagagctgtgatcctctccccctccgcgttgggcagccggaacacttggtttctgtcccagtgaccgtgtactctaaccaccactctcacagcagcagtaaacactcggggcttccctgggggctcaatggtaaaatccagctgcaacgcaggagacaggagttcgatccctggggcaggaagatcccctggagaagggaatggcaacccactccagtattcttgcctaggaaatcccatggacagaggagcctggagggctacagtccatgggattgcagagagttgggcatgactgagcgactcaacagcaacacacacttggggaggggcttcattttctgggaataactgcacatgtgtggtaaacctccccccaggtctttggccagcctctcaccttggagaggggctgtgtacggctagcaggttcaatagtagagggtgagagaatttctagagaatttctccagaattggccttgcaggacccctggactgtagcacccaggtttcttgggcaaagagatcacgtctcctaattttcctggatgactcactcccatttacaaagccaacactgtcatccaaggcacagtgcccaagtgtgatcattccccggggacggcagggtgagctggtttgaccagggcgggtgggtcttttacgtaattcgctggggcagaggtgcttaaaaggttaaattgtactgaggcgaggcccctccctcaccctggggaagtttctaggctgggccagacctctgtgccagcagggcccggggccaggactgctctggtgcaggcaagctcaggagaggagcgaaaggtcacagaacatgctggcagccatgtggaacttgtcttccattctgtccacccccaccatctttccccaattcctacctttctcttctcttttcagggaacatctttatccagcagccaagttactacaatgacctggacgaaaccatgcccaccatccttcaggtaccagctcttcgccctgccctggggagggtggggggcatgggggcagggcaggcccattctgctacctggagatgttgctcttctttcctgcaagagtctgggagaactctcttcacttcttcacaccagacgcacctccagaccatgtgttctacccctcacttcattccttcaaatttgtcccttcccctctcgaacaggactgacatctaagggccgtccagcactcatacggagggagcttggggtgcactctgtgttgtccgtcaacagccatctgcccctgaggatacccctgtacgtttctcaagtctgagctctaaagcctcatagaatcatttttatgaaataatgctcattgtagaaactttggaaaattccaaaaaaataaataataataagaagaagattaatcttcctccgtaatcccgccaccaggagataagcactgttcacggtacctcctagaattttgctgctagtgtacttaaatgtggtgctcggttgctaagtcatgtctgactctttgcaacaccatggactgtagcccaccaggctcagactctgtccatgggatttcctaggcaagaatactggagtgggttgccatttccttctccaacttaaatgtggtgcgatccacaacgagctctgttttccccctcactattgatttgtcttttattcaatacagttcctataaattgccttgccctgggcatccagaaatacatgttgctgactgtctctcttaaatatccatccccatacacttgtctagccgatccgggttacatccacagggtttacgtacatttcgtcatcatcatcatcctcaccacagtcccacgggaaggatgtccccatgattcccttttgacacaggttccattctgagatggtcactgagctcactgtctcacctggtgtcccagggacaccggcatatatcctgaagattccaaggcagtgttggggtcaccagtccctcactgcaggacgggggtccccgctgccagttcaataggaagtgagagagtcacctcttgcgttcacaggtcttcagcaatatcctgcagcactgcggtctgcgcggggatggggccagcgccacaccccagaagctcgaggagaggggccggctcagccccagcgacatgcctctcccggtgagcttgcccttcagccggcttctttctggccaagagaaggcctggagcctccccactgctcacagcccctcaccccaccccgcaggcggcttggcccatcacacacgctttcggacatttcagcaggttttctcgcttcatttatggagttgcggaggaaacagcatggaggtttagccttcgcttagttcagctagacaggttcctgggtgcgtttctcatggggccattcatccatggcaccagcatgccccagcacatgccaggcccccaggctgggccacgaggccccagtggttacagaagcagatgcctgtgttagcacgggagttagagcagggacgagggtgcggtgggctgccctcctgcagcttgtgctgtcgtgggaaagcaggccttaaacaagcaagcgttccagaaaagggcacagcgagtgccgtgggaacagggcacctcgccctgtgacctgcagataagttcccttatctgtaaagtggagctctgacctgtggcccagcctcttgtttgagttgttcggagaatcagggagccctgcctgttctcaacatgctctccagacccgatggcgagtgggggctgggtgtcttggcctccctgggctgtaatttctgtgtgggacctccggcgctgtcttcagattcagggatgggttctccttcagcttcaaagagagaatcgtattaacctgaggcgaaaggtcacccttgacgcccctgggcacgcatcctttggagctgcggcaggcggacccgagggggaccctgggctctgtccgctttgcctcagaccctcggcagggcggtccctggggggactaatgcggtgtttttcctccggcctgacaggagttaaaggatgtcgtcctctacctttgtgacacctgcactaccctctgggcctttctggacatcttccctctggcttgtccgaccttccagaaacacgacttctgttacaggtacagcggttgcagttgaggtttgggttcacatccacgttcagccaatatttactggacgcttagaacctgccaggccccctcttccagcgcccgcctgcgtggaggctgcatttgagaaggacttttactgggggggttaggagcagaggaggagagggagaaaaacgccagccaagggcggggcagtttccattcagacccggtctgctgcagagccctcggcacgggtgggcacaggagtgcgagaggctgaggaggctcaggctgaggacttcggcctccagcgcggggaggcgcgcgcgcaagcagacgtgcgtccacgtggggccagctggtggggctgcagcaggaatgcagacgagggagcacagccctgtctggaggaataagagacggtttcagagtgatgcttagatgagaccttaagaatgaacagcaacctgcctggcagagaaagcctgcagtggcccagatggtggagaaagccgtgcagtgcagtatgacgcggggtgtgagtcggggagtgggcttggggagcaggcgaccacaagatgcggccccagggaagtcagacctgctgtgtgatgtgtgttggcagggagtggggactttactgtggaggcaggagggagccctggaggcttctatccaaagaagtcatagaaagatcctgctgtgatggagaaagaccaggaggggatacagcggagggagaaagaccctctttgcccacttagccccatgggcatccgttccttgagcagtgagaaaggggtgcctggacgggggctggtaactggctcgttgcccggcaactgtggggggtggggggctatcctgctgtcagtggcctcgggctgttcttgccaggcatctcccccagccattctgggagctatccaactccatccccccagccctctgtccactgggtcatttgcccagctattccacaaaacatttatctagtgcagacatgtgccagagatggcagctgctgccctgagcccaccgggtcccctgagctcagcctcccagagaatgttagaaaaaagtgccaatccacactgtccccagaagaaaagggtggggataggacttttaaaaatgttgtcacagttttttaaaaggtatttacctcatggcaaatgtggcaaactggaaacctgggaactccccagaggtaggaaatgaaatcactccgaacaatcaggctgttcttagacttattttcattcaccgtgagcactttcccattttgcgaaagcatcttcccaaatggggcaccgatggccttggaaagggtctctggagatgggagggtccttgccggaagagctgagtttccccaagaggtacctggaagacatcacaatggacatgagtttgagtaaactccaggtgagggacaggggagcctggcgtgctacagtccatggggtcacaaacagtcagactcgactcggggactgaacaacaacccccccacccccccccacccccccggaggcagggctgcagctccacccacctcagggtgaggaggaagaaaggaaaacacttttgactgggagtgaccctgcctttggcaagagatgctgcctcagacccacaaatagcctgaggctggctcggcctgttccaactgtgctggaggccaggaaggcatgctgagcagagtccttagtcccctccagggctccaggcaaggggttacctcaccaaacagcctccagctaatctctctgagcagccttctccgccttcctctctttctgtcctttaattttatgaacaaataatatattcacagggtgtataaaacacacctttgaaaagtctccctcccccccttctctacttctgttcctcacacacaaccattgggttagtttttttgtggaattttccaaagatatgcatgtaaatatgcacatatacgcaaataaacacattatctacctccaccctctttttaatatttcatatactggcatattgggcatcccacgtgactcagtggtaaagaatccacctgccagtgcaggagactcaggagatagaggctaaatccctgggtcaggaagatcccctggaggaggaaatggcaatccactccagcgtcttgcctgaaaaatcccatggacagaggagcctggcaagctacagttcctgcgattgcaaagagctggacatgactgagcacgcacacatcctggtatattatgagtgctatatgtactgtaggctttctgcttttaaatttaatgcgtatctgtgcatggaccaccttcagtctttggtatctctgagtagaactccactgtgggggaccccagaccccagagatggcactttaggttttttccaactgtttgctattaccaaaaaaaaacccaccaaaatacattgccacagaggctaactttgcacctaggtcactgtgtacctttacaactatatctgaggaataaattcctagaagtagaattgcaggaacagatggcacatgcatttgaaattttcacggatttcgccaaatcaccctccataggggctgtttcagtttaccctttcaccagcattgtgtcatggcaacgcctgactctgtttgagccaaactgtcctctctgtcttctgggtgccacgctgtgggcctcaaaagccccgccccttttggcctgcctacccacgtctaccaacagccccacaccaggaaaaagtggccaggagccagcgatcgacagacgaatgtttacagggcacattacatttgctgctgcagattcagctcagtcctaggaaatcagctgcttttctggctttgggaacttaagatgttcagagatagaattacaccccggaagagagatagctgcattttaaggtgtaagatcagcatcttctgagcgctgtgtgtctggttccagagaggaatagtcacgggggtgagcttatggtcaggaaacatgtgtctaggatggagagttgggttttgtgtttttttttttattggagtatagttgatttacagtgttctgttagtttcaagtgtccagcaaagtgaatgagatatatatatatatacacacatatacatacatatatagacacacatatatatacatgtatacatacacatatatacacacatatacacacatatacacacacacatatacacatatataggcttccctggtggctcagtgggggagaatctgcctgccaatgcaggagacgcaagtggttgggaagattccctggagaaggaaattgcaacccactccagtattcttgcctggaaaatcccatggacagaggagcctggcaggcaatgggccatggggtcgcaaagagtcagacaacttagcaactaaacaacaacaacaaaatatgtgtgttccgctctttttcagattcttttctcatataggttgttacagaacattgggtagagctccctgtgtggtacagtaggtcattattagtcacccctttcacgtgtactggtatgtctacgttaatctcaatctcctaatttaggggatggagagtttaagtctgagttgaggacaggtggctgtgaggttactgaggtgagaagccagctgggctggcctgtaccaggtatagatgtatcagagagaggagttccactctgatatcataggagatagggagctgctggcagtttctgagcaagaagaaagtcaccttgtacctattcctcaaagcttggtgcatcctgggtggcccgctcattgctctgtgagaatgagcccctctggatcttggactcccatctgagcaggggccgagctccaggtcactgcccaccaggctcttcctaggaccagccacagcggagcaatctgggctgagggagaaacttgtcttggggacaacctggcaggaagaaatgggccctcctgctcccttgtgcgtgctttgatttttctaaggaagtgtgagatttctgagctaatccagccttttaccctgtgtgtgtcattgcaggctagcttccttttacgaaatagccattcccgaactggagtctgcaattaagaagaggaggcttgaagacagcaagtgaggcggggacaaaactgcggcctgttgtgggagggccccagctcacccgtcctgggcttcgccgcccccttctctgtgtcgagggccaaggaccagggacgagaggccccgcagtttcagctagtgctgccctccctacctagcagcctcctggcagcagggaagcctttccccctcagctgttgctccagactcttccgctggttcctgagccaccatttgaactgacaggtggccctggaaccagccagcctctcagagcctgtcgccctttgccagctgctgtcagcggtgacctgaggctttctcagcccccgggggatggagggcggggtgggggccacctgcaaaggctgtgaggaagctcccctggcgcctttctgcctctcagatctacttttctttctctctggcctccaaggctgctaggtgacctgtggcagaggctctcccattccaagaaaaagctactggagattctccacatcctcctgaatcagacctgcctcctcccggtcctggaaagcaggtgggcgttcgggatcccctgcccgcccaggcgggagagccccctccccaagcccggctggggcgctgccgtcattgcacggggctccctcccctgccccggggttgcccagcaaagatgggaaaccgggaagaatgcctctttcctccgactggcagagggaggctgcagaggggtggggcgggtggggaaggagccaagcctgtctgcagggagtgagctcatcctcttctctgtgtcctgttccagctgcgacaacattcagggcttcatcgaagacttccttcagatcttcagctccttgctgcaggagaagaggtgagctgggagtagcagcaggagggggcccagtcctcccaccagccccaggagaggccttccgtaatagagaccctgccctgcgctcaccatgatctaagctttcggtgtttgtggctgggcagcagacggggagtggcaaaccagcctggtgtccccgccaccctctaagtcccggccccacccaccaaccctctgactcccgcccccctccaggttcctgcgggactacgatgcgctcttccccgtggccgatgacgtcagccttctgcagcaggcctcctccgccctgtatccttccaccgcagcccccggggtgggcctggccctgcgtcctgggtcctgggtcctgggccctgaccggattggacccagaggagtggaggaaccgtttagccccagaacacgtgggagccagctttccctgacaccctgttttgggaggagaagactgctctgatcctcggggtacacatagccctcctttccctggtctttgctgagcgtctggggctgtgtgaccaagagggactcagccctgccctcggggacctcacgcaggatgggagagggataagcaaacaggcagcgagagtgtcactcagaggcaggagagtcgaggggaggagggggtgtcacacagaagcgaaacccaagctgagaatagcacaaggaacaggagatggccacaccctgaactaaatgttccccgggcacagtgttgagcccatagacgtgagcagcctgcagggcaccgaggggccggggtctggtgggggccgggtttggctgtggcagatgagccctggggtggcccttgctgaggaatttggggtgagcctgcaggtgctgggagacctggaaggatgtgaagcggaggtggaccttgtcagtctcagacttcgggtggtggccacttgggttggaagcagcatgagggagggacttgcctcgtggcccagtggttaagactccatggtcccaatgcagggggcccaggttcgatccctggtcagggagctagatcccacacactgtaactaaagatcaaagatcccgagtgttgcaactaagacctggtggagcctaagtaattaatttttttttttaagaaagtatagagtgagagagtctagagcaactacccagcgtctgacttggcagcacccggggtactggagaggcacgagggcccgggaggaatgggcctgcaggccatttggatggcgggggtaggttgctcagtccagcctcagggacaccctgtgggccagcttttgcagaaagcccacaacgggttggacaggatgcccggtggcagtgaccccaccgggccctcctcctgggggggtctttgtcccaggacccttggctgccagaccctggccctgcccttacgcagagctgctttctgctgagtggcaggtactgggttttgaggctcctgtggctgtgggctggcctgcttccccaggcagcccgcggtgcctgcagggtgcagcccagatggcccctggctcagccacgcagtgaagggtggagagagggctgtggtccctgagagagactccttaacccgtcctcccagggatgagacacggaccacctacatcctccaggcagtggagagtgcctgggaaggggtagaccggaagaaagccaccggcgccagagactctgccacggccgagaaccctaacagagtcggggaggcggtggaggcgctcagcgggccatcctcactcccccaggaggaggaggtgtgtgacgggactggccggggcagcgggagacctcccttctgtgttcccgtgaggaaaagggtttgttttggggttgacagcttctgagctgctggcctgctccgcgctgcccttcgagggttctgagccgagggcgagctggaaggcctgtgaggtaggcaaggcgcttagccatcagggccttacttcccccgacaaggtgaagcacgggagctttttccacatgaactctccatcggtgcacacctctaaacagaggggaagccactgagcaggtgctgtcactccggacatcgccagaacccagcatcaccacctctgtgaccctcctgattggccgctgacccagggctctcccctgcatgtcgggaggcagcgtgacttggggattaagaccacacagctatggggtcaggctgctcaggggcgtatcctgattctgccacctgccagctctgagcccttaggcacatccctcacgtgagccctggttcctcccctggaggggggcgtggcagggtcctcgtctccacgtgggtgctcagagctgccgcgaggagtgagtgatcggcccctgggccccgctgccagacgccgctgtccttctgttaggccccaggccctgtgcccactgtcccagggccttggagaatggtggtcccctccccaccaccttttccccacttggcttcttgcctcagacacagaggagttttattactgtttttttgatttgtgaatttccttaattgaaaagctgaaaaaaacgtattccgagccaaaggggcgcttctccacatcagccagctccagcgattgcttttcccctccgatctcagtcgtcaggctgtcagagggggaaagggctggttcccagaagctgtggccacttgtggacagcctcgtccacgccaggctctgtgctctgcacttcttgtgtatcatctctttgaaccctttgaaaacaaccccatgaagtaggtgtagtctgggggctttataaggaggaaaccgaggttcagagaggttaagtgccctgcccaaggtcacacagccagaagcagcagctcagctggtaagccgtagctccccctttcacagaggaggacatggaggctcagacagacttaagagacttggctaaggtcccttacccaggagggggagggctgggactcagaccaggtcgcctgactccgagaccagtgctgtttggggctccctggcccagcccaggcctcccctcggtctcttctgcagtgcctgggggcggctgcagccccaggccccgccgtgtgcggtgtggagctggactcactcatctcccaagtgaaggacctgctgccggacctcggcgagggcttcatcctggcctgcctggagcactacagctacgaccccgagcaggtgatcaacaacatcctggaagggcggctggcccccaccctcagccaactggaccgtggcctggacaggtgggagcattgggtgggaggaagctcgtggcgcccagactgccccggggtcctcgtcagggcccttcccatctcctctgaccccactcctctttctcttgtgtcccatcctcggtacttccccacagtggcgattcccaaccacagaagctgacgccctttttggggaaacagaaacctcaggcccccagaggtcctcgcatgccccctgcagcgcagagtgggcgccgctgggcctccctgctccgcctcctgggagatgggggcgcgggcggtgactgagggctcgcggccctctgtgctctgatgttgctgcctgcctggccactgagggagcacagccaagcttctcacttccttcatactcacccgtcttttcttttgttttttggggcttttttgaccacagtacacagcttgtaggatcttggttccctgaccagggattgaaccagggccctcggcagtgagagtgtggagtcctaacccttggactatcagggaattcccccacacctaccctttctgagttgggcccactgcttccctgcagcccctgggggcaacaggaaggagtgtaaacggatgtttcttccatgaataaatgtttgttgaatgaataagtgaataacttccagaaagaagctggctctgcctttgaaccaactcctcagcttccatgtgcccattttacaggtgaagggactgaggccaaaaaaacccagctcaaatgacctctgtcttgcagggaacacaacctgtatgagtggcacgtgtgcagggtggccacctcccaggctggggcaggcttgggcaggtttttagcctgtgtcccaggtgtggctgttactggggagtggaggctgtgacggaccgcacgtgggagggggagcatccccctgaaatggatttctgcgccacccccgcagacaggtgaagccggacccaacgcccctgctgacgtctcgtcacaacgtcttccagaatgacgagtttgacgtgttcagcagggactcggtggacctgagccgggtgcacaagggcaggaggtgagtccggtgggccgtggggtcccagagaccccaactctgcaagtgcagagaggacgagagaaacccagggctgtcatcttgatggaagtggtcacagagcttccacgtggggctcccccatagcccagatcagtgtgctccctgcagccaggctccgggcctctaacagcctggcttcaggctccaaccctgtgtgcagagttagtgagtcctccttgacagcaaaaggccagcagggccaaaccggcccctcttcccttctcccatcttcggaggagtccctgggtgggagagctggtcagtgctcctcagcagtgctccctgactggtgcctttccacccagggacacaatgggagaacgaaggcctctgcccaggtgaatatattacatttgaaggccttcctacttatttttggtctatgtccttcgtacttttttggcattgaaaagtccattcatgatttattcatttattcaacaaatatttgcctggtgcttctaggccctggatttatgagatgctagggacacggtggggggtggaacagacacggcccctgcccacgtggcgtttggactgatcagcttggcaaacaagccctgtgaactcacagatgaaacagattctccaaggcggaggtgcgcagactcccaagcctctacctggggcttcagtccaggcagaaaggcttctcggagacaatgctgtgggcagacggtggaaggatgagggaggctcagttgtgcagagcaggcaggagctttccaggcagaccgaacagcaggggcggtggccccgaggccatggggagcatggcgagggtccccttcaccagtacagtgtacgttctggaaggatcccctggctttggattggggaccccttggagtgactgagagtcagcagccacacggcgtggtggcaggatcagatgctgacagcccggtgccagccccgcagtgttaatggagccatttcacggaatctacaaagctgggggctgctgggcaagtccagcgtgccttctccctcatcacatagatggaggcagcgaggggcagtgaggggagagggccctgcccgattcttgggacaggggccccagagctagaagcacaagctcttccctgctcccgggaccattcagcactggtggagtggccgtctgagggctcggggacctggcacagggcaactctaaagccatctggctggctgggcaggaagctattgcaaactgcttagtcatgcacgttgcaacatccccagatacgaggctggcgacgttgtcccgcctcagtgcccgcccttccaggccctgctgcaggagaggggcatgtggcgggggctgtcccactgctccaaggggcgcccggccaaccgggcagaaactgcgcagcagacattcactggcctcgtgctgggcagcccaggggttggggtttacagagatgcaggggctctgttcatatgcgcattatttatttatccactcagcaaatatttattaagtgattgactgtggccagatcctgtgctcgacacactgggagacacggggaacggggcacccaggcctctccctcccaaggcagacagagagacattgggaatgacttagaccgatcaagacgcgacagagtggagaggggcacggaggggcatggagggcctcagtggggttgcccgtcctgacgtgggcagggcggggcgcttagggcctgttacacacgagaaagcaagctgcacaaggcaggccacccttgagttaaaccatctgtgcgtcgttacagacactcgatccctaaatggtgcaagaaatgaggaactcttgtccccttgtgggccaggccagcacagggtagggcagttgaggcgtggttgacccgtggtgcagccacgtcttcaaggctgcatcttgctttctcgtggcccctgggtggccgcagcgtgatgtccagaaatgaccgggccaccaggaagtcagggtcaagtctttctggatctctcttagagaccaggagacctttcccagtggccccccacgtgaggcggtgagctggggagctgggctccagggctcctggagaaggggaaagaggaaggacctgtgcaaaacgaggggctgctaggagtgggggtgaggtgaggggcttgttaggtcggcgccaagcacacgtgctgcaggtgtatcgtagctagggaaggaggcggtgagggtaacgtggggtccccttactcctttcgacagtggtgccccggaagataaggcattctctttcagatcagttctgttgcctcaaaacgcttacgcaccctgtgtgcctcattggagagtcacagagcacattagcccattaaaggttctgacgagtcctctagtcagagagactggattccctttgtgaagctcagcaggtgccaggtctgcttctgggcatcgtctgatttcatccttgcaccatccctggaggcaagatcaagtctcagcaaggataaggggccggcctgtgatcacacactcaggaagtagccgagcagcctggagtcaggaggcctgtgctctggccccggctatgctggtgggagctgtgtggccttgggagggttacgtagcctctctggctccccgattcctcacccggaaaaggagggctttactgcctctgcaggcctttcagaaattcaaaggagagtgtcaccctctaagggccaatttgagggccaatcttgaaggacaggctggagcaggtgaggagaaaggtggttgagcctcaggggagcccgcatgtacctggacttgagggaggcagaggaggcgccctgctccaaacaggctctggtgctctcgcagcttggctgacctggccctcgggtatgtctgctcctggctgcttttgcccctttctttctttctttccttctctggcttcatatgaggtcatggggccagagccttcctggacgaggtaccctgtccttacctgtgtcctctcctaggacccagctgaggcaggggcagtttgctagccttctctgtggtgctgccggggagccacataaccagaggccacgcagcatgaaagaacctccctctgcccacactggggaccgggtggaccaggggccgtgggatggggcagggagaatgtgtcagcgctcattcatcctaggtcccctggcccagcgtggggcctggcacctggcaggacctcaggaagcctgtgttgattgaatgggtgcgcttttaccaggggctccacctgaacgagcttggccccttcacttgctctctgcctgtctcctctccacccctcagcttggcagagagagcgcctgctaagggccgaggccacggtcacaggctccctctcctggcatgaggtgacagattactgtggcccgagatggttccctggtccagaccaaacatctccacatcacggagcttccaagagcccttctccagcgcctcccgcgacccccccactcagccctctgcacccctattcgtttctgctttccttgtgtttccaggacgtgtgtgccttcatctagcacacttctgctctttgccactagactgagttccatgagggcagatccagatcttactcttctgaatctctccccagcccagctcatagtaaccccttattaaaaactgttgaagggggtcttccctggtggtccagtggctaagactctgtgctcccaatgcaggggccctgggttcaatccctggtcagagaactagataccacatgttgcaactaagacccagcacaacgaaataaaaacaaaaaactaaaaaaaagttgaaggaagcagatcctaacccacggtgcagggggccccagttctgatctgccccaggctcccaggccagacacagcccgccagagtcaggcgcctggccctccccgcactaaaagcctgttactagaagatttttatggacgctgcgggctttgtgtctctgtttttccccctacccctgatacattccagaggcccgatttcacagctaagctggattttcttgcctggcacctcatattgattttcccctgcagggctagaaattacactccacaggcctgtgtgtctgacaagccaagctcttctgcagatttgcaaagccttgagtccagaggcccgagtcaccgccgctgtgctgcagctcactctgttcccaaacgtgtccctctccgcccctggctggcctcccctgtgtcaggatgggagttaaacttccagacttttcttgccgtgccatctgacatgggagattgaaccgcaggccagacagggtctctgggctgaaaagcaggggtgagagggaggggctggggtccccgagctgattacgaaagccacccgtgggctcactgtttctccaggtttttgttcctttgcaatgattccggtgaccccaggcccctcctcagagcaacccaggttgggggtggggccctaccagccctctgtctctgttcatgtgcatagataaggacatcttcacaggaagagaggacaggtctggtctgccctctgctttttacacagatgagatcacactgtgtttctctgcgcttgcttttctcccctggaggatgtcttagaattctgtctccatcagcacaaattgtcgctcttgagaactgccacccagcgtcatgtggcccctgtccttgggccatgatggacatgagttgctctcgtttttcactgttacacatagtgctgaaaagaaaatccccaatcagacctctctgcgcgggggccaacgtttctccggggtggaagcctcgaaggggagtctcccggctgaaagagggggacacgtgttacactctaatagctgctccttggggaggggggccctcggaagtggctggacctggtgagccccacgccccccgccggtgcttgatctcagtttgcggcggccagaggcgggagaagtgagcagtggtttgtctggaccctcgcgctgcggccccctcccgctgccctcgaagcctgatggttttctttcgtgtctccccgctgttccctctcgacgtcaggaaggaagagagcgcgcggagcctgctgaacgacaagcgggaggtgcaggcgcagcggcagcgctatgagcagtacagcgtggtggtggaggaggtgggcggggcgggctgcggagggggcggggcgggctgcggagggggcggggcgcggcggggcggaggggaggcgtccccgggcgccagccccgctgcggggggaggtgggccagcccgggccccgcggacccacgcttcggccgtcgcaggtgccgctgcagcccggggagggctcgccctaccgcggggacgattacgaggatgagtacgacgacacatacgatggcaaccaggtgggcgccaacgatgcggactcggatgatgagctcatcagccgcaggtgaggctgttgacttggggggtgtgggcggccctccctcagcctctggtttatacagatcttgtaagcaagtcagtgaccaaacgagggcctgaaccccagcctcccgactcctggtccaatgctccctccagccctagccagccccttggccggctggtccagcccaccctgagtgaggagccatcaactgggtctcatgcagttttccatttttcttcttaactgcagaaaactctccccagtgggatcttaggaaggttccccaactgccccagtaaaggcattgctgccctgactagagaccacccctgccccaggactcagctcagcctccccgaagcccccacctcagaccttggtacccacacagagtcctggggcgggagcaaagctgacttcaaaggcactttggtttcgtcctggagggccctctcagcaggacgccctcctccactggaggctccggtctccaggtttaatctagtctttgatctccctttctgtctcaaccctcaggcccttcaccattcctcaggtgctgagaaccagagtgcccggcgaagggcaggaggatgaggaggaagaggaggaggaggctgcagttgaagcccccaaggtacctggttggcaactgggaggtggaggagagggtacagttctgaggggtgagtcaggggctgcgcctcgcttcccagagcctgagcccggccctgaggcattttcagcatcactgcctggaaaggaggtccctttgagcccaggatgtctgcttgaagagctgccggcttagaagccttctccaaggcccctcaagggcccaggggaaggatcagagaccgggcctttgagctgctgggttcattaggcccaggaacctgggggccagcctccatgcccaggttggcagttctcgacatcagagaggcgttagggctcaaggtcatctgtgatgatgggtttgaacattttctattttttagccactaaaatttttcttctagtgaaatcttaatgcttcatagaaaacagatgagagcagcgctgctcggggtgagcagggcccagccggggaggcttggatccttgactccccgccacgcccccgccatggcctcccaccagggtgacaggttcagttgtgtccggggccaggccaccaacgtcagtgagtagcagggcctgatggacactgaggctggggcagcaggcaccccttcccaggggctcctcagcacagcagaggcctggaccttccagagctttccctccttccaggcaaggggtcagcccaggtttttatgtcagatcctgccgtttccacaagttactgattccacttgttgtgttgtgtttttgacacagcccaggcccccacagtctgtctgtggtccttgggtcctggtctccccgagccttggcgccggcgaggggaaatgccagtgtccgggtggctctgctgggttccaggctccccttcgtctctagaggccccctcctggcctcccccctcactcccgcttgtcatcatccggctccagctgtgaccacccgttagccacctctgctgcgaatgggcatgagggtcagaggagggggcttctggtggaaaccttggaccagaacaaccagccgggttctggggcatcaccctgccgcgctgtggctgccccctaactcctggcatgggggacatccccaagatggggccagacacagcccggcttcgggaaaggggcagctcgtggtcttttctcccttctcctccacagcccgaccactttgtgcaggaccctgcggtactgcgggagaaagcggaagccagacgcttggccttcttggccaggaaggggtgagtgcttacagcgctgtgtcggtgggctcgggaagcccaccccacccccgagtgctttacgtgcgttacgtgttgctatggcaacagatctaggaagtagctagtcttgtcattgtccttattttatagacgaaggaactgaggcccagatgtgttaagtaatctgccaaaggtcacacagccagtgggtggcatactccatttctcctctgacctcaagctggcacgggggtgtcctggcccaagcttggtgtccgctcctggggatctcggaggaaggcagcaggctcttccccttcccgtcagggccgcctcctctggctgatggattcttctggggcgggttgttcctccctcaggtaccggcatgacagctccaccgcagtggccggcagcccccggggccacgggcagagccgagagaccatgcaggaacgcaggaagaaggaagccagcaaggccacccgagccaaccacaaccggagggccatggccgaccgcaagagaagcaaaggcatgattccatcgtgagaccactgcgcagggaccagcaggaggtacgggcctcctcgccagtcggccccctgccagggccccaagttcaagtctgctcctcgacagcctcagcttcgcagcccctgagaaggccgcctcatccgtcatccaccagccagccgtgagcgccttcctgcagaacacacagtgccttagcccgcggccgaagaacctcgcggccagcgagcagggaacagagccccagggccagcctcccaaaccttgtgcagccaaacaccacctccctttcttccggacagcgggaaacttgtatattcacaaacagaaaacaaaaaaggccctcaaataaaatttttgaccctttcaagaaatgatctgtgcccggcctgtgacctcttcccctccccgctcccgccccccacccagccccgccgtcctagtccagtgatggccgccattgggagcagaagggggcaggacgatgctgtccatcagcctttcgtgcttgcctcccacttcaagccctcctggtcttgctccacctcgccgtgtggctggagaccatcaccctgctctctgagcctcctctccctgcctgtggaaggaggggccggtgtgaggccctgctgtccagcccttactgtgaccttgcgcagctccccgacagccatcctagggagtgggcaggcacgatttccattaccgtagtgccagggagggcggccaggcactgagacataaaggcagctgcccaggccagccgggaggtgggcaaccagggattgggcacgcaggctgagccctggccttcacagggtccttggtcccaacgggtgttttctccatctcacagctgcccaaggacaactggccagtggccacgccagagccagaactcagtggctcttggtcacaca

SEQ ID NO: 121 - DNA, 40806 bp, Hippotragus equinus
  source 1..40806: mol_type = genomic DNA
taactttactaaaaatcacaaaattgtaatactctagtcgggtgaactttctagcatgtaaaatcagtaaaaactcctcctataaagctgtgaacggcagagagaggggcagcttttggtcaggctggggctgagttcctgcatcctccgcattaatgcggagttagcgccagttggccccgcagccgccatcggccgcaactcctggagccattggtcggccggtgggggcgcgcgtgcgcgcgcgtgggggcggaaccggaaccggctgtagccgagggggcggggcctcgagggcggcgttggcggcggctggagcggcggccgcggtggcttggctgggggcagctgctatagcccggagccccatggttcggagccgcggccagaccgcaggagaagctcgatcccctggtcaccccggctgactgtgcgggcccgcgcagcccggagccgccggcgcccgtcgggtcccgccggcgggcgcgggccggtccgccatggggtccctgttccggagcgagaccatgtgcctggcgcaactcttcctgcagtccggcacggcctacgagtgcctcagcgtcctgggcgagaagggcctggtcgagttccgagacgtgagtgtcgcctgggagatgcgggctgtcgctccgcgcctagctccctcattgcacctttcgctcgggcctcctcctccgcgggcacctgggcaggggcgcccgtttcctaagacggggaagctgaggtccactttccggtcagagcttccgcagagcggggcccgggcccagggtcgccggatgtctggtccgcggccgccctggctgggttagttaggaacgcttgtcttccatcagctcgggtcgtgccatctgatgcttcggagccaggcactgggctaattaagcgggagaacaaatctgttaatgcctcttgaagcccttttggaacttacggaggagcggaggaatattaagtaatgatacgtaaataggaatacgtttgctgtactgacaataaaagggaatggtgagatggtgcccccggtaggggcggtcagggaagcctctctgaggaggtgtccttgggctgagacctgagtgaggagtgagccagccctgggaagttctgggggacacggacccaggtggagggaacaggaagagccaggagcctgaattaggaatgaacttggtgtaaactcctgggtggcgggattttttgtggttcactgttacctggtgatgtattgatacaaagcactacctcgtacggaataggagtagagtcagaatttgttgaaagggagctgtccccccaacaagtagtaataaatacttgttttatatatctgtttatttgttttttgtttggcttcaccatggactgtcaacccctgggagtaagagtcttgttcattcctgattcctaagtacagcccctggctttgtggacattaataggcatgaataaacaagcttgtatcaagtgcttgctgagtttggtgctggagactcaggggtgagcaggatggacaaagtccctgtgtttttgttgctcacaatctgggaggagttaacaaacacactctgattatgagctgtaataagtgccatgcaggaaaaaacagtgtgaaaaggagattatgaagcaggacctggctgattgagcttgaagtcacttgagtgaacactttatttcttgggacccacctttcatcaccttggtttcccttcatctttctgagggcgctgtagtttcaagagggaactcttctacccagtatttgatatcagtgatccttgggttggtcccccaaggcaattgcaaggtcagagagaaactcctgaatgacaggtgaggctgcagagagggcccagcttgtcctggttcttggagctacttgggcttcagcacatgatgcccactttgctggcaggggctgtgctgaactgtaaataaggagccccggagagattcagtaaagagttgtttgagaaacaggcccccttctttataatagatttcttccatcctgttagtcctcaggccaagagacttcagtcaagctgaagtcttagaggtttgaacaaatgctctaattactgtgaagattcaagttttgttgaatgccattacattaggtagtagaggacacttgagattcttctaaactgaaaatcagggaaagaaaaagaaagtgctgttcatctttttcagaagtgaaacaaagtggaaacgctcacattgtgtgatgctgggtgttcagagctcaagggtgtatgtgtgtctgtcttcgggatgactctcaagcagctagagcagagagctccatcatacctgactttctgttctcttctggagtttcttactgactttgtgctcaccgggtgggatcactgacgccagtgttttctggcttgcgcaggtgggagcttttcccccttttggcgatccttctaagggtagagaggcaggaccagagtttctgcaatgatagccaaagagaagacctggaaaagaaaggtgattcaactcaccagtaggactcagtgaagggcaaggccgtcccacttttctaagggtctggagtctggggacagtgtttaccttctgtctgttaggatcgcaggtgtggatactggtgaaaacagcactaggcagcctgtacaggtttttctagattaattattagtcttaaaataaatctgtgttaaaatgtacttcgtagcattagcctggaattaaggtgctgttaccacgtaaaaagaaaacagaagctaaacttcacacaagcaaccacgccacagtaggaaaaaccagttaccatgctgtgtaagccggcgaaggcggatgtcatagccagtcatgtgtgtgttgttgccacagaaatttgcctcttcatgaagatcctactatttgtggaaccctggtgtccgatttgatttcactcgtgtttgatattgaagaaaaagacatcaaaactgagaagccgtgtcatttatagacagcttttgatgggcggcttcctctgctcattcttagttctaaccagacagagggtatctggatcactaggaacttgaaagtggtgactggtttgcattagtgtgatttccagaaatgagtgcaaatgtggcaaacagaagtgagattagattttttgcctttcttctggttagttctttatagaagtttggaaaacagaacaagaactgaggctttagggtagatgttctcaggttgttcaagcagcttcatgccacgctgtttgtaattctcttttttgagaatgccccatgccatgtgggcttcccttgtggctcagctggtgaagaatctgcctgcaatgtgggatacctgggttcgatctctgggtttgaaagatcccctggataagggaaaggctacccactccagtattctggcctgcagaattccgcagactgtatagtccatggggtggcaaagagtcctatatgactgagcaactttcactttccaccccatataatgctgcgtggagtaaacgtaaaattcttgccccatgtacctttcaatgtaaaaaattactgtaacttaaaaagttgtaatatatgtccattgtgggaaatttggaaaacctaaagataataatttccataatcccattagctagaaataaacactttaccattttggttaccattggccaacattatttttctaataatattttaaaatgcacatgcatagatatttttatataattggagccacgctaataatgtgtgcatgcgtgcgtgctcattcgtgtctgactctttgtcaccccatggactgtagcctgccagggtcctctgtccatgggatttcccaaggaagaatactggagtgggttgccattttctcctgcaagggatcttcccgacccaggatcagacctgcatctcctgtgttggcaggtggattctttaccactgtatcacttgggaagccccacactgataatatgtttaatctcctcttccaacacacaagttgtgattaatttcctcattttattaaatattcttttatagtattttttgttgttttaagctttgtatgataagatattaagtagagggaagagtatatggaaacagtgaattcctataaacccatggtgggaattccctagtggtccagtggttaggacttggtgcttttactaccaggaccccagaaagccatatggtgcaaaaaagaaaaaaaaagaaaactcccatcagacaagatcattttgaagcaaatcccgtatatattatttcattcataagtatttcaataagtacctctaaaaggtaaggacgctaaaaagataccattatcacaccttaaatttttaataataatttcttaatataatcaaatacctagtcatttaaaacatcacttttaataaatgtatagtaatcaattatattactgacccataatttttatacaactttattgatgtgtatcataaagtttgcctgctgcaagtgtacaatttgttggttagaaaattttttgagtactgtgtctgttgccacaaggcagttttagaacatgacatcatcccagtaaggtcccttacgctcatttacaggtcatccccctcctcactctaagacccaggcggtcactcatctactttctgccgctaggttttctttgcctggacatttcatagaaatgcagtcgcacagtctgtggccctttgtgtcttctttcatttgcatcgtgtttctgggtgtctcctccctgatactgatgtattggttgttttttcccccgctttttactgctagtattccgtggtatggatgtagatggtgatctccttggttgttttttccccctctttttactgctagtgttccgcggtgtggatgtagacggtgatctccttggttgttttttccccctctttttactgctagtgttccgcggtgtggatgtagacggtgatctccttggttgttttcccccctttttactgctggtccgcggtgtggatgtagacggtgatctccttggttgttttcccccctttttactgctggtccgcggtgtggatgtagacggtgatttccttagccagttttccacggtcagtagttttttctctatccttgaagtcgatcctcttcttcatacatttttgtctgtatccatagttttttctttgaggtttaatttcttcatgggatcgttctggactagaggatatttttcaggctttttttgggggcggggggagtctgtttttttttttggctgagctgggtctttactgtggtgcctgcactctctagttgtggtgagtgggcttctagttcccccgccagggatcgaacctgtgtcccttgcattggaaggtagattcttaaccactggttcaccagggaagtccccaggcttttttgggtaacagttgccagattgctttccagaaaagatgtgtcagtttatactcccactcagtagtatacaaggatatgctcttcccttaaaccctggcagttgtactttatttataaaatcaaagttgtttttaaattttagaaaattcagagcaaaattttcatccttcttctcagctcaaccagaatgtaagttctttccaaagaaaatttgttggtgaggtgaagcgatgtgaagaactggagcgaatattgggtaagtttttctaaacaacttaaataattattttgtataattgaatatataagcaaaccttgttcactttagaaaaattagaaaatctagacacgtagaaaagaaaaaagaagtcatctgtattctcaccatgtaatcactgttatgtaggtttatattatcgttccacactttttactgttcatctataaaactaaggatttacatatattataatcaggttattttgttattagctttgtttctcattgaatgatactttaacatcttttcatgtcagtaaacagattgactcatgattgtttttaatggcagcatagtattttatggtattaatatactatgagttatttagccaatcccttgtagtttgttataacttagaagcaacatatacatgttaatatattacttaaaattgaatcagagcacaagggaggtaggaagtggtagatagattggttagtaatttcctttttctcagacattatttcctttgcatacatcagtgttctctgactgttaaccattaaaactcagcagctcaaggctacttcctttatctgtaaaacttttaacatcttagcctaaaataaaatgttattgttgtccagtcactcagtcaagtctgactctttgagaccccatggactgcagcactccagccttccttgtccttcaccatctcctggaccttgctcaaactcatgtccattgagttggtgatgctcttcaaccatctcatcctctattgtccccttctcctcctgccttcaatcagggtcttttctaatgaatccgctcttcacatcaggtgaccaaagtattggagcttcatcttcagcatcagtccttccagtgaatattcaagactgatttcctttaggattgactggttggatctccttgcagtccaagggactctcaagagtcttctccagcaccacagttcaaaggcatcagttgtttggcactcagccttctttatgatcaactctcacatccgtacatgactactggaaaaaccatagctttgactacagggacctttgttggcaaagtaatgtctctgctttttaatgtgctgtctgggtttgtttcttccaaggagcaagcatcttttaaaataaaatagtctttatcagttcaaaccttgacgttttgattgaaatacagagaggggaacagttccaaagtcactgtcagaaaaacctgaggaaaagagagttgaggaggggagataaaggtgacttttagaatgatttctaacagttaattattgtggattttatattttttaacttggatttttaagatcaaaagaaacctttgggtcatcagcagcctagtcctctgcatattgtttgagatccaagtcatttgtgtggatcgtgaaagacagggcaatatcacacttccttctttgccacgtgcatgagtcattggacaggttgtatatttggaatgagttttcaaagacagagcaggattgacaggacattagacatgcccagggcttcctattgctttgttgttgttgttaagtcacttcagttgtgtccgactcttcgtgaccccatggactgcagcccacctccatccatgggatttgccagcaagagtactggagtgggttgccattgccttctcctgtagcttaaactgtttcataaagaatccagacttaaaaagaaaatgaaccatcaagtacatttaggtatgtgccgtgctattctgtgcttagttgtgtcctgccctttttgaccccatggcctgtagcttgccaggcttctctgtccatccggattttccaggcaagaatactggagtgggttgccatgcccttctccagggatcttcccaagccagggatcaaacccaggtctcccacattgcaggcggattctctaccatctgagccaccagggaagcccaagaatgctgcagtgggtagcctctcccttctccaggagatcttcttcacccaagaatcgaactggggtctcctgcattgcaggcagattctttaccagctgagctactggggaagcccaaatttaggtaaaataggttaaaaaaatttacatccatttccaaaaaactcttaagcccattgcttccttattggtaagacattctgcctgttttccttcctctctttctccctctctccctcgtttcctcccttccttccttcctagtaaaataactagtaagacttctccaaaatattgtatctagtaatgattttttaccaggtattatgacttttatcctacagaaaaggatgcttcaaggaattgaaaatgtaaactaaagaatttaagttatttttggctgtttgagtattagtttcatgaatctagtgtaaatcgtcctaagtcaaagcatcacagctcactggtgactcaggagagccgggctctttgccctgaggttgctctttttgctgagaaaggttgttgtgtttttcctgatggatgtatatttcctcctaatggcatctgtagggagttcacactgacatctctggtggcttattcctggtacttccgagtgtgttcttaacttcctgcttcatctacaggtggcagaggcaagtgtgactccaaagttctttaactagagttttagtgatgaagggcgggaaatttcagaaaatctgtgtataggttactgtcactctatgctgctctctctaggcagaattagtttacagatcttcagaagcaaggtgacaaaagtcatctgtcagttgggacaatcaagacttttgtgcctttagatgacacaggcatgacactttctgggaaaagtggggacatgaaatgttctcactgaaatgtcctggagtaagtttttcagtctaatttgtttaacttttccacagcctacttggtgcaggaaatcaatagagctgatatccccctccctgagggagagaccagtcctccggcaccacctctgaaacaagtgctggaaatgcaggtaacttggttcagaaggagggtttggggtcactaacctcagattgggcttattcacttaccttatactgtctagtgcttttctgcctttcttctcaagactgtggaatgaaagtcaaagcaccatgttatgattaactctcagtaacagattatctgtgatacattttaactagaattcaggttttttccccttagtgtaagacaggtggtattgaacagagattgataagaattagatcatgagatctggtcgtgtaacctctgggcttctgcaggccttagcatgcttctgctactgcaggtcatcaaggcttcaggcctgtgcccttcacattctcccctgattcatgctgaccctttcccctggaattatcagaagttagtgtgaaagtggttccccatggtcagccagcaggattccttctcttggagttcagtgtcggggatacactgtgagagcatggggtcattcattcattagcatccccctctacccccatgaattatctgttgagattttggtctcctcatctgagcgttcatcacactcggaaatagactagagcttttacagcccttctaaaacaattagtactgtataactaggaccattccattgccgactgctctgtttgttttactgggaggaagtcatttagcagttggtatatgaacggactctggagacaactatacagtccaatgagagcagtcagctggttcgcggcctgtttggtgtgttggttgtgatgtaattacaaatacggtgattgctagctgttatcaattctgtaaagcagagcacaagtaataagtgtagtgtgtcaggggatttgtttgaatacaagttgtcattgactcagtgggttgttttacagatttctgcttctactgttttaatacttaaagtattggtaaggatgcttggtacacaactaattgttaaagatttgttctcaagtatttttatgtctaattaattgaataagtgcaactgcatagaaactcaggctagagactaggaataggtatgtttgggaaagagtgtttttctgtgttacaaataaaaggaaatgtagtcttaaaagaggaagactctttggtgtatggtaatgtgtaagcagatgaagggaaaccagaagaaatgataagacccgagattagcactcggagtcatcatggcacccaagtgcttgccatcacgggtacctgaattaatacgaaacagaaaatgatgaactttgaaaacctgagcatgctttcatatccctatcaaactgtcatatacattttggctttttaaaacctctcctggtcctggggtgctgtgaaaagagtgttagagccagacttggaagtaacccagccgttgtttcatttcaggagcagctgcagaagctggaggttgagctgagagaggtcactaagaataaggagaagctgaggaagaacctgctggagctgattgagtacacccacatgctgcgagtgaccaagaccttcgtcaagcgcaatgtggaggtactggtgatgcgtgggaggaagtgcctttctttctctttcttttggccgcacggcatgcaggattttagttccctggctagggattgaacccaggccccctgcattgggagagtggagtcttaaccactggaccactgaggaagtcccaggagtgtgtttcttttataaaatctcattcccataaggttttcaggttttgttatcaactcctatagaaatactgctttttaaaagagatacatctttaaaaaatgaaagagatacattttgatcttcgctgtatttttcagttggattccatgttggttttaaccgtttgctgttgtttagtttgctaagtcgtgtccaactctttatgacaccatgaactgtagcccgccaggctcctctgtccatgggattttccaggcaagaatactggagtgaattaccatttcctcctccaggggatcctccagatccaagggtcgaaccagtctcctgcttggcaggtggattctttaccattgagccacttgggaagctccagctttaatataacttcctatttataaaatgctttagtttgcagttgaaaaaaagactttttatgatcatgagaagaaactgaacagtagaaatcaaactccaaagtttcagttttattctttccttcttctcaaattcctaaaagtaatggaagttaaaaaaaaaaagaaaatctatataggaataaagaacagcatatgcagcagtactgtagtcagctgagcatcagagaggggcaaagtatattccctctgaacttcgtttcacttcctgtggcaggtgtgacctctgatacagttactctgtgttaggttaaggcgatgacatatgttataatcagacttttattatatgtaaatgtcatcaagtagtttacaaataaggaatggggaggttatcctctttgtttatcagagcggactcacatgtctgagttaccttggcacccagatctgagtagttctgatgctgtgcagacttgtttggaaacaggacttgggaattaaagtgtcacttttggtgagacacgcttggtttcatgtctctttgtagtttgaacccacttacgaagaattccctcccttggagaacgagtctttgttggactacagctgtatgcagaggctgggagcgaaactggggtaggtgacacctggcctggcgagcttcacactgtccttcttgtcagtgggagatgagagtagatgagcagccaccatctgcaagcctgtgtggaatgaaagaaagtgaatatttgtataagaaaacactgtactctagaatttgttgagttgaatcactcagctgtattgactttttaagtaaatatgatgggaatttcttcttttggtatcatgaactggaaagaaggaacatttatcccattcatcattactccataagcttcaaatagttggttattgaagcataaagccctgttttgtttggttggaacataggggctaaactgaattgggtaatttattaatcatattttaaggggctctctctactgtttattctctctgtttacttgagctaatggtaacttgtttcctcatgtgatttgtaatctctttttactatgaacttcggttcctttgctccttatctgtaggaattccgtgatgtttagtgtgaggctgtatccttcagaaagaacttatttttacatatgtcaggtacttgagagcactccacctgtttggaatctgcttgaggttttttttttcctgtttgtttactcaccctgcacataatatgagtttcatccacaaacctgagtgcattctaacctgtggttgtaaatcatcaaggaatgttctcccccttctcctcaaaactgaatgaaaataaacaagtttgcatgtaggctcctttgcaagatggattcttttctagtccacccattcacttcaggtgtagtcctttgttgaggggggtgagagtcccaacattgaggggattgtgaggctttagttccaactcctcacctgatacagacccagggctcctctgccatgctggtcttgaaactcaaggccttgagatactggttacatatagatactggctccatataatacatcaggacataactatgaagtcctgttttatttttggattccaagaatttctctaaattatgagctcggctttacattgaagaggatgtttcaaaaatatttcatccagcatttcagatattgttcagttggagagctttcagggtatcttccccattttgccagaaataaatgtcttcatcatccttttactgcagtttgataatattcattgcttttacttgaccacagcctttattgtctcatagatttgtatctggcctaattaaccaaggaaaagttgaagcatttgaaaaaatgttgtggagggtctgcaaagggtataccatcgtgacctatgcagagctggatgagcccctggaagaccctgaaacagtgagtaaatgtcaccatctcctttgagcggtgacagacttgccccagagctagaggcacagtcctgagggaagcatttgagtgagttgttgactggatcccttcttatccttggatacgtttggggggagttcctgagaataaggactttctcctgttctactgaagtacaacagtggtgttaacgttgtcacatcactgcattctgagcttcagattcagtttaggtttcggcaattgtcccagttgatccttttacagcaaaggatctagttatgaatcacactttggatttgtttgtcatgtcttttttcttgttgccctgcaaggcttgcaggatcttattgaatagatccccgcccagagatggaaccctgggccctcagctgtgcaagtgcagagtcctaactactggaccgccagggaattcctacttgtcatgttcttttggtctccttcattctggggtaatttctcagtcttaccttgaccttcatcgtcttggcatttaaaaattattatagaccagtgttttgggtagaatgccccccatttgggtttgtctgatgttttctaatgacgagattcaggttatgtgtctttgtcaagaatgtcctggaagtgatgttgccttctcactgcttcccatcaggggcacacaattcgtttgtcccattactggtgacattcactttgatctatctcgtgatcaatactggtgatgttcactttgatctcttgatcaaggtagtgactcctagtaatctctgtgaatttgtaactccttttcctttgtatttaatacatgtttttgaggaagtgctttgaaactctataagtactcagttcctcgtcacattttcaatcagttaatttatttcctgttttattcaatgagttatactctgttactttaattttttattttgatattcaaattctctagatttagccagctggagcctattcagctagattttgtattctttttgcatgttcccatcatcttttgaatacttctttgctttcctgataacaatatatgcagattcattttgtaatttccctcatgcagctctggaattagccatttctctaaggagcttagttctctttagtggagaatggtaattagaagccacgctgtggtttctgggtgtgcctgttgtgaacgaggtgatgctgttcccagctctgtcggtggacagagggtgcacacatgcaaatggctcacccactcacaactttatttctgtacctgtgtgtgtgtgaaagctgtggctttacatccaattctactccagcgccatagggttggttcatcctgatttgtagagttcatttgtagggttcatttctagatttgtaactcctttcttcaatggggagaaaatcaactcccattattgtcaatatacttatttgatcagtccccttgtatgtgaccagtctgccccctgatctcctatctctgctgccctgaccttctctccatacggagtttcaagttccccagcccctagactgagtggctccttggtgtgggggccctgctcaccctacctgggtggctcccctgcggcatgtttcctccctttgcttgggctctgattttgccctgggcccttattgcccttcccctcccctctccaggtccatccctgaacgcacatctaaggcttcaggaatgaattattcaggaagggaagcagaggagccagagaggaaagagccataattaccttttaaaatagctgtgatttttaatttttttgaagacttcaaccataaaaataactattttgctctaaatgaagatgaattgatctactaaaggtagaaaaggaacttgggcctcttaaattttgagagaagtgttcatgtgttctttcctggatttgccttaggaattctggctgtaatgttcagttgtgtctgactgtttgcaaccccatttactgtaatccaccaggctcctctgtccatgggattctccaggcaagaatactggagtggtttgctctgttcttctccaggggatcttcctgacccagggattgaactcaggtctcctatattgcaggcagattcgagggaatagttttgacataaaggattttggctgtgaaatgatttttataaggtttagcctgagtaaatcacacatgttggaaaatctaatcggtcaagctgttcattaaccatacacttacaatattttttgtgcctcctgaaattgccagtagcaatatgttaattatctatcacctgtgacctctgagacctctccatgtaaagctgaagattaaaactgttctgaagtagcatttacatattgcttgagttttttctttattgagaacgttatccttctcatgcaaaacataaaaatttttttaaatacaatttctaagctctttggtgctgagtttataccagtaggttaaggggcattaaatgtctgtgaagaaatacagagacatggatagagatgtgtgtgtgtgtatatatatgtattaattttttttaaaaaaatgaaatatctctgtatttctgattctatttggctgcactgagctgcatcttcgttgctttgcaggggcttgctgtagctgtggcaagtggggtctacgctctagttgtggtgcatgagctgcccattgcggtggcttcctttgttgcagagcatagtctagttcttgagcatcagtgcttgtggcctagttgccctgtggcgcttgggatcttctgaaccaggaatcgaacccgcttcccctgtattggcaggcagattcttagccactggaccaccagggaaaattttaaaagttttaagtttcttaaaaactttttttatttctaattttttgttgaagtataattgatagaaatgtgtatcttaaagccacaattcctcccttccccatgattatgaaggaaatgtgagctcgttctagagaactgagaataacatagaaaacacagagatggaaatcagccagtcacctgtaatccccctgctcagacagggttactgtttaccttgcagtgtgcgttctgttagtccttactctggggaggatgtgggatttggtttggtaacttttactcagattctaggatttgtttgtagtgtcatgtttagtatcttttgggtccaatatctgacctttaaaagtccttacaaaccccagagtgtatttctagccattttctcctttgtcagtatcttttttagacgctgaccagtctctctgtcaaagctagacttaggcatgtggtttcggatctgtgttttttatattatatatatccctgttccatattatgtcttaggtggttgtattccctgacacagtactatttttaaaatcattaaggaatgttcaaagtaaaattcactggaaatgccatttcttttctcctccagtgtagtttctttaataatttatctggaaataatttcgatttacagaaaagttgccagaagagaacaaagacttctgctccttcccaactgttacgtttcgctgcgtgtactgttacccacttgctgcatatctagtcccattttctttttttaaaaaaagtatctatttttggctgcgctgggtctttgctagttgtagtgagtgggggctactcttcggttgtggtgtgcaggcttctcatcgtggtggtttctcttgttgcagagcgcatgcgctaggcacgcgggcctcagtacttgtggcacacgggcttagttgctcctcagcatgtgggatcttcccggaccagggatcaaacctgtgtcccctgaattggcaggctgattcttacccactgtaccacctgggaagtcccatccccattttcattcgtcttcttgcagaccttctgagaggaagccatggacaagtgtccattgcccatcacagggatgctgttttggacggtaagccatcaggctcctctgtccatgggattctccaggcaagaatcctggtgtaggttttcatgccctcctccaggggatctttccgaaccaggaatggaaccatgtcccttatgtctcctgcattggcaggcaggttctttaccactagcaccacccggggaagcccaataaccatgatacaaccctccaaatgacaaaaatcaacatgcacacaacactttggtgcggtacaaacatgcccttcagactcctcacagtttgccttgtttccttgctggtccactgccctaggggagactgtgacctgcattcgggacagacatcgtgttctgtgggacgaccgtcctctggggtccattgagtgcttcctcgtgaccaggctctgagcacacgttgctgacgggaacatggatgctccggtcctctcagcacctcccaccagggggcatgggatgttggcttagtcatgttggtgtccgctaggttcctccactttcatgtctcccttctgccctatttaactgttaagtggttgctaggagatattccaaggttattggtctttggggcgtcaatcctcaccaaacttctacccaccagcctcggcctctgtggcgactctctggaactcgtcacctctgtcgctcgcagttgccatcattttcccttctgggcttattggttaccatccagcagaaggcggtgctttccctgccctcacagtcactcattcatccacgaactcagaccttcctttgttggatgacttgtgttctgttgcggtccgtgacttggccactggcagtccctctgcacacgtttctctggcctttggcacgttctcagcattcagcaggcagtcccttacttcctgtcacataggatggtcctggtctccgcctggagtcagccgtttcttcaaggacccccgtaccttttagtagaggatggaatttagaaaccaggatctgggtattcgagttctcgttgtgtactggagtgctgttgtttctgggccctttcagcagtcagacatgcacacataccacgcacaacacacacacacacagctgtaaccacttctgcagctgcctgtgcacatttatcatagaccatttgttcagggactttcctggtggtccagtggttaagactccgtgccaccagtgcagggcgtgtgggttcgatccctggtcaggaaccaagaccctttatgccctgtggtgcagccaaaagagtgaaaaaaaaagaaaaacaacagccccaaacctgccatttgtgcagactatatgctacagttttagacgtctctttttctgtctttttcactctcttctgatagtgaaaaatctggctccccttatcgacaatatagttcacgaattgcgtaatttaggtatttattcagtgtatccagccacatcagccgtcacctcccccctctgcctcccccgtccccggccaccttgtgtccttaccttcaggatcccaccgcctccgctttgcctgaaggtccccggcctgtttcctgtcccatgttatttcacggcttttgaagccaccttttaaataccatctcccaaatgggtatactggcttggacctctgccccaaataccagacttctgttgaactggctcctccgtaactttgaagttccctgaagacatttccacaggacgcttaaaactgaactccctcccaatcttcccctgcctcccagacctgaccttccagcttgcctgtctcagtcagcgacaactcagctctcatccttccagcgtccaggatgattcctgtgaaactagtcaaactccccccaccacacccccaacctaaacccctcccttggcttcccgtctcactcagccaaaagctcgaagcctcccagtgtcccagccgggcagccctctggccctcagtctggccatttctcttcaggcaggctggccttctcacttgccctcatctcgcctctgtctgagctttgtctttggctcgagaggctttcccccaggatccacgtggcttgctccttgccccttcatcctctagacccagatgtcaccttctccaggaggccttcactgattgcctagtttaaaatcgcagtccccagcccgtgtctcccggttacccccctcccggtcacccccctccccccagctttattttcttttttataattatttttatttttggctgcactgggtctttgctgctgcatggacttttttctagttatggcgagtgagggctgctttctggttgtggtccttgggcttctcagcgtggtggctgctcttgttgcagagcacaggctccaggctcacaggctcatagttttggtttctgggctctagagtacaggctcagtagttgcagtgcatgggcttagtcgctgcatggcatgtgggctggaccaggcatcgaatccgtgtctcctgcattgacaggcagattctttaccactgagccaccagggaggcacagctttattttctttatcaccctcatctccgcttggtatattacgttctttctttgtgtctctcactgccaacctgaatacaagcttccctgccctcctaggtcaggaacttttgtctgttttgttcactgctgtattcctagcaccgggaacagtgcctggcaaataggccaaaaacctattcgttgttagttgtagaatacttgtaaatgtagtcagttctcatcatttgcatagttatgttgtacagtcttcatgagaaccgagccattgctcctaggagaagcatagggttgggtccctttgaacctctggtcacagtgtttttgtcaactgatcagtccataacctcattttatacgtgttctgtttaaagacaccttacttaatatatactattgattcattagcattgaactcactgccaacccacgctagcatgcatgtctgagcaactcatatgggacacacttgagggcaactcacagcctttctgtgctcaggaacactaggcagcactttagcaccacccctggggaccgtttccagtaccgaaattaccaacaaaaggcacagaaatgcgaaaaacttggagccagacggaccacaaaaaggacacgtgtttacagtatgaactaatggtcaccttgtttgacctcaactggaatatgcacgttgaggaactcaaaatttttgtcactctgcatgtctgcagatgagtgaaaaactgctgcaagttttggttttgggggttatatctggaatgaatttgcaattgtggaatctgcagataatgaggatggacagtgtttgttgaatgaatgaacacattaatgaactaactctgacagagtacgagctgccagggttttcaaagttctacctgcagaagtaacagtcatctttatcctttgtagggagaagtcataaaatggtatgtgtttttgatatccttttggggagagcagattggtcacaaggttaagaagatatgtgattggtaagaaaaagaaatatttcatttcctttatttcttcattctcagtaacctctagttttccttaaataggtctctgaagagtaacacagtggttgcagaggctgctgggctttgttacgtgatttctttgctctaatgccatgttttcagacatttaatttgtcatctgccttgccagtgtaatacttaagataatttgaaagtaaacaccatgtttttaacattcccagatttgatttctttcttgggaattaaggctcaagatcaatccaggaaggaatccaggtttactatttgctgcctttctgttgctttgagccacgcatcagcacatctgtcctcctggagaggatggctcatcctttgtccagccctccacagttagctcctttgccctggggaagggggcctggcaagtggtggagaaggtgggctcagaggggcctgcctgccaaatgaggtggtacaagaccacgtgaacctttgagaaacccagagcagtgtcccagcaagagtcagtctgtgactgagttttgtctctagtggggaaataaggccacaccaaaactcaaaagaatggccttttgtttccttatactctgggaaattttagctggccttgcttcttgctggggtaagggtggaacttggttatttcctttggatcagtgttcaccagagtttgatacacagtcactggtgttatgaaaagtaattttaggtgttacatgggcaagcttgttcttactttaatagatgtatatttatctttatgtagatgacaaaaactatagccaacacataaatccctgacttcacaaatatcattgcttaagataaagctagagtaagaatttaattttgatggtcagagcgtagagagaaatagaaagcatggcattcaaatactgaggcagcatgggagatcttgcagcttgggaggtgtggccctgcctcctttctgacctggtgtcacatgtccccaggggatgtttactgtgaaagtgaaagaaagtgaaaatgaagtcagtcatgttggattctttgcaaccccatggactgtagcctacgagtctcctccatccatggaattttccaggcaagagtactggagtgggttgccatttccttctccagggaatcttcccgaccgagggattgaacccaggcctcccgctttgcaagaacttttactgtctgagccactgtagcacgtgtcaagggcaagtgccaagaatccagaactcttttctcccttgattttctttttttacttcaagttttttgtttttaaaaaaatggattataattagttgctttacaatattaatttcagctgtaaaccctgcagatcagccatatgtgtgcatatatctcctccctctggaaccttcctcccactgcctcatcccacccccttggtcatcacagacccctgagctccctgtgctgtacagcagcttcccactagctagctctttcacacgtggtagtgtatatatgtcaacgctactctctcaacttgtcctgtcttctccttccctgctggagaaggcgatggcaccccactccagtactcttgcctggaaaatcccatggatggtggagcctggtgggctgcagtccgtggggtcgcgaagagtcggacacgactgagcgacttcactttcacttttcactttcatgcattggagaaggagatggcaacccactccagtattcttgcctggagaatcccagggatgggggagcctggtgggctgccgtctgtggggtcgcacagagttggacacgactgaagcgacttagcagcagcagcagcagcagcagcttcttccctgctgtgtccacaagccatctctacatctgtgtctcttatttctctctcctttttttaaaggtaattactgtatgttctttgacttatgttctacactcccagcttaagggtcatggtgaatttagaacattgaaattgggaatgagcttttaggaatcattgagagcagaaatggaatttggagccaagagagagttggctaaatccgtggaattcagtggacatttgtccagtgtccatcggcaaggccttagcatggccgggtgcctgtgtctgcacctttttctctcagagggctgcttttattctggtttggaggaaatgtgcccagatggtgtattcaatttacctctagttttctacaccgcttcctgtagttctgatggctgcggcgctgtctcgaatcctgtcttctagttaccactgccacgtttacccctacccgaacacagccgaggagcgcagagagatccaggagggactgaatacccggattcaagatctttacactgtgagtgaaccagaaacttacctccttatctgagggcttgtgaaacatttacaaatccgtttagtttcttttttaatatggaaaattttggttgtggacaaatcaagacattttagggagactggaatgtcacctcctttctcttcgtgggagtttcattttagcagcctgttagaaacctagatggtttctaaatgatggggctttaaaaaaaaaaaaaaaggagtctgattatctttgatctgctgaagtgtaattcttcatcagatagtatgagtgagccccatgtaaagtgctggctgtaattttaccagcactgttttaagtcatctttctgcttagaagttcactctgacccatttgagtgaaagagggtttcttggcagaatgggatgggaattgatggctcctggggttgacaggaagtggggtgaggctggagtgggtaagaactagggacctaggtctctgggcccagctaggccgtcatgctgccctgaggaccacaacacctcactgttcctgtgccctgggctcctgttcgggagaggcagctccaggcctggaggagaaggactgaacttccttccttcctcgggggcagagagtccccccgcccccagcggaggtcaggtgcctggcagatgctctgctgagatcccgtgtgtttgtcttcacccaggtgcttcacaaaaccgaggactatttaaggcaagtgctgtgtaaagccgccgagtcggtctacagccgcgtgatccaggtgaagaagatgaaagccatttaccacatgctgaacatgtgcagcttcgacgtgacgaacaagtgcctcatcgccgaggtctggtgtcctgaggctgatctgcatgagctgcgaagagcactggaggagggctcggtgagtggctctcccctcccctcccctctccccactcccctcccctgccctcccctagtctctctcccctcccctcccctctctcccctctcctcccctcccctcctctccctgctggccctttcctgcctgagctcagggcgatgagatagacaggagaaaacaccatgtggatgcttttgaactgaaattgcagtcactggaagctctgtgcacgtgcattctcttttccttaattgaagtttagttgctttacagtgttttcctgtatatggcaaagtgatttgcacaggcttttaaaacaaacctttcattttatgttggaatataaccgattaacaatgttgtgataatttcaggtggacagaaagggactcagccatgcctatacaggtatccactctctcccaacccccctcccatccaggttgccacatcacattgagcagagttccctgtgctgtacaggaggtccttgttggttatctgtctaaatatagcagttgcagtggcattttaaatttgctcatttgagtaagtagttcagtgacatgttttacaagtcaaaaaaatattattaaagaaccagtgaagggacttccttgtacccaaagcctagttttgttcagttcccctgctcaaagacaacccttgttttagttttattatgtctttgagtttcttaatcatagatcaaataggaatatataaaaggggagaattcccttccctcacaatagattatgtgctatttatgcttccttttcttttaagaaaacttccctgctttatagctgtttaatatccggatggaatggatgttacatggtttatggaactagtccctggtcatttaggtgatttccaactttgcgaatactaccagcacagagactaacacttgacctttgacaattgagacacgcacagatttgccagattctggatagacccaggatggaattgctagatcagttttgccagatacttgccagatgaatgcaactagttgttgcatttccccctattttgagtgagggtgaatatctttctttcattaaaaaaaaagaaaaatttattttatttttggctgtgctggatgtttgttgctgctctcggcctttccctcgtcgaggcgagtgggggctactctagttgtggtgtgcgtctctagttgcagagcatgggcttagttgcccctaggcatgtggtatcttcccaggccagggatcaaacccaggtcccctacactggcaggtagactcttaaccactggaccaccagggaagtcctgaatatctttttgtatgtttaagagcctttgaattttcaccttctggtgagctctctgttcacatgctttgcccattttccacttgggggttagtccttttcttactaatttccttagctcgttgtctgtgatacaagaacaaatattctcccccagttctgtcacttgtcttacggtgtttctttctgtttgtttgctttggtcatgcggaagtttttggttaaatatacttccatttattcaacttggttgaacccattaatctcagttcctgtggtctctgaactttgctgctgctgctaagtcacttcagtcgtgtccgactctgtgcgaccccatagacagcagcccacgaggctcccccatccctgggattctccaggcaagagtactggagtgggtgccattgccttcttcctctgaactttgaataataggttactctcactttaggactatgggctcagtctcccgtgttcctgtgtgagtttttttttaattggggtataggtgttttacaatgttgcattagtttctgctctacaagaggtttttctgtatcaaaacttagttctttactgaaaataacaggtttgcatacttcaacaaagaaacatgtattcttatgagcttttggttaatcactttgtttcttcacataattctgtgatggtacaaaaacatcaaaataatgatggcataaaaatagttattctggagtatggggcatctgttgtatttatttaaagatctagatgattcttatttattgaggtagcatcagttttgagagacatgactggtactctagtgcctatgtgtgtatataagtagccccagggtcgccaatataaaactggaattaagtggtttatctcctaaaaatgttaaagagaaatttagagacagctacaatattataaaaatgaaatatagggaaggataaatcagaatgtcagtatggcaacattttggtttatttttgttttactcatcactgcccacttcccaccactcagccttgctagattcttccttctgtaagaccgcaacccccaggcgtaccccacctccctaccccaggagcctccctcagttcctcgtgtcactcctgctatactgaacctcctggggggtggtgatcagtacttccccatgtggccctgcacagggccttgcatagcaggccaccaagatttgttgaaagagctcttgggtggtaattttttctttttttcttcttttcatgtgaaagagagagagcggtagtacgatcccctcattcatgaacacaatcccaacaaaagaaactcccccaactctgatccgtaccaacaaattcaccgaggggtttcagaacatcgtggatgcctacggggtcgggagctaccaagaggtgaacccaggttggaagcctgaatttgctagtctttatattttatacattctgtacatcactgctgctttttttcccctatgagaacgtaatagatatttggaaaaataggctcactagtaactgttctgttatttagtataagctgtttattttatttttgaatgtgcctgggggcatgtggaatcatacttcccccagcccgggattaaacccatgccccttcattggaagcatgcagtcttaaccactggaccaccagggaagtccctaaagtgttctttttaacctgtcaattctctcttgagaatttgggagaaagtcaatatcattatatgcggttgtgtttgcattaactagaaatttctgcctctgctgccaatcagaaatctcttgcttttcctgcagctctcttcaccatcatcactttcccctttttatttgctgtgatgtttggagactttggacatggttttgtgatgttcttatttgccctcctgttggtgttaaacgaaaaccatcccagactaaatcagtcacaagaggtaaaaacataaaccctccagctcattatctcctgtgaggtagcattagtagtgattaccttctgtttgactagaaaaagagacatttaaaaatgtttcatttttggcaataacggaaacccacctgactgagacctaggtggggtgggtctttattcttgtgtgatgggaagttccgtgccgtgaacttgatttttatttatatatatatatattttaagtgtttatttatttggctgtgctggatcttagttgcagcatgcgggatctttagttgcagcatgcagactcttagttgcagcatgtgggatctagttccctgaccagggatcaaacctaggtcctctgcactgggagtgcaaagtcttagccactggactgccaggaaagtccccatgagcttgattgtgagcagcctggagaggagcggttaagaatgtgccccgactagctcgatcacttcagcccctgttccccgtggccctatctcactcaccacacttcgctccccacagatcatgcggatgttcttcaacggtcgctatatcctcctgctgatggggctgttctcagtgtacacgggcctcatctacaatgactgcttttccaagtcggtcaacctcttcggctccaggtggaacgtgtctgccatgtacagctccagtcacagcccagaggagcagaggaagatggtgctttggaagtgagtgtctgcccggctgccagatggtgtctaaggtggagggcgtcactccgaggctccctcccccatcacaggaggccctcacccttcttttgtgttacagtgacagcgttgtcaggcaccacagcgtgttgcagttggatcccagtgttcccggagtgttccgaggcccttacccttttggcattgatcccgtgagtatactcctccccttaatatctcaagtttctcgctagtaccacctaatttttcagtgaaaaatgttgttagttttaaccactccgtgtggcttattcccttaggaataagggccttagttccctgaccagggatgcagcacttgcccttagcactaggacctcagagccctaatcattggaccaccaggaattcccaggatcacctagttttaactgctacagaggtttcacagactgtccagcacggttcaggtggttttacctaaggggttggttctcggggggtttctgtctggatgacagaggctcaccgtgtattccgagtcaggctggtgtgcagatgaagctgacagtttgagaagccaggatcagtgcctgagtagaagtccacagagaactggggttacagtctgtcctactcccggagccccctgattctagtgaagagtgccgtgaaacgtgctgctcccacttctttgtgcacattaattgtttttttatcttttgttttagaaaaaaatagtatggaattttagaatgggaaagggagctgaagcttatcatggtgcttactggggtggtggtttgaaaggggaaaagtgtggggagaaggaaagagaggcagtggctctggggctggggctgtccccacctacccgccctgccatggggcttggcaggcggctgcttatgaggcccaggcagcgtctctctatactcggggttcttctcgaggaatctcagccttaagagaagagcttagaaactacctcaagggacttccttggtggtccagtgtctcagactctgccatcctgatgcaggggacctgggttcaatccctgaccagggaactagatctcacatgccacagctaagagttcacatgccgcaactaaagatcctgcatgctgcagctaaaactgggcgcagccaagtaaataaagctgcgtcagaattggtttggagggaggtgatacagtaatgaaaagaactcactgacaggagtttgttatccccttatctgagctctccgagggaacctctctcctaattgtttattcttgtctctcaacataatttacataattgaatattgttgcctcgagtcttaatacgataggaaacttgaaaagccttgaccacggtttccttaaggaatagcacttttatcctaaggcagttgaagggagttaaagttctcttttttggtgttttgttttgtctttagatttggaacttggccaccaatcgtctcacttttctaaactctttcaaaatgaagatgtctgtgattttagggattactcacatgacttttggagtcattctgggaatatttaaccacttgtaagtacagatttttttaaaaaaccagtatttataaatcaagtttttggtattaatatttcttaacctttgcttgatgatagactgcctagatcttaaaggcagccagtatgggggtatgttatattcatatgatcctgttttgatgatcagttttttggcagcttctttaatggcagtccactccagttactattgcctggaagacagaggagcttggtaggctacagtccatggggtcacaaagagtcggacttgactgagagacttcactttcacttgattcagcaaatatttgttgagcatatagaatgtgcctggcactgttaggggttgaacagagagatcagaaaaaagttttcaccctcgtggagtttatgttcaagtgagggagacatgcagcatgttcattcacatttatttccagaggtgatttttgtcatattcttttttattttataaatcaaaaacttttggtttgtttcttacagctggtatattagaagtaagagatgatgtcttttttcttctaattgaatctgaaagggaaagactagtcttctctcctgtcctcacatctttttgtgattgtatctggatcataacacagatgatgtgattctgagataggctttgtcacagagaatttaagattaatttcctctttactttttatcttagcccagctgcgtgctgccactaagacccggtgcagccaaataagtaaatgttaaaacatttgttcatgggttaatcagttctgttttttgccctaggcatttcaggaagaagttcaatatttgtctggtttccatcccagaactgctcttcatgctctgcacctttggataccttatatttatgatcatctataagtggctggtttattcagccgaaacctccagaactgctcctagcattctgattgaatttattagcatgtttttattcctggctagtgacacagatggtctttacccagggcaggtaaacaatcttttttttttcttcccccattcttaggaactcaagggaagtcctcatgagagcctttttgtttcgatcagtagagtgattaaaggtgcttcccacggcctccctggcactgagcgactttctgtttctctctgttatcacaagggtgtcattttgccatgagtgctatctccagggctctggtcagactgtaatccaaacttgctgctactccttagctgtcagaagtggtggggaaagaatgtgttactggagggatccatctgtctttccagttttttcttttcttttcttttccagtttttttcttttcaaataattttatttatttatttatatttaaataataccactgagccaccaggggaagcccctccggtttctttaaaatcagtctctgactcagccaggctttcagagaactggcagttggaccgtggcacatggtcctctccagaagtgacttttctatatagatgcacgtttgtgtgatgccacccatatcagctatgagtttaagaaacaaagggtaaagaccctctgacaaatataatttagcttgcgtttactttatgttccttgctaaaagacattctgcttgattgtcactagtttcagtgtaccaatgacactgttgggacgtctttgtgttttaaccagcttcctccccatctgcaccaacaggagcatatccagaggctgctgctggtcatcacagtgttgtcagtccccgtgcttttcttgggaaaaccactctttctgctgtggctgcacagggggcgcagttgttttggggtcagcagggtaagtgtgagttcggatgcacgtttgttgatggtgagcaaagtctgtttttagctgtggaaagatttgtaaggaaaacaccttccaggaatgccagtggctaagactccatgcttcctctgcagcgggcattggttcaatcccatcggggaactaaggtcctgcttgctgtgcagtgtagtcaaagaaagaaggaaatagatttggaaaaaaacagaacaccttccatggggtccaggctttgatttaaaagctaaagcttccctcactgagcactctggggttggctgttctgcagaggtgtggtgccaggaacctgcacatctgggcatgggaaactggtccccctttaatgaaccccaaacttaacaggagcttgcactgaaatctttcagtgatgctggtcataactagagtgttcctcttccttattcttgcttcttcattttttaaagtgctttttaaatttaagtaacataattaaaggaaatgtgggaaatacagaaaatagtgccttgaagttttcctatacagttataaacagtgttaaccatttgttgagtttcttttcagagtgttttcttgtttgtctgtatttctttttttaaaaaattctggtgctggggtgggggaaatattgtggtaaaatacatgtgatgtaaattttccatcctcaccggttttaggtgcacagttcagtgtacacctaaagtacacactggcattaagtatttcacactgtgcatacagcctcccacccgtctccagaactcttcatcttcctaaactgagacttcatatccattaacactaactccacatttcctcttgtcccagcccttggcaactatccttctactttatgtgtgtatgaatttgactgctttaggtatctcatacaagtggaatcaggtaatattctccttctattttagcataatgtcctcaagattgatccatgttgtaacctgtgtctgaatttccttcctgggaattccctggcggtccaccagttgggactctgtgctcactgttgagacttgcctgggtacaatccctggatgaggaactgagatcccacaagctatgtggtgccaaaaataaaaaaagaagagaaagaatttccttcctttttttttttttttttttccactttttgactgcactccatagtatgtgggatctttgttccctgaccagggattgaacctgtaccccttccattggaagatggagtcttaaccaccagactactacggaggacccttccttcctttttaaggctgaataatattccattgtgtggatagactacattttgcttctcagttcatccacgaatgggcacttgggttgttttcaccttttagctgctgtgaacaatgctgctctgaatgtgggtataaaaatatccattggagtctttagcttttagttcttttgggtatatcctagaaatgatcgttctttgtttaatgttctggggagccactgaactgttccacagtggctacaccattttacattcccatcagcaatgcacaagagttcttctacaccctaatcaacgcttacgtattttctgtttttttaacaacagccatcctagtgggtataatatgctcattttcttttaaagggctttttattcctgaagaactgagtctttaacagttagagttgaaggggttctaactttgatgttgtcacaaccttgtgattttaaaggcactgactgttttctttgggttgtttttagagtggctacacacttgtaaggaaagatagcgaggaagaagtttctttgctgggaggccaagacatagaagaggggaacaaccaaatggaagatggatgtagagaagtgatgtgtgaagaggtaaccttttcagttactgttgttgatgtgaggagccagacttgcacagagatgattgtcacaacgagagtgataagaatcccctgtttttttaaattaatttttactggagtctagttgacttaccatctgtgctaatttcaggtgtacagcaaagtgatcagttatacatacacataccagttcagttcagttgctcggttttgtctgactctctgcgacctcatggactgcaggacgccaggcttccctgtccatcaccaactcccagagttgctcaaactcatgtccatcgagtcagagatgccatccaacctctcatcctctgttgtccccttttcctcctgccttcaagctttcctagcatcagggtcttttccgatgagtcagctctttgcatcaggtggccaaagtattggagcttcagcttcagcatcagtccttccaatgaatattcgggactgatttcctttaggatggactggtttgatctccttgcagtccaaggactctcaagagtcttctcaaacaccacagttcaaaagcattaattctttggtgctcagccttctttatatgtatccatttagattcttttcccatataggtcatcacagagtactgattagagttccctgtggtatacaggaggtccttattagttgtctgttttgtatatagtagtgtgtatatgtcaatcccaatatcccagtttatcctttcccccactgtcccttggtaaccatacatttattttctctatctgtgactctgtttctattcattgatagtaatcatcttaaacatcaaaattcaaagcaaagcaaccattcctcaaagctttccaaatactattctcttcatagaattgtcatcataaggatttggggttaacattttgtggttctcagtcttacaatgggatttatagcattaacatcacaagttgtgatattaaatgacttaaggtgctatgaacattgctttcagaagattctcatctccatgagaacttctccatagatgtaagaaagagaccctgttcacactggcttcagggggattctgctggctcaggtcaggatgaggggagagggggcctcaggctggcggggctctggattccaatcccagcaagtctagcttgggttttctttgcaagtttgcttcacattctgaagccagctggccccacgatgttgaaactgtagccacagcgagcactgggctcattttcttcagtctttcaatcagagaaaagcactcttaccgtgaggcagaatcctaagaagtgctgtgatctgcctggctggcgtcactcaccatccccaaaccagtgactgctatagttgcctgcatgggctgccacagccacacactcgggggcttgaactgaagaaatttatttctcacggttttggagaccagatgtccaagggcaaggtcttggcagggtcagtttctcctggggcttctctctgtggctgtgtccccactcggccttattgctgtgcctgcatctctgtgttctcttcttataaagacatcagtcctactggatcaggccccaaccttagacctcatttaacacttatcacctccttgaaggccccatctccacacatactcatattggggattagggcttcaacgtatgactcttggaggggacacattttagctaataatgactggctatggatccaaacaccctcttccaacaacacaggagaagactctacacgtggacatcaccagatggtcaacaccgaaatcagactgatgatattctttgcagccaaagatggagaagctctatatagtcaacaaaaacaagaccgggagctgactgtggctcagatcgtgaactccttattgccaaattcaaacttaaattgaagaaagtaggggaaaccactagaccattcaggtatgacctaaatcaaatcccttatgattatacagtcgaagaagtgagaaatagatttaagggattagatctgatagatagagtgcctgatgaactatggaatgaggtttgtgacactgtacaggagacagggatcaagaccatccccaagaaaaagaaatgcaaaaaagcaaaatggctgtctgaggaggccttacaaatagctgtgaaaagaagagaagcaaaaagcaaaggagaaaaggaaagatataagcatctgaatgcagagttccaaagaatagcaaggagagagaagaaagccttcctcagcaatcaatgcaaagaaatagaagaaaacaaccgaatgggaaggactagagatctcttcaagaaaattagagataccaagggaacatttcattcaaagatgggcttgataaaggacagaaatggtatggacctaacagaagcagacgatattaagaagaggtggcaagaatacacagaagaactgtacaaaaaagatcttcacgacctagataatcatgatggtgtaatcactcacctagagccagacatcctggaatgtgaagtcaaacgggccttagaaagtatcactacgaacaaagctagtggaagtgatggaattccagttgagctctttcaaatcctgaaagatgatgccgtgaaagtgctgcactcaatatgccatcaaatttggaaaactcagcagtggccacaggactggaaaaggtcagttttcattcagatcccaaagggcaatgccaaacaatgctcaaactaccatacaattgcactcatctcacacgctagtaaagtaatgctcaaaattctccaagccaggcttcagtaatacgtgaaccgtgaacttccagatgttcatgctagttttagaaaaggcagaggaaccagagatcaaattgccaacatccgctggatcatggaaaaagcaagagagttccagaaaaacatctgtttctgctttattgactatgccaaagcctttgactgtgtggataacaataaactgtggaaaattctcaaagatgggaataccagaccacctaacctgcctcttgagaaatatgtatgcaggtcaggaagcaacagttagaactggacatggaacaacagactggttccaaataggaaaaggagtatgtcaaggctgtatattgtcaccctgcttatttaacttattatatgcagagtacatcatgaggaacgctgggctggaagaagcacaagctggaatcaagattgccgggagaaatatcaataacctcagatatgcagatgacaccacccttatggcagaaagtgaagaagaactaaaaagcctcttgatgaaagtgaaagaggagagtgaaaaagttggcttaaagttcaacattcagaaaacgaagatcatggcatccggtcccatcacttcatggtaaatagatggggaaacagtggaaacagtgtcaggctttatttttttgggctccaaaatcactgctgatggtgactgcagccatgaaattaaaagacacttactccttggaagaaaagttatgaccaacctagatagcatattcaaaagcagagacattactttgccaacaaaggtctgtctagtcaaggctatggtttttccagtggttatatgtggatgtgagagttggactgtgaagaaggctgagtgccgaagaattgatgcttttgaactgtggtgttggagaagacttgagagacccttggactgcaaggagatccaaccagtccattctgaaggagatcagccctgggatttctttggaaggaatggtgctaaagctgaaactccagtactttggccacctcatgcgaagagttgactcattggaaaagactctgatgctgggagggattgggggcaggaggagaaggggacgaccgaggatgagatggctggatggcatcaccaactctatggacctgagtttgagtgaactccaggagttggtgatggacagggaggcctggcgtgctgcgattcatggggtcgtgaagagtcagacacgactgagtgactgaactgaactgagctgaactgatggatccagggtgagatgggagcagaagcgtctcctcccagggaaggcgagcgcagtcctggcggacagaaccagcgtgtctgctgctctcggctgctttattgtcttggaaactctggctgttctgaggactaaacaagatttctttcagttagccttttgtaattattatgtaatttagtgctttaatttgagacaattaataattaactttctaaggtcataaaaaaacaaaaagcagacctggaagaacgtgagaggcgtcttgcccagtgttctagtcttttcactgttagggactctttttataatttcttgttctcagacttatattaagatgctcttatccattaaacacacatacattcacagtattctaatcttgtggttggtggatgcctggttttcatgatacgttttataattactaagagtagctcaagcacctcattgggctgtctgagggccatggcggctgtagcatcagagtccagaattccggtccagcaccctcagctcacctgtggggtcacatcctggggacagggaagtgggagctccgtaaatcgaaaggtgcttagtggcagagccgtgagcagaactcagatcgcgtgactccctgcccctcacgctccagcgcgtcctcagcagcattccagaagccaggcctgtcactgtcctgcatgtcatgtacagactctaacccacgttgtgtcatctctcgtagtttgattttggagaaatattaatgacccaagtaattcattccatcgagtactgtctgggatgcatctctaacactgcttcgtacctgaggctctgggcactcagtttggctcacgcacgtaagtttctggtttgacctgcagttcccaaactctgggccaggccacccctcagcacctcagttaactcatgggggcactgtgggacaccagaaaattttgatggaaagggcactgtctatgatactgtgtgaatggggactgttaggttgtttggacttgactacttactgccctgctctcctgggtatttctcttgacttcagggtgctgtgggaaaattcactgggacacgagttgttttcaggactgagaaggcttaggaacctctggcataagcattttactccctctgctctgaccattatcatttttgtttttactgttattttaattcagccctgccttaccaagtgtgatggtctagttatgtcaagcaagtcctgaagtactgctgatgaatagttttgattacagatagttcttcttttgcatgctctggtgatgcatggatttcagttacctccatttacttaagtctcaccagccgcccaaaaacatggttgaaatttcagtttctacgataaaatctgagtatatgggtacaaagcgcaggctccactgctggccttttagcctacaagtcaccccgtcaataatacagacggcacttcatgagcagagaccagcgacatcactttcagagcctgttgtgattggcccctgtgttttttcatttccttatgcatttataaacaagaataagagagtgttttcatgttttggtaattttgaaaggtcccagaacaactgtcattttccccatcggtccctgaacctgctgctcagttcgtgcccggacagcaaagcgcgtggtggggttggctccttgtgggccagcggtaaactcacctggcatttaaaaatggatcactgaactgagggaattggccaacaaagatgaaaacatgcaccagagaaaaaaacagtgatatgtttgaggtgaaatgcaaatggaatgtgacaggagtttaggagaaagagctgatgtgggggtgtgacactgctgctgttcgagaggtgaaatttgtagccagtggaacttggtaacgcacagaagatgccggtgtcccagacgtgatgccgcagaagctccaggaggtagttcaggacttggaaggtgcagagcacactgtagaagctgatccaaacttggaaaagagtagacagcatgctaggtgttagggagaaggcttgctctgtgtccaggtgcctggctttcccaggtcacgtgagaagaaggctgttcaaatcacccttgataagttcttcttaccaaatcttcccaacaatttagtactcagtgtttctaacatttaaaagatagattcgctctctttttttcatttccttatgcatttataaccaagaaaaagagagtgttttaatgttttgacagtaattttgaaaggtcctggaacaactgtcattttccccgttgaccatgaaggatgctttcgctggtcatgttctgcccctgctccgttgtgcaaagactgtctgtacttgtgaaaatcaccaggtgatagaggtgttctttgctgggtggtacactgatatttttataagcatagccgcaagttgagacttttctggttggaggggacgctgtggtccaccatcttctactgcagaggaggagactaaggcccagtgaggttcggtgctggcgctggatcaccgcctgatcagttagtggccgagtcaggactgatgcccagcttcccactgcctgatccagggctgcactgggaccgagccagccagacccccatctgggtcaagatctctccttggcaggcaggcagacctctgatttctctggaatgtcaagtcatcctccacatttgagatgatcaagttgctcaagtaatttttatgtgaggagcagattatatcttttacgggtgtgtatttattttagagataacaattcaaaatttctcagaaggaaactcagtctagcttgctaatggaagtgactcactgagggtcagcagaggttaactctgcagaatgcttcccatgcagagttgtccgaggtcctgtgggccatgctgattcacgtcggcctccgggtagacacaacctacggggtcttggtgctgctcccggtgatcgctctctttgcagtattgacaatcttcatccttttgatcatggaagggctttctgcatttcttcatgccatccgcctccactggtgagtttggaattgagcttcagaactgttatttaagacagtaacaccaccccccccaatatatttacacatagaacatttccagtaatatgtgtacatacattatttaggctagttctttctttcccagtattgagatctgtattctgatcccctgagttaaaattctgttttgtttctgagctattgtccctgacatgtaaaaagcaagtttatacttgatgaataattatgtgtatttaatattttcaactcattttgggtctgacaagttactttatctcattgtaagccatatttcttaatgttttacaatatatatcagattacttgtctgtgtgtgcagttacgaggagagagaggttcctaattctcttgtgaatgtccatagagtgggaggtaacatgaggtgtcagcatttccttcatgagaaagccaacaaagggtcagtgtgtgtgtgtgttttacctcagtaaaagtatttgtgccaaaagcatatatggaatgaagcacgtttggaagtataggaacttttttttaacttagtaaatgttgttttaagaaatgtaggaaatgttattcagaatctttcattaatactttttttttttttagggtagaatttcagaacaaattctacgttggtgcaggcaccaaatttgttcctttctcattcagattactttcttcaaagttcagtgatgacctggcgtgatcatattgaagtagccaacaagctttcagatttatggagaattatcatgttgtagaattccttatgttaaattgatgacaggaaaaattccatcttcatcaattgccttatgagatagccaaatctgtaagatatacctcttcctcatatcttaagtattttgtaaactttctcaatttcagatatataaatttctttcagtttttatgatgagcaaatgtaagttcatgcaaaagttatgttatggttgtttttaaaaatacaggcgtgggagagagaagccaattttgaatggcaaattgaaaatagtcttagatatttgattccttttcattttattaaaaagaagaaaaaagccagagttattctgtcacctgaagttgtcagataatattttccaacagctgaagctaagtagtttaaaaaaaatttaatgacggataatcaaaagattcacatttattatattttgtttaattaaaagtatgcaaactttttca

SEQ ID NO: 122 - DNA, 57290 bp, Hippotragus equinus
  source 1..57290: mol_type = genomic DNA
atttccttctccaatgcatagttttctatatagatacatatgctaaacctcattcaatctttgtattcaccacaaggcctagcagagtctctggcacttttttttttttaattaacgaataacttagctgcatatataacacaccagactaaagcagggataaactcaaacagaccccacggtttacttttttattttggagtgggggcagactggaggtaggtagttatgactgctagactacagccttgctccacccgaccccgccctgtttgacgtcacaatccggagctggaactaccattcccagaatgccgtgcgaatgggccggctctctggaagacgccgagtgattggcgggaggaggcgtttccttccggcgtttccccggaccgggaggcgtggactaggagaggcgttcggacgctattaccgggttgggcgggccgggctggggaggggtttgggggtgagccctgagtcccccgcccgctgaggagatggatgaggatgggcttcctctcatgggctcaggcatagacctgactaaggtttgtaaagatggagttggatttcggcgacctgggaggaggatggggaagggacgctgggttcccagaaagaccccacctctctgcccaaccctggcctgtgcgtgtcttccccctctcttgggagggagggttccacagtttaccttaaaaaggggtccttcccgagccttctaaggtggggcgggagtggtatgcctctcctctccttcccttcccgagtcacgagttcttatgttcaagggcaagaactcttacctgttccgacctctaaaccgaccttttttataatttggcccttcagtttttcgtgtgtttgtgtgtgttgcctttacctgcgaaagttcacatctgtgaatccagaacccgttctcaaactttgcagcctctgtcattttggacaccccacccccacagtttaggaaaacaagttaatgactattcgcagtacttccagtaactgtatcacacaggagaacgcctccttattattaatatcaaggtgatttcgtgctgtacgtttcgtcctgtacggatcatgtttatttttacgtaaaacaggtgccagctattcaacagaaaagaacggtggcttttctaaaccagtttgtggtacacactgtacagttcctcaaccgcttttctacagtttgtgaggaggtaggtcctttgatactggttgaatgagtggcccaatgtcaccttgcactttagaaggtaacaaatgagtaaagtaagaattatggtgtatgcaattatgtactatgacctcttgtcccccagttattgtgttgacatagcttaaatcctctgattctattaccgtcagttcctacagcccatctctgctgaatgaactttctggaggctttgtgaaatagttcagtaaggtttattgtgattaaacaacaaaagcagttccaagatttcacaaaaactttttttttttttaatttttgaagttggttatgtttctcttaccctaaggattgcattttaaatgtatactgtttcagtttctattaaaattatgttacattacttcatggaaaggatgattggggaggtagcctagaaacataacttgggcatcaaatatcatgatagaagtaaaaatactttctgcaaatgagttgtgaattaaggatcaagtaacccaatgacccaggtggcacagtggtaaaagagtctgtctgccagtggaggagacatgggcttgatacctgggtagggaagatcccctggactaggaaatggcaacccactccagtattcttgcctgggaaatcccgtggatagaggagcctggtgggccacagttcatggggtcgcaaagggtcggaaacaacagcatgcacatacaacccagtgacaggttaggtaccatatccagggacacctgtcttaacaaaaaactaaaagagagtgggaaggaaatgggaagcatgacttgaaattggtttgaagaaaggagaaaaagaggacaaggaagtgggacagtcatctaaaaccaaaaggtgttcttgctcagttttctttactacttgaggatcatgttaaaccttagggctccactttggggtcatgaactacctgagtgctgaaattactgttcatcatttgagtatcccccccgatccagtccttgaatgagactgttcatagagggatggttgctgcctaaaaagtgtaggaatatagatgtccttgggccccttattctgtgttaagaataggatacacttatatacactttaatatattaaaatcattgtgctcagtccataggctagagaaaattcccacacagatatgacagtatttctccataagcttgccaattctactttacaaaagttcagtgaccacttaaaattaaataccccttcagtggggaatccccgatggctcagctgaatctgccagcagtgcaggagacgggagacgcaggtttgatccctaggtggggaagatcccctggaggaagaaaatagcaacccactccagcattcttgcccaaaatatctcacggacagaggagcctgatgggctacagtccacagggtcaaagagtcaggtctctgagagttgagcctcaaagaattggacacaactgagcacacatacagataaaatataacaaaaactgtcttgttgattgcttatcgattatcaaagcctcacgattcattctttcctcccttctgttcctctctcaactacccccctccaactgttttgactatatcactatttcctacttcttccttgaaccccagaagaaactttgtggacaaaaattcatgaaatttaaaagtagctaattgcctttttctccttaatggatggtaatttaggattgactgtcactcatttagaattcagcttgtggcattcatcttggatgtttatgtcaattgtagactttttacttggtgtgatgacagtaatattcattgtgtacttattctgtgctaggcattgtgctaagtgctttatgtgtacttaattatcacagcccagacctttaagaaaggtgcaattatctcttttttagaaatacagaaactgagatgtagaaaggcttaaatcatttacttagtcatttattcatgcactcatcgtatatttgagggcatagtatttatagctgcagtagctacttgcctacattcaaacagctagaaagtaagagctgggattccaattctgatctgttacctggtttcaatcttctgttctgttgcaccatctgattgaataagaggcatgtttatatcattttcaagtgagagattgcactgtcttctttatagctatttcaaaatttagtttttagatttgtgttctcttctttaccatgccatttctatttaatataatgtcttttatatgataaactccagggatataatatacatattcatatatatgaagggccattttctcccaagttaagatcagtttccaaactgggttgttatttgtttatagcagctattaaacctgtggtctttgtttagttaaagccttaaacaaggaccaaaaccacgctgtttccctcaaaaaaaaaaaaaatttgaacttcagctgttactttttgaacttgaagtgaactggagggaaaagaaaacctggtgggttttggtttgtttgggtttttttgtgaggggagaggatattggggaggtttttgttttaactttttcacttaatctgctttgaaccaaacccaaacagtatcttcagtcacagctaaactcaaatgaaaattaaatttgaaatcaataggggtctttcttcatcactaatactggttttagaatttttgataaagagaaaagtgaagaagttagcttttaaaaaactttctggatactgaactactttgtaactcttctaatgactagaaccaggataggagaaaagttagaagatggagaaaggaaagttagttgaatctgacccaagttacagagttactcagggtccgtctcctcttccctcacaagtctccagtaagcatttctattctggtcctaatcatcaaaatcttgtggcagtccactgggagagggattgcgaattttaaataggaagtacgtggagaacagcgcaagttctgcgcatagcacagataagactgagtggaagtttaaccttattgtaaattttaaagttaaaggtattcagcaaacagggcaatcaggtgtatttgactcagacttgtaacatgcctagaatgctgggattttagtcatttctaaatattctaaaacatttctttttaaaaaaaaaaaaaaaaaaactttaaatacaagcaaaagctcttagaattttcacatgacctaaaaaaaaatttagtgcttatcttctgtgtccaatttttaggcccaccatcagacttcaccttaaaccaaataaggttttgctgaaaaccctatttactgctataacttttacaactgcttttaaaacttttacaactgctggatttaagtgtcagatgaagcttagtaaaaccatcagttgcttccctctctggcttctaggacataactcaacccaaaatgactaattgtttctcttttaaagaaccggatctgcaaatgggatattttacaaacctgaagtcccacagtgctttttttcccatgttcaacttttagctacatatttcttcctcttttttttttttttttttcacttgagtaaaatgcactgccttgcaaataggtgggtggtgcatcaagaactcttcaactttatctgaaaaactaggaaccttgtaaattcccctgttgtcccaactcaagatatttcaggtttgctttaaatacttataaagaggatggatggttaaatggatgggaaagtagacatacctttctgtttcctctctgctgaaactttcaaaggtggggacaattactgttattgatcatgttacttatatccatagtcatctacacttgagaagtagtggttctcaaccagggaacatttggcaatgtctagaaacatttttcgttgttgcagttggggaatttttgtggcaattagtgggtagaggtcagagattctgctaactatcctatggtgcacaggatagacctttacaacaaagaattatccagcccaaaatagagccagtcagtagagctcagtcaatagagccaagactgagaaacctgctttctggtggtctaggagtttagaaggaaaatgcagatgacataaacatcatagaaatgcgctttagcagcccataaatgaaaccaggtgtattttgtcaagtgacagtggcattttagaaagtacatatttgtgtgtgttataacagtaattacatgggaacagactgaaaaacatttattatgctgaataatctttgaaaagcagaggttcttaattttgccatggatcctttggcagtctagtgaaatgaaattaatgtttttaaatgcataaaataaaacatgtgggattataaatgatataaagcgcataatttaaaatggagaaggacatggcaacccactccagtattcttgcccggagaatcccacagacagaggagcctagcaggttacagtccatggggtcgcaaatagacatgactgagcgactaacacacaacacatatatatggctaatttaatggtacagaataactagagcatggtaagctcttgcttctggtttatcttgggttttaatggttggttgattcctttgcttttttagtattcttatttttttttctttgttttaattcttcccgacattaactacttatcttccaatttcatcttttcttttcaaacttggaaagtttgaattcaggattaattgtatatatttctgtgtttaagtgatacacaaaggcagaccctgctcctttctgtttggggctagtttttaatcctgtgttctatgaagaattccttcattcagcaacaagtaattatcaggctcctgttaagtgtcaagtactgctctggtcacaagggatattaacagtgaataaaaaactctgtcttcagaggagttcacattctggtcccagtgattgattatggctctgataatgagtttcataagactgaaactgtaacagcttctctatgaatacagttttataaaataaccatgaaacatcttaataaagataattgaatacttgagtttgagttcttactcttgtaaataagagagtagtatattagaaaatcacaaatattttaaccatagtttttaactttatccttttgtttctactctttctttttcagaaactagcagacctttctcttcgaatccagcaaattgaaacaactctcaatattttagatgcaaaggtttgtatttctgaataatttataggataaacttgctctacatatatcaactttctcagttgcatttaactttaattgtatttaggaatgaattcaacttagctcctgcatccatgatgtggtgcagtgctttcatttgtttaatttattataattgcaaaggaaataatcttcattatgaaccactaactaagtctgtttaaatatacacgtgggtcaagatttctttcattatttaatcaaaaacataatgagtaacatgttaacaaattgaatgttatatagtttgcttcatttaatggaaaactcacaattatcttaataatagtcattgataacacaggaaacaattctgtaaaactttacatgtctccagaacaaaatttggagaaaatctcagctgttttccatttgtaaatatattaaatgctagtgagtagtaccagttctgatgtcagaaatcacaaaaggtaactgtcatataaaagcaaaaatagaaggttgtttcagtttgaaagcttgcaggttttgtgtgcttttcttgtatataaaataatggagatgctaatatatttttgtgactttgttcttttatcaaaaaaaattgacctgaaaaaatatttattgactatttataatccatgggcttgccaagagttggacacgactgagtgactgaactgaactgaaggaagtgaaatcttctagcttagggatcagaatgtctggtttatgctttctatatcttcctatggtcttcagctactgtatttccctcagaacatttctttagcttgtaatttaggatatttggccttgaacatgttcaaaatagtttcttagcagccatacctacttgaaactattagggccatagacactgtgctaaatactgtcatcagtcaacagttttcaatgaatattgctgctttagatcttattgccattgttttttcattattctttattatgaatatgtatattattttaatgtttgtggaattcttaagttagagtccacggtcacaagttaagttgccatgtggacaggttaaccttaattatttccatgaccacagagttaatcctcaaagttagccaaacatttgacagatgtgtgtcactgatatcaggatgaaatcagaaaagaatgtttgcatggatcttggaaatccaacttaaaatgcttaaccactgacatcatgctcattttttatgtatggaaactaacacattgtagtaacatgaagtgatattactaaagaaagaagaaaagaataagctgcatcatatgttaacatgcgtcaagagttttctcatttcccagattattcaaacttaaaatgggctacagagcacattttgaaggggaacaaaatatatttaatcaaaatctttttacaaatttgggatgtaagttttctcatcccccactttacaggtgggaaaattgaggcctaggaagatttgcacagggttacatatgttgtcagagaaagcaatggcaccccactccagtactcttgcctggaaaatcccatggacggaggagcctggtaggctgcagtccatggggttgccaagagtcgggcatgactgagcgacttcactttcactttttactttcatgcattggagaaggaaatggcaacccactccagtattcttgcctggagaatcccagggacggggaagcctggtgggctgccatctatggggtcgcacagagtcggacatgactgaagcgacttatcagtagcagcagcaacatatgttgtgacttaaacctcggcaatctgactccaaagcccatgctctcattccttacactaggattccttattaaaaatataattcctgagaaagaatggtgacaacctaaattagattagtgagaaattcttcaaaaattttttatttgtcaatccctttcacttttaagtagtttatggcatggagaatttcaaccaaagatgagattttatgaaaccacttctatagctttaaaacttaagaaaactatttgaaacacaacacatacttagacacttattctttaaagatctaatattatcctcatataccaacattaattttctcctctcagttagcatctatcccgggcctagatgatgtcacatttgaagtatctcctgtaaatgtcagtaggatcacaaatggaacacattctgaagccacttcagagcaatcacaggtatgtaattaagttccaggaagcatgagcacctcttcttgggtgaaccagatagaccaaatctgcaggttcaaataaagaagttaaataaaaatgtagcacttgactagtaatattttaaactttaagataaaaaatacagtttgaaaaaagttactagcttttcattttgttattctgaacagtttcctgaagttaatatttttcctgcctataaaacagaaaattgacctataaaggactaggaataatcttaaatataactactttcttcaagttcactctggaaattttcttcttggttcttgtaagaaatgtgtcttttaaatgttttagtatgacattttcacacatgaataaaaatagaatagttcaatgactaaccaagtgcccattacctggattcaccagttgagattttgttgcaattgcttcatctatctttttttgtcactgaagtgaattccaggcatcatgtcttttcacccgtgtataattccctgagcatctgtgaaaagttctgacattttcttgtataaccacaatgcctttatcatatacaatataatgagcaataattccctgataatatctaactctttgttaccaaaactctgctccatgggccagcaacctacctgagaacttgttagaaatacagaatctcaggttccaccccagacccactgaatcagaattttcattttaacaatatccatatgtgatttgaaggctcttgaaatttgagaggtcctaatctaagaaacaccacttgtctaaaaaagtgtgtttggggagttgatttgttcaaatcagcatccttgtaaggcctgaactctatgtttggctcttatgttttaatgttcatttatgctctgtaaaaatttaaattgtgtattactttttatttcaagaaataaaaattcttcattgtttaagaataatcgctagtatatctcagtgaggtattaaaatccaaaataagaaaatcactaaaatggtggtctaacaagtaataccaaacaaacagacttcctgtgtatatggaattttgcatttgtacctggaagtactttttatgggatatcttttagatcattatgatgttatgtaaaggtttctgactatgtgtggtgtgttaagtgctttttataaattaactcatttaattctcacaacagccctatgaagtaaatacttttatcagttctattaatactttacaggtatgtcaaatgaggtacacagaggttaacttgttgaaggccagacaataaatgtaagaactagaatttttacccaaacaatctggtgtcaagaatcctatctcttatctcctacactgcactgtctctagcacctgtgttgaattcataaaacataactcactccagtattcttgcatggaaaatttcatggacagaggagtctggcgggctatagttcatgggattacaaaaagtctgccacgactgagcaactgagcacgtgtggtccaagggaggagtgggaggaggtataatttagaaatctctgtgtgggaggagctataatttagaaatattgtatatttggtggatgaattagatgactgtttacttaacagttagggcttccctgatagctcagttgtaaagaatccacctgcaatgcaggagaccccggtttgattcctgggttgggaggatctcctggagatgggaaaggctacccactccagtattctggcctagagatttccatggacttctctggcctagagaggtctatggggttgcaaagagtcagacatgactgaatgacttttgcttcacttcgctttacttaacaattaggtattagaaaatttaacatccatttaattaatataacaaattccattgtgatgatcactggaatatatataatatacaaaaataaattcaaatgtttagaggagtttaactttacaaggttttatcaattgaagataaaccatcctttttctaaaagaaggcgtatgtaaaaactattacatgtttccattctacctagtagttattctttggtggatactagccattattatatttctataaatttataaaatgatatctgactttcagtattaacttttccgggtgttactgtgcacgcccatatataatacgtatttaaaacttgtacagttgtgttggtcttgcctatttaaagtctcaaaaaattgattataagtaatcacaactgaattatctaaaattcagaattacttgatattctggcaattttattgaaaaatagttattaattcattggaggatttatgaagtactgttggcttcctgaatttaaaaaatatggtaaagttgtgtattgattggcttaatataaccattcagcatgttcttaatattgaaatcaactctttatttctctccattgtttttaattggtatatttatgtaaaatattttgaaatggactgaagtattgcttaacacagaatttccattgacattacagtcaacttgcttatcagttaaaagataatcatgaacttttttttaaatcatccattcattgcaatctccaatctatatatgagtcaaagacccaaggtttgcatactgatttttctgcacctttaatttcatggttcagatcttatcattactcacagtagaacatctaattgtacagattgagattaatttcagaataaaatgaaggacagttgagagatatgatagaagatttaatgggtcatacaaatagcaaaggtgtaagacctgatataattaaaccttgttgaggtcttggttattaggctgaagttaaaggctgagttttaaaatccagtggtcttatatgtaattaccatttgctccattgtgctattgtatgagtttattgtccttatttttttaaaagcgtacatgggtcttgttgaaattttttgtttaattaagtgttttggacgttttgtaattaatgtattttgcagatggatgtgtatatgtatatacatatttatacacacacacatatatatgtatttttgtacacttgacactgtcatataactggagtaacctaaagaatttggggatatcttacttgcttcggcatttaaaagagatttaatctatatttgaattatctggggaaaaaccttaacatataatttatattctaataactatgaatactgaaagatttttttttatttatttatacttcaacagagatatgcagacataaaattgatatcattcagttaaggaactacccttaatgctaacatacagtaagtcactaagtggacttactataaatgtttaagttgatagaaaaatcaagactatatacagacagtcttggctttgcacttaaatgaagataggattccagtttggacgagttaccatttacatggtaccatgcaaagttgagaactgcctatatgatgaaaccatttttatccaaaaagactatcccccattattattcattataagtagtatttatactcttaaccactctttgaagaatactaataattctatcagtagctgaaatatatataaacataattttgtttgagaaatgagcttctcttccacaaattctccaggccttgcctttagagatgttagaatagccatatccacttagaacaagattattcaatgaatgagaagtataattgtgtagatggtatagatacctaattgacaaatcaaatagctttactagctttattaaaagttttattaaaataataggtccatcaataattcatgttttgtatccatacttgagggacaagtaaagcagaattttaatttttaatgccttgaatatgtttgcacttttgtagaaacaatatagtgttgacattacatgtaactttctctgcaatcttatttaagtatttgtaaatatttggaaacatatatcctgtaattaaattattggtatttaaatttagaatatgatttttttctgatattgtttgctttagaataataaaaagaaacatcccttttaagtaacatgatggaccccttttgtgaattgtctaaagatttatacaccatgctctctacagcagaacagtttacaagactctggaccacaggaaagtgaagtaacaccagaaaatatcttaactgtagccaaggatccaagatatgccagatatctcaaaatggttcaagtggtaagctgatttggtctatcttctctgtcttgcagcctcctttgaaattcttaaccctggaggtttcattgttattttttcaatctgagaaaactgctaaaccaagtgaccaagttttctatcctcttctttcctatgtttaatgaatgccctgataaagagtaagcaaaagtcaaatctttctaatgaaaactgatctcacacttcaaattagtatagtttgatatacatttatgtaaactttttgcctttcataatctttgcaaatcttggatgtatcagaagaatgaaagtgaattattcacttagtacatcacatagcttaatttcctatattctaatacatgggtttttgtgtatttttattctgaatttcacctatcaatagtttggttcacagaaaagagcataagttacttggcatataaagtaatgcttttaatattatgacttgagaatgggtaatttttctaagaaatcatcattacatggtatgatgcaaaaaaatataacacaatatttgctgttttgtaacagcagaagttagtttcttttcattcctgtagaaagtcctattacagtagtggaaggagctaactgtcctttttcagttgatcaaaaaattaatgcttttgtaaaattttattatcaggcacaagaagtatactaacattaaataagaacagttttgctgaccttggcattatcaccaaaataatttaaaaacaaagaccatctgacaaccagaaagagtagattggcttatttagaagctacagcagtgacaatggagagaagaaagtacattcactttttctaactgtcagaagaaatggctttgtcactttgaaaattcttcattggcagtcaaaactctgggttttaggctttgaagagaaaaaaacagactttggagtgaaaatatataaattttttaaactaataaagataaaatggcactagtttgagtgtgaatcatgatgaatgaatttttaaaactagaactgatgaaagcttaagctaagcttaaaatatgaactgttaaaaactatgtctttgactctttcaaacaaaagaaaactcaaaagttttagagtaactctgaaaggctttttatttagtctcttcttgcctaactgatataattaggaaatagtaaaatctgctttgtatctgtaagactacctcgaaatatttaataaaagacccaatcttagggtaactgttatattcttaaaacattgcctcagattttacaagaacttgaaaaactctcaatctcctttttcagtgtaaattcattgtccatttattccacaaatatttattaaacacttgttctaaagtaccatattaagtattgtctagatttatttagccagctaaggtttccagacaccactagacgtttttatttttgttattaattacttagacaagtttcactgcttttcagaatctcatatataacatatatgtttgtatgtatatctgtaaatggattctttacatattcattcttctaatcatatagcttatcatctcactaggaataacagccaaagtccttcacaggcctgtgagatcttgtacaattcagctcccttattacctttttaatctctttgtcttcactcactgtgctccagctctacgggcctccttggtgttccttaaataaatcaatggacagttgccttactcagggcctttgcatctgttctctctccctgaaacacttttcccaaatatctttaacattttttccttttcttacttcaaatatttgcagcaatattaccttctttctggtcccactcccttgactcctttccaactgtatttttcttcatatgaccattcaattatatgcaaaatactacatattttacatacattattggtatctctcctgcttctagaatataaactccacaagggtggggaattttttgtttactttagtattcccagatcctagaaccataccaggcacataggaaacacctatgaatgaaaatgaaatgccagtttaacctttgataggttttggtgatagattactttttttacactagctcagtggtcttcagagtaggaaactttctggatacaggttgctagttcccacccattaaatgagaatctctgcagttgggacttggagccagagcatacgtgttttggaaaatgctcttctgattaagaactgtttacaaatattttacactgttttataacatcattcaagtaatttttatctgaaaacatttaagaagcaataaattgttgtttttcttatttttaaaactatttccttattttttaaactattttataaaaatatagttttttaaactatcttattctatagtggtacctggctcttagctcaagcccatcctttttgtttggtgtggccatgagcaggagtttaatttcttctgcctcagtgtttttgctgtttttaacccaacattcttgattttagtcctctgcctcctcctgcctttggtacgggtgtttctaattcctaaacatttccagggttctggaagtgctgcttctttgtggtatcctcctcttcaggcacatggacttggccttcctttgctctgctaagtcatcattcttttatctgcttttaatttccatttattgtggttcatggatgcctcatagtcattaaaattggagttcatgttatttcttttttgccttagtatttgggggtaataattttcaagaggaaagcagggaccaacatctttgctttgaaattataagttcatccaagttaaattgaattttattgtttttagttcattgtgccaacctgtatcccagaaccttattacccaacttttgtatcctattgctccctgtcctacatttcattcttcagacaaaaccacaaaactttctcaatataagctccatgctttttcacctctgaatctcgatcctcctcttgatcactacctgttcaaattctactcatctgacacgtttctatgaacactttaactaaattacctaggatcctgaacccactgacatataaagccagaggtgatgtctcccttcatttatctgttcaaccactttatctgtatttttttaatcacttcatatcttgttccttgataatttaaaaatatttttatctactgtattgaaaagaaaatcatgagcaaaagacctatgccttaaccaatctttatattcactttaacaccttgcttataaggttgctcaatcaatatctgttcttttgttgttgttcttttttgtttttgtttgaccacactgagtggcatgtgcaatcatactaccctagtcagggatcaagccaccacctcctgaagtggaagtgtggagtcttaaccactggaccaccagggaagtcccagtatttgttgaatgtactattttaccctgcatattaactctttcccaatttgtatccgctgaaagtgtataaatgtcctattttttcaagttattgatttaaaatattttatagacccaaaccaaaaatagaccctcaaggttgatgtgaacttgctgatcattactcttcagatgacagttactaagctatctataaatccgctatttttcctgtctcctaagaatatcatgagtgaccttcaaaacatccaattgcagatgtagcaacttgtttgacagagcccagaattgtcttccattggcatggtcactctagatttcttctcacttctgcatcatcattcagttctggctttttgtttaaacttaagtatgaaatcattaaatcagttcctctcattgcttcctttgttgaaggatgcaggagaaggcaatggcaacccactccagtactcttgcccggcaaatcccatggacggaggagcctggtgggctgcagtccacggggtcgctaagagttgggcatgactgagcatcttcactttcacttttcactttcctgcattggagaaggaaatggcaacccactccagtattcttgcctggagaatcccagggacagaggagcctagagggctgccatctatggggtcgcacagagttggacacaactgaagtgacttagcagcagcagcagcagttttcaacagggtaacttaggaaggagtctgtcagatgctctgatttgaatgaaattaaagctgccggtacatataaagagctaatgtcacctgcccatcatggttgtattttatccttgtgtttgtttgcaacctgtttcaggaaaacttgacctaaatcctccatctgatcagccgaccaaaaagtacgtcccctctggtaatacagcctttaccttcttttaacttagcttgatgattcctttgtcccatgttcaagaatctccatgtagtttatatgaattggtttaaaggtattttggtttaaaggtatcttctgccttccattatataacattgtaacatactcctttcaaatgtcagttgccattcatgaattccttcccactaatgttagtccctgaaatttacttactttgaaatttcaagtttgctatgtacaaatacacacacacacttttttttaggtggttggatttgttttctatttgtttatatcttttaacttgatagttcttctactttatttttctctcctatgatgttgtgattgtttgtagtctcagagttttagttgaggaattttcttatcctttgatttcagtttaaagccccttgatcatacctgtgggtcttgctaagcataattttggttcttctaaattacataacacttttccaggagtataatcattccagtgtcataagtcatcccctaaaatatgattcagcaacatgtgcatagctagttgtgtttcctttatcattgtctttacaaaactatagctttaaagtacagtaccaccctcctttagaaaatacctcacacaagtggagaagagtcgttagagaccttttgcaatctgtggcattaaatccttcagtttctgtcattagcatgggaataatctagatagctttgtatctctgtactccaagatagtaaattaccaaaaaaaaaaaaaaagatagtaaattacctgcctattctaaacagttgtttattcttccaagatgattcagttccttgacagtgactgagagcaaggaatataagaaagaaaaataaatttgatgtcagagcctaaccccagctaattctagagggtagctttattagaaattatcttatcaatactagaaaatgattcactttcccaacaaggttgtagattttcattaaaatgcccatttttttctcagtttctgagagtaagattttcttgcttacccacttactaaaaatttagttattaacatagagaaagaccatatcagcataattcatcaaatgagttttactttgtcttattgttatgatcttaagtgagaaggaaatggcaacccactgcagtactcttgcctggagaatcccatggagggaggagcctggtaggctatagtccacggggttgcaaagagtcggacacgactgagcaacttcactatgatcttaagtagtttgtcactcaccataaacattactacatgttatcaaagctgaattttagaagcctgcattatagaatttaaggaattgtttgcacaaaaaaaggaaagagagcatggtctgcagaaaacctgtctttctgaaagaaatctctatataccaacagtaaaaataaatctactcctaagatccccaaaataaccattctgtactcaaaagggagttaacagctgcaggacactaatatgagggcagtaatatgatttctctcgtttttaatttctttatatttttgtcatttaaaatttgagttgctgctccataagcaatgtcatttttttgtgaattaattaatttattttaattggaggctaattactccacaatatgtagtggtttttgccatacattcacatgaatcagtcatgggtatacatgtgtcccccatcctaaacctccctcccacatccacccccatcccatccctcagggtcttcccagtgcaccaaccctgaatgccctgtctaatggatcgaacctggattggcgatctatttcacatgtggtaatatacatgtttcagtgctattctctcaaatcatcccacctttaccttctcccacagagtccaacagtctattctttacatctctgtctcttttgctgtctcgcatgtagggtcatcgttaccatctttctaaattccatatatatgcgttaatatactgtattggtgtttttctttctgacttaacttcactctgtataacaggctccagtttcatccacctcattagaactgattcaaatgcatcctttttaatagttgagtaatattccattgtgtatatgtaccacagctttcttatccattcatctgctgatggacatctaggttgcttccatgtcctggctattgtaaacaatgctgcgatgaacattgacgtacacgtgtctctttcaattctggtttccttggtgtgtatgcccagcagtgggattgctggggcatatggcagttctatttccagttttttaaggaatctccacactgttctccatagtggctatactagtttgcattcccagcaacagtgtaagagggttcccttttctctgcaccctctccagcatttattgtttgtagcctttttgatcacagacattctgaccagagtgagatgatagctcactgtggttttgatttgcatttctctcataatgagagatgttgagcatcttttcatatgtttgttagccatctgtatgtcttctttggaggaatgtctgtttagttctttggcccattttttgattgggttgtttatttttctggaattgagctgcatgagctgcttgtataattttgagattaattctttgtcagttgcttcatttgctgttattttctcccattttgaaggctgtctttacacctttcttatagttttctttgttgtgcaaaagcttttaagtttaattaggtcccatttgtttatttttgcttttatttccattactctgggaggtgggtcatagagaatcctgctgtgatttatgtcggagagtgttttgcctgttttcctcaaggagttttatagtttctgatcttatgtttagatctttattgagtttatttttgtgtatggtgttagaaagtgttctagtttcattcttttacaagtggttgaccagttttcccagcaccacttgttgaagagattgtcttatctccattgtatataagcagtgtcttatacctgtaatcccgcatatactgtttctcatctttttccaaaatcttaatgcttactaggccctcaaccctcttgtaatctttgcttttccttccttcctgaattattacttagaaccatgtcattctctctcagaagacagtgactgtgtttctcaagctcttttagtttctccatttgtatagaagtttgaattttctgacttccaatgtagtgatcacttgaaagacacagaaaatcctataacttacaaacacaaactttaaaaaaaaaaatttcaggctttctgggtatcaggatggactgcaatcttttctggctttctttgtaagctaccctgaaaacttcctcttcccgcgtcctagatgtctcctggagtgtgctgcttttatattaatattggccttgcttctcttgtcatgtccctgtaaatccactttagagatgaggtaattaaaactgcttaattgatataaactgctttaaacagaagccaacaaagttttttaaaaatcacaagtaccaatgcacagggaaataaaccgtaccttgctttttagtagtctcatttgttttttctttcacccctggattactaccttctgtgagatacaggaatgactacagttccaggaaccagttacctctgagaccattcaggtgcctctgaggacacccagatctttaccctgtacttctggatgcatcatgctatactttcttagctttgtcactcaatcccatgtgaccatattctgaccatattgcctcttaagttctcagtcccttcattcataaaacgatatctaaagttctttctagatttttgacccattaattgatctccaaattggatctcattattaacgaatgttcctggaacacctgctggctttgtctgatttttttttccttttaaagcaagttttgcacaagatttttcagtgagtaatactgttgtgttccacatgtggcagataattgattctgatttaacgtttgttgtcataatagtgcagcacacgtctttactaaattacatattgcatttataacttaactggaattgtgtgcctagatcacttttccaacaattcccccttttttactggcagaccttggtgaatactttgccagtaataaattgttcattgggaaaatccgacttccacattaagaagctaatgacttgtattttttgaaaccatatttgccaaaacagtctcttcggacacttagttggttttttttttttttttttaagctctgttttctttggctggatttaaatgtgaattgaatgatctccttggttctggtggttctgatgcatctgttgccagcctggatgttggcctgaggaaatgtgacttccattacctaaggaaagcatctccaactgattcttaaaatgtgcatcaagaaattatacaccttggacctggggaaactaatcaagcataaagtagaatactttttaggtaaggcataggtttttaagattggttcagggctttaaaacctcctttgtgatatgacctccatgtgacttatcatggtgtagagagttccaggataggtttctcatcactgattaacaatatagtcaaaaggaggagctgctggttcatatgtagtcaaaggtatggaaaacactattgcagatgtagttttaacaactctatgtcacttttaaaaaacttttaattctgtaggtgttttaatatgtgttttgtttcctttacaatagctaaagtttactgatcagtatcaaggtcaatattttttcattacataaaggtttaggggcagacagttttctctggtgttttagtatcacactattcattgaaggtaaaagctggcatggacagtgactgattacccacacatatgaatgtagataaagaaaagataaaagtgaacatatttgtctgtttaattgtgtaatttagccaactttgaaaatggaaaagggaaaatatttttccttcccagttccatttccatttgactataactttctttccatttgaaagaagcaaagcttagcagaatgataaaccacatgagtagttactttgagttgacataagtggaactcagggctttctaggtggtgcagtggtaaagaatccacctgccagtgcaggagacagttcgatccctgggtcaggaagatcccctggagaaggaaatggcaccccactccagtattcttgcctgggaaatcacagggacagaggagccagatggactatagtccatggggtctataggcaaagattcggacacaactgagcactgagcgcacacagtggaactcagtggccacagttatcctgtttcctctacattctgtctttcatctaacaaaagaaagattggataaaggtttttcctaagctaatgtgacaattagctgccaatggagagcccctgaggtaacaacccatgctttgccatggcctgagtaattagaaaacctagaaacaggtactttttgttgtatttggcaaagaaaaaaaaaaagcactactgaaattacttattctctgctaaagtcagtgaaccagcctctaaggaaaccacatgtaaagaattatcatgccagttttccagattatgatttttcaatattttagctgtcttttgaatccttcccatgttgtcttgaaattgaaagtttggaaggtcagaaccagtcttgccatgaacacatttaaagttacgaaattttgcttttgtgatgtatttgctcttatgtttattccttgctgttttatttttcttacatgtttttgttagagcagtaaacaataatactgctaaattcacgtttgaatttttttgcttttccttatgtatctgttttcctgatttctggttttccttacaacactgaagggaatgcatgtagtgggcagagactaccaagttgaatgattgtcagtatccatttggtgattcacctgccttgatgcttatctgttcctcatataatcttcactaataccacttttgcccataaccatacagctcagaatgttaatgcttgcatattttttcattatagctatccttgtgtagccttcagttgccatgaaagtattgatttcaataatttgtttatgggaactagttgtttaaccataactatttttatttatggtgtttataatatctagaaatatatacatgttttgaactgtatacttcaggagagtttagaattcttagtcatatttgatgactggtcacacatcaacaagctgatctacacagatgcctgagttgtagagggttatttggctgccatatgaattctttgttgtttagtaatgtatcagataatttgaattaatgtaaataaaaactttttaagggaggaataagtgccacataagagaattgggaacacaaaataatcttcttttaaaaataattgataaggtaataaatataggatgctaaatttgtcacatcagtttttcttaacagtagatatgaaaagattatatttctgcaagaatttattctctacatcatattttctatcttcagtctcataagtaaaataattcaggtaatgtgtgggacagcttatccgaaacagttctttcagatttaattccttgtttcagtttatttattttgctaagcaccaataaactttacttcatctgtgttacattcattataccaccataatagtgcacaaaagaaagaaaaagaagtagaagtaagcagtctaatacaggggagagaatttttagtggataggcttaaggcagttttaaatttagtaggaatttcctttaaaatttctttcagggattttttttttaagtgatttataaacgggaaacaataaagaccaggggatttagcagaaaaatatttttatcttttgacttcatatctttcattccaactaatgtaaacaactccttaactcttatgatagaagttgtgacagaaagaagagtataccactattaaagttcataaggaagcttttgaagatttactaagaatgacagtttttaatacttgctgaaatgtgtggtatagttcttttactctgaaaccaactataatttgggtaattttttagttacccaactgatttccccatctatgttttttcctgctgaccacctatgacagaagtaagggccctcacatagaagttttacagattggtaaggaggaaataatagtaatgtaaattaagtagttgcttactctttttagaaatattgcgattttcaccttaactataaagaagttgtctaagatgtgtaaattaatgggagaaaaagtaaagaccagagaagcaaatgagctttaataactaaatgggctcacctcaggtgggataaagtgtcatagaggttttagagaccatcaacttgaggaaagctttttttttttttttttttttttaatttttaaagtttatttactggctgtgttgcatctttgtcgtcctgtatgggatctttatttgcgacctgtgggatctagttccctgaccagggatcaaacccaggctcattgcactgggaaatggagtcttggccactggaccaccagggaagtcccagcaaggccactttcagtaccatactctaacaaggatctcagcataagcattcacaaggaggtgctcagtcctagtatagaagataatttgtcttgaattgataacatcatttgtgagttaattttttggtaagtattatgcgacaacttggagaaaatgctaatatgtttaactgtatgttttaaagggaaataaagtagattttaaaatactgaattttattgggaaaaaaatgaaagttgtcttttcctttacctgaagatatctacctcttttgtatttctcttaatactgcaatttttaaaaaagattccagatatatatatattttaccaaagtttttcataagacagcatgctaacttctctcttcttgttctttttctagcccaagttcacaaatgactttcattcagttggttggttagaccatgtgctgatgaccagttgattcagtccccttcattgtggttctgaacctcatagaatgcctcatctttgtcatctttctttaagtgcatcactaggagcattgaatgaaagattcctgaaacactaattcaaacacattaccactatcagactattcaaaagtaaatattctgtgattttgatcagtagaatatccttataattaactaccaagaattctggtatgtgtatagcttttttttaccgtatttgcagatatttcactgagtcctttttaataggcatatataataataagttttcaaaaactgaacaggagtccatctgaacttattacacttttaagcaacaaattccagaatgatttgctaagttcttttgacgtttttaattgctagaaagcaaaagtataattaaatttagaaaatgctattaatacatatttcagagaacaaataccatttgagtgaaattagaaagtgtagtgtagctgacgtttataatggagttatatagcattaactgacctaataaggcaagacttcaaattatagatattatcattgcattataatgaaggggggaaaatgagtcttccacagaggactgtgaaatcaacaattacctgagtacaaagaaaacaccatgtgcttttttggtcattacacctaatagttaacatattacaggaatatcctgggggaaaatcaacccatgaggaaactgatacagctctattgcgaattatctcatcatcatagatccctcagttttggaaataatttctttaagggtttttcttgataggcatttaggttaaggtctaaatgctatagatggaactgctaacgtatttattttatgaatgaagtaataataactgcctgggccttggtcatcatggctggtgtcagttttgtccattttatcatatgatttgttcttacgtctttaaagatatctggtgggcagtcagtgagaaacactttctcactgggataataatcacttgaaataatcactgaaaaagaaattacttttagctccatagaaaccactgtatttagtgctagtcaagatttgtggagaaggaaatggcaatctactccagtgttcttgcctggagaatcccagggatgggggagcctggtgggctgccgtctatggggtcgcacagtgtcggacacgactgaagtgacttagcagcttagcaagatttgtgagcctcttttttgaccatgtttttaggttcaaattaatgaaccttggtggcagcaatatgagagttaatatcagcatcatagcattttctaaatctgtacattattagaaatgaagcttgcttttttttagatagccatcatccgttttacagtgattaagatgagatttatttaaataaattttaatatcccttcatggaaagctttcacaaggagataattgagcatgtaattgtttttatgttatttgttcagtaaatatttattatctattatatagactatttcacctaaaatgtttattctaaatgtaataccttatattgcatataatggaatatagatattttaaatacagcactattgcaaatcagaaggcaaaggaatggttgagtccatttacctaaattaaaatttaagtaaacacagcctgattggaggactggctgcttttttctaacccatagcatttttttcaattcctacttactctctcttccttccaaaaacaaaaagtaccatctacctatcaactccatagatacttattgtttacctaaataggagataacatattttccatctttcacatacaagctcataaactgagaggaaaaaacttgaaaatatgtatcttattatttttaaaaaagaaagtcatttatttctgttagattgagttaagagggttattttttcccctccctcttctaatctaaaactgtaggagaatttcaacaggatttataaaggaatttagtatcttggttttcattaacataataataaatggatgtaaatactggcagtcctataagcctcccaacagtttttgtgatataagaaagtagtgtttaactattagtattgccatcataatttcattagtgtggcttctttacacactttctccagtgacgcaaatacagacatgattttttggaacatcaggcttatggctgccttctctcttcttcattacttatgttggacaaactaccattatcacttgccaaaaataatcccacagtttagtagactttagttttgaggtctctcatgtcctccttagaccaccagtagctttgtcttttggagatcagaaattggacgcttctttttgatgtctaacaaaccagactgtttcttaacctctaaggaagaatatagcaaaacaacattttctaagcaacatttctggaaacgtagcagcaaatctctttgaaatagattgtttggaacataggccaaattatttttgtattgtgctttaatcagatttgtgttaaggtaataataatagtaaagtctttaatatagggtaagatagttatatgtatttttctttatattcatatacagaaatgactaaagatgcaccaaattttgataatacctatattctcatgatgtaaccagttttaaaaaactaaggataaaatacagagcttacagattcaggcttctcttatactgtaaccatttccatgaaactaatgttaaaataggaagcttttctaattttaccaacttccctgttccccagttctccctttccacccactacctcccctctccaatcccgtacacactttctctgctatattttaggaaacttttttttcaatcctcatttctcctcccttctgttttctcggctttataacttatttatataacctttccaatgatatcctgtggattatgctaaattataaaaaataaatcatgtagttgagtttcaaagaccttataccatcaaaccatagttaataaaaactgaaagtttttttaaagtatgaccttaactctgctcttttcccatttatcccgagcacttcagtgttttttatgcaatgtttcaaactcctaactttccctgttatacaaaagagttgagtggcatttaaattatcaactaaaaatttccaaacttgtatttcaagtgatcagctttctcctctactgttaaataatttttattaaaaagttgttattaagtacattttatttcaaaatctttcaagtctttgctccaggtaatatatttttaaagtggtgcaagttttaatcttgagcatacttcattccaaatgttagagtctgttcacactggatgccctaaagcaaataattgctttttttctccctatctttcatttatccttaaacctcataagctagcaaaaggtccaaaattttgtcttctatctcctttgtcttctaaacctaccatatttcactttgcagaataccttaaaagattgcagtattcttttgagaagtatggtattaaagagaattctacaatgatgctatttattttcatccatctagtatttaggatgcattaaagtatctgttgctatcaaagtcttaatagattagatataacaaacttataatataaaacgtagcagttatcaaggtgaatatgtagatgggcctgtaaatggcagccttgcctcttccacaagagagtcttcctggtaacctgtaaatctgaaagcctttgctttcccagcctcctctaacctagcaagctatagagacctcaactttttctcctccatagccaaaataagagattatagttgtagaaggcatctctgactcttgctacagctctcttttctgggctttttttctttttaagtaaggattaaatttttaatgcattttctgattttaaaaataattattgtaatttaaaataatttgaacttaatttggcaagatttgtcccacttctttcccattctattgttttcctctatttctttgcattgatctctgaggaaggctttcttatctctccttgctgttctttggaactctgcattcaaatagtatatctttacttttctcctttgccttttgcttcttttcacagctatttgttaaggcctcctcagacaaccattttgcctttttgcatttctttttcttggggatggtcttgatcactgtgtcaagaccgctatacagtgtcacaaacctctgtccatagtcttgaggcactctgtctatcagatctaatcccttgaatctatttctcacttccactgtataattgtaagagatttgatttaggtcatacctgaatgatctagtggttttccctactttcttcaatttaagtctgaatttgtcgataaggaggtcatgatctgagccacagtcagctcctggtcttgtttttgctgactgtatagagattctccatctttgtctgcaaagaatataatcagttggatttgggtattgaccacctggtgatgtccatgtgtagagtcttctcttgtgttgtgggaagacaaagtttgctatgaccagtgcattctcatggcaaacgctattagcctttgccctgcttcattctgtacttcaagggcaaatttgcctgttactccaggtatttcttgactttctacttttgcattccagtcccctataatgaaaagatgagagatctcttcaagaaaattagagataccaagggaacatttcatgcaaagataggctcaataaaggacagaaatggtatggacctaacagaagcaaaagatattaagaagagatggcaagaatacacagaagaactatacaaaaaagatcttcatgacccagataaccacaatggtgagatcactcacctagaaccagatatcctggaatgcgaagtcaattgggccttagaaagcatcactacgaacaaagctagtggaggtgatggaattccggtggagctatttcaaatcctgaaagatgatgctgtgaaagtgctgcactcaatatgccagcaaatttggaaaactcagcagtggccacaggactggaaaagatcagttttcattccgatcccaaagaaaggcaatgccgaagaatgctcaaactacccacagttgcactcatctcacacgctagtaaagtaatgctcaaaattctccaagccaggcttcaatagtattgaaccatgaacttccagatggtcaagctgaattagaaaaggcagaggaagcagagattaaattcccaacatccactggatcatcgaaaaagcaagagagttccagaaaaacatctacttctactttattgactacaccaaaacctttgtgtggctcagaacaaacttgaaaattcttaaagagatgggaataccagaccacctgacctgcctcctgagaaatctgtatgcaggtcaggaagcaccagttaggactggacatggaacaacagactggttccaaattgggaaagcagtacgtcaaagctgtatattgtcaccctgcttatttaatttacatgcagagtacatcatgagaaatgctggactggatgaagcacaagctggaatcaagattgctgggagaaatatcaataacctcagatatgcagatgacaccacacttacagcagaaagtgaagaagaactaaagagcctcttgatgaaagtgaaagaggagagtgaaaaagttggcttgaaactcagctttcagaaaactaagatcatggcatccggtccatcacttcatggcaactagatggggacgcaatggaaacagtgacagacttttattttgggggagctccagaatcactgcagatggtaactgcagccatgaaattaaaagacacttgctccttagaagaaaagttatgaccaacctagacagcgtattaaaaagcagagacattactctgccagcaaaggtctgtctagtcaaagctatggtttttccagtagtcgtgtatggatgtgagagttggactgtaaagaaagctgagtgccaaagaattgatgcttttgaactgtggtgttggagaagacttgagagtcccttggactgcaaggagatccaaccagtccatcctaaaggagatcagtcctgaatattcattggaaggactgatgctaaagctgaaactccagtactttggccacctgatgtgaagaactgactcatttgaaaagaccctgatcgtgggaaagatttaaggcaggaggagaaggggacgacagaggatgagacggttggatggcatcatcaactcaatggacatgagtttaagtagactccagttggtatgctgcagtccatggggttgcaaagagtcagacatgactgagcaactaaactgaactgtaccacgtcggtgacagatcattaattttgaaatctctgcatataaatttataagccattttactctcatatttttatatatattcttgcctggatctcaatacatatttattgggtgaaatgtaaaataaaatcagccttctgaagagaaatacctatattgttctttaaaatatttttgaaacaagcttatatataatagattatttgaagatttatacatatttctaagtctttgtgtttgtttgtttgtttttaataaattcccatcacctctttaagactcacctcagcgaattctttgctggttctcactcagtcttcctttccttggatctcaccttgtccattgtgcagatctctgttaccaattttatgactgtattgtgatcatctttttaacacatctattagactatactttctgatggcagggtctgattgtgtctttattttctcatcataaagcactgcgctgccattgtggtggtaaatactgaggtgtgggattgtgatattagaattctactgctaaccccagtaaatttattttcaccctgtaagatccctgagaccagaaaacatacaaggaacaactgcagaagaaagcaggggagccttatctaggttagtgcccagaaacttccgggtaaggctctgtgaaactggactggagtggcctcttctatacattaggttcaaaactgaatgttacaactgactagtgacaagggaaggccaaagagaagagcacacaacaccatagagaggtgattgagattttcccatgtggaccctggctcagcttaccctttctgccatgtgggatgaagcaatatgagggagaagggtccccaacatatgtacaaccttttaaagcttggtgacctcacttattttgaaggtgatacaatccaggtcctaaaacttaacacatcagattagtgtttcctcatcttttgggaaagcggaggagttgacagagagacttgattgcatctgctccccttagagctgtataagtgagctttcaataaatgtttatatcaaatcagtccccttttcaaggaaatttatatttatttctgacatatcctcttctgttttaatgttcttattccgaactttgaaattcacatgttctcaatatttttgtgacttacacacttctaggattatcattacattgtgtttgtattggtatcgagacaatatataatgtaatcccagaagagttcttgaattctgtttgacctttgtgcgtaatgtgtccaagtgaaattggaccatttgcttatgaaaggaacattgacatagctatacttaagaggagaaggccctgaaatcttgatttgaaaagacatttattcatattgttaagttcatggcaccatcccggccaaggccttaatcatttgacttatcagtgttttcttttttttggtgatataagaagagtgagaatatgatatctggcttctatccagcagaatcagtaatggataaattaaaatgatttaatttgggcttatgtggtattggatagcactgattccattaagtcatttaaaatatataccttattagattattcaagtgctgtgcacatattaatataaaagcaaaataagagttatttaaaataatgaaccatgtagaaggaggccttttttctggcttctatatttttccagttttattgagaaataattgacatacagatgtatgatttttagttcacttttatcatgaaatgattatgacaataggtttagttaatatccataacctcatatagctgcaatataaagaaaagaaaaaagttcacttgtaatgagaattcttaggatttactgttagatggcccagacggtaaagaatctgcctgcagtgcaggagacctgggttcagtccctgggttgggaagatctcctggtgaagggaatgactacccactacagtattcttgccttgagaattccatggacagaggagcctggtgggctacagtccatggggttgcaaagagtgggtttgcaaagagtcgaacacaactaagtgactaacactttcatatcatatacaagtattatctgtagtcatcctgttgtacattacatccctagtccatatttatttataacttttactagtttgtaccttttgacccatcttcctccagttactcctgcccctcctctctgtctctggaaccacaagtctgatctctttgtctgggagtttggctttttgttttgtgtttagattccacatattagtgagatcatacagtagttgtctttctctgtctgacttatttcacctagcattatgctttcttttttttttttttttggtttttaagtaaatcttttttattacccactgaaaatccaattagtattttatcattcttttttttttttttttttactttacaattctgtattggttttgccatacattgacatgaatccaccatgggtgtacatgcgttcccaaacatgaacccccctcccacccccctccccacaacatctctctgggtcatccctgtttcaaaatccacccatattgtcacaaatggtaggattctgttggtttttatggctgaataatattgcattgagtgtagatccattcatccttcagtagacatgttggttgtttccatgtcttggctattataaatagtgctgctatgaacatgaggatgcagacatcggttcaagttagtgttttgggggcttggggatatgctgtcagaactggaattgctggaccatgtggtagttctccttttaatttttttgagaattatatactatactgttttccacagtggctgtaccagtttacagtgtcacaaatggtgcgcagggttttcttttttccatatccacactagcagttgttatcttttaatcatggccattctatcgggcatgaggtgatatctcattgtgattttaatttgcatttctctagtggctagtgatgttgagcatcttttcatgtatttgttgatcattcatatatcttctttggaaagatgtttattcaagttctttgcccattttttatttaaattgtttttgttgttgttgttctgagttctatgaattctttatatattttagatattaacctcttatcaggaatatgatatgcaaatattttccccacttcataggttgtcttttcattttgctgatggtttcttctgctgcgtagctttttagtttgacgtagtctcacctgtttacttttaacattgcctcttaatctttaggtatgatttctgtaaaaccattactagatccatgtcaaggagctttctgtgttttcttctgagagtttcatggtttgggggtcttacatttaagtctttaacccatgtcaagttagtttttatgggtggtacaagatagtggtcaagttttattcttttacctgtgaatatctaattttcccagcaccatttattgaagagactcttttctccactgagtattcttggctctcttgtccagtattagttgcttgggtttatttctgggctttcagttctattccactggtttatttgtatgtctttatgaaggaggcatatttaataattgaattatcttgtgttctttgtttagggtgttccagtgatggcaataagaaacaaaatgatatcagaaggactagacccagatcttcttgagtaagtagttcttctgatataatgatattactatcaaggtgttgaatttatcagtcttcataaaaacattttaagctctatatatgtttttcctatacattgttttatggtcagggaaacctcctccacaaataatgtgtctgctatgtttaaaaagtgaaaaatctatgctatactactaaaactagccttaaaacagtttaggagtgttttcaataaattggtgatgaacctgtatatgcaaaagagatggaaattgatgacatttttgtttcacagcagtagtatcgacaagaagcattgttccttttctttctgtgctgcattttttctctccgtccctccccgtcctctttttcttaatttgttgttttttatgtataagaccttagtatatagaaaatttactctacatgacctaggttgagccagatgggaaaataaatagagtaagtctatggtaatggttattatggaactagatattgtttgtgtgagttttataaaaaaatttttttgaaaaatgctgaaaagttgtgactcagaaatttgacagttatttattccatccaggcaaacctggctacacagctcatcctggataagatatatcttaatggattattcaaaactattctcttttgcaaatatctagacacatgtaaagagtctttccagtttgggggttttagttcatcccaatgtatttagctatgttagctctccaggcattcatactatactagcagtatactttggaattcttcttggctctgagcccttcaagaaaatgtatgcattttttctttcataaatgcaatctttttctcattttatctttcaaaatatgaaatttaaaaacatattttgaagtctagaagaacagatttcctgcacgtatctccatttagtatatatttcagtagcaaacagttcaagtacaatggtatggattggtaatttgaaccaaacatctccaggatatttggcatttgttctggaaattgtttctgacacactttaaaagcagatggattgtgacacatactttaatgtgaattgaacatatgggtccaatccattttggtactcattggaatatatgttgtaaatatatctaacattgaccatgaccccttttttgcttctggaaatacacagtagagcttctgtactaacagagagctaaaatgacctttaaaatgataattttttctctctggagaaaatgtaataaatgggaaactagcagccctgttagcatcagcatatgctagttcttcattccctcccccccctcctggctgcattgcatcccctgcctagcctaaaactccttcataatcctttacttcaactggctacccacactaacaacttgaaagtcacccttgattctgccctcctcccttcccctcactatgtcagtcactgtggttttctcatttttaatctcacatctgaccatatgcctccaagccattgctgtttagttcaagccctcatcatttctcacctgatttattttaattgctcctttttggttttctattctctttcagtccgtcactaaaaacttaagtggatgtcttcatatagttcatctgttcatacatacaagtcttcctgtgactctctgctgcccttaacatatgctctgacatcttagaattgcaaataaatgcatttatcatcaagactctggcttcatctcttgccaatcatccatgcatccctgtctcttagagctgtagcagactacttatatggttctctgactgtaccattttcctggtgtctttgaaagtttgtattcttccccatggaatttccttcccccatgttattggccaggctgatttgatattctttaagatcccatttaggtatcacctttttaagaagttagtggatgactaccaaggggagaacccctaggacctccagtactttcttggtgtatctcacttagcaagtttgagcgcacgtcattgtctgtaaatgttgagaaacattcagctgcaaggtggtgccaagttttagggtagaattccagtaacagttaacattgtcttacagaaaagctgctcctcaaccacagcctggagcctgaattctgacccattacctcatgagtacatgccattggtcacaaggggcactggttggagtagggtgactcactataacctatcaccactacaactagaaaaccagctgcaactacatttagctagatatgataagtggaatcaaccaccttgttaaagaggacttctgtcactttaggagtcatgtttacataaaagttaaggagccttggtttaaggggaaagtcggagatgaagaaaatgcaccatccaaggaaagagtgtgcttttatttagaatattaggtacatattaaacctaagccaaaaactttgactaaagacggttcttttctcttttaaagtataaacataaacttttctttttagccctaggtagtgagacaaacttatgtaattgtaggaagaagtagtctaaatctgtttgcactgaacaaagagtaaaactgaggttaatataggaataaatactgatcagaaaatagactgttataacagtttggaaactaagagtatgtaactttgaaccaaaacagtttacttgataagggagaagagaacctggctattttcttacaaaaatgactatcactgaattttagaaagtctataaaactgaagaaaatgccagataattaccaaaaaaatagtatttgtttgctacttcttagtgattatttaatcttcttaaaaatctaagtttttaaaaatgatgatagggcttatataaccaagacttagttttgggtctagcttgtaaaaattagctcttagcttataaaaattagttttaaaaaatgcagtgaattaaaaagatatgtgaaagagtacctttgtcacctttgtcatcatacacacaagttgatggaaaggaaagaaaatagaaaattttcaggttgatctgttttagaaatacagaacagataaatcataccttataaattttttcagtcaatgcctagattctcttaccaagaaaaaggaaaaatgtttctccctatcctattctatggcttcatttatgtcccataactaaggttactattactagtaattactacttttactactctaagataaatagcctctgaacctgtctagcaagagaggaaattagtgatggctaagtctcagtctaaggcagactttagaaatggtctacttgctgaggtccagattctgccctgcccctttctagctgtatgaccctgaactaattacctaatcaatctgtgcatccgtttccttgtaaatgtaaaatagaagagttcaccctttatagattcattcagactaagtaagcactcagcgcagctctgaacaagcagtaaatgttcagtaaatgttagttgtgatttatgaatgttttaatggaagaatatgtagcaagttctaaacaactggatttaccaggctctcagatcacaacttgtttatagtcccgtagttgcctgtataccattgtggtctcaacacagacatatataatgtacacagagtaattatccttttgagttatattctctgttttcccaaactgaaaaatctgtattttcaactttgtagtaaagaacagacttctgaaatttaaatttaactggtcacattcttaatgttagtaggagagtacagtttgcagcataatgatttggctaaagaaatcaagttatgcaggctttaaacagaaccagctaagttggcatttgtcctggatatatctattcaaaagacatttatacccttttctcagactgtgcagtgaccatgattgtggttgccaggaataaaagtaaccacctcagcctgcttatcactgagatgagaggagatttattagtgataaacaaaaggatactggaaagcaagaaaactttatttaattatattcaagacatatccagcagagtttcctgccctctaagggaattccttatctgctagtgatttgcctgtctcctgctaccaaacaacataatggattaaaggttgaattttgtctagttgagcatagaattgatctcagttctccaactgagcaattccaaaaacaggtttttttgtttgttccatttttctagttcttgcttaactggtatttcattcaaggtaattaccagtcgttgatgacagaggatgagacagaggggcaacagaggatgagatggttggttgatatcacctactcgatggacatgaatttgagcaaactctgggagatagtgaaagacagggaagactgatgtgctgtagttcatgggttcacaaagagtcagacatgacttagcgagcgaacaacaaccagtccttgaccactggctggcatactgactagaaagaagtataggacaggaaaaaacaatgtcagaaaactgattagtccactgttggaggcttagatcacaagagacagttcagttgctcagtcgtttcccactctttgcaacaccatgaaccacagcatgccaggcctccctgtccatcaccaactcctggagtccatccagacccatgtccactgggccagtcatgccatccaaccatctcatcctctgtcgtccccttctcctcctgccctcaatctttgccagcatcagggtcttttcaaatgagtcagctcttcgcatcaggtggccaaagtattggcgtttcaacttcaacatcagtccttccaatgaacacccaggaccgatctcctttaggatggactggttggatctccttgcagtccaaggcactctcaagagtcttctccaataccacagttcaaaagcaccaattcttgggcgctcagctttctttatagcccagctctcacatccatacatgaccactagaaaaaaccatagccttgactaggtggacctttgttgacaaagtaatgtctctgctttttaatatgctgtctgctgctgctgctgctaagtcgcttcacttgtgtccgactctgtgcgaccccatagacggcagcccaccaggctcccccgtccctgggattctccaggcaagaacactgaagtgggttgccatttccttctccagtgcatgcaagggaaaagtgaaagtgaagtcgctcagtcatgtccgactcctagcaaccccatggactgcagcctaccaggctcctccatccatgggattttccaggcaagagtactggagtggggtgccattgccttctccgaatatgctgtctaggttggtcataactttccttccaaggaggaagcctcttttaatttcatggctgcaatcaccatctgcagtgattttggagcccccaaaaataaagtcagccactgtttccactgtttccccatctatttgccatgaagtgatgggaccggatgccatgatcttcgttttctgaatgttgagctttaagccaactttttcactctcctctttcactttcatcaagaggctctttagttcttccctttctgccataagggtggtgtcatctgcatatctgatgttattgatatttctcctggcaatcttgattctagcttgtgcttcttccagcccagcatttctcatgatatactctgcatataagttaaataagcagggtgacaatgtacagccttgatgtactcctttcccaatttggaaccagtctgttgttccatgtccagttctaactgttgcttcacaacagtaagagataagagataataaaaatattgaagaagcagtgttaaaaacagttggggtctgccagtgtctagcaagaagttaggggagctattgtgatgtaccccaagataaacagcagaaacccatcttacctaggatagctagctttctttttctttatcatattaggcattgtgttgtttctctggctggggaatctacttaccacagcaaagaacaggtatacctgccttgatgggcattcagaatagaaaagaccaaactgtgtagtttgagtaaatgtaatgctgaaataagtcttactagttactgtagacaaaattgtctttttttttttttaactatcctaaatgtctttatatagtcaatgtaaccagtactttggccacctcatgcgaagagttgactcattggaaaagactttgatgctggcagggattgggggcaggaggaaaaggggacgaccgaggatgagatggctggatggcatcactgactcgatgaacgcaagtctgagtgaactccaggagttggtgatggacagggaggcctggcgtgctgcgattaatggggttgcaaagagtcggacacgactgagcgactgaactgaactgaactgaatcttagttcaggaattcagtgtttggctgtttccttaagaccacttattaactattgcataggtggctcagatggtaaagaatctgcctgcaacacaggcagacctgagttcgatccctgggtcagaaagatcccctggagaagggaatggcaacccactccagtattcttgcctggagaatcccatggacagaggaatatggtgggctacagtccatggggtcaaaaagactcagacataactgagcaactaacactgagaacgacactaattgacaagtatcatgtgacattataactgtgtgtgcaatagttgatattgaaaagtgatttgaataactatcacaccctatccccacaaccctgctactcagcagtatttgctctaacaatgtttttggcacttcatctgctttaaattccactgctttaaattgaaagaaaatgaaaaatatctttaaactatttacctacataaataaatgtttttccaaagaatatttataatgtttgccatcaaagtggttttgattttaagcacaaatgtaaatctctttttaatgaaaacagatcaatggtgtttatatcttaagactcctttatgtacaggatcacagaaatgtaactcaaactagctaaagtaaaaagggaagttattgactcacatccctaagaagtctaagcaagacaaaatcaggggcacagcaccattattgctggctggttggtattttctctcacctgtacctccgtctgcctttaatcaaacatggcataataatccacttttctcctactgctgataagcttcctcctggaaaacaaggaattagcaaataatatttgctttatattttaaatggctgtaatattgctagtttcaccaactgaaaggaaggagaaccccttctccatagtccatagctcatttctagggaagcattctgattgtccccgtttggcttatgagccctcccttatgctggtgtctttacagagaatgattctcctgacctgccagtcctggattatgtgactgaaacaaggaacagtataaggaaaggatgaagatggcagggattgtggttgacagtcttgtttatgtaaatgggagaaaaatgacagaaaaacgcgcacacagcatcctgtttgctaaaaagtactgatttgtatatggttagtccttttggagaaggcaatggcaacctactccagtactcttgcctggaaaatcccatgggcggaggagcctggtaggctgcagtccatgggatcgctaagagtcagacatgactgagcaactttgctttcactttccactttcatgcattggagaaggaaatggcaacccactccagtattcttgcctggagaatcccagagacaggggagcctggtgggctgccatctgtggggtcgcacagagtcggacacaactgaagtgacttagcagcggcagcagcagcagtcctttcctttctaaattttggctccgttttagttgaggtcaacctagtaatctttgaaaatatctctttttaaagaaattaaacagtaaggagtttaaagttaagctttaaaaattttgcttttactaagacttttattgataatcttaatgccacaaattatataaatatgcttattaaaatatagctaccaagataaccactaaagattgagattttttaaaatatatacatgataaatcatgaatatgacttcttatttttttctgcgttttgctgacgtagtcttttttagtgattcatttatattgtgtaaaatactgagagtattatgaaatcttcatttccacattttagtagtgaagtgtgactagtaaagtagcaaccatttaaaacatatcttttaaaacttctttctttgaaagaaaattaaaaggtatgcatgtgcgcacacacacacacatatacacagaatcaagccagagcagttctgattattaaaaagccaaatactattccccctaagaatattaatatgaatatccagtctggaaatgttgttaagagttttattattacattaacatttttaaagctttataacttatttgattttcacaatttttgaagttttttatataacaaaaggaactctagtatgtagcttttcttttgttttcatagcaattacaattcaaagtagctttaaatttattttaaaaatgaatgagggcaagcaaaaaagtatcagtaaaatatgaagaaattgtaacccttgtacactctgggtgggagtgtaaaattatataattgctgtggaaaacagtatggcagtttctccaaaaatcacttctgggcatatactcaaaaaagtgaaagcagagactcaaatagatgcttgtatactcatgttcatagcagcatttttcacaatagtccaaaagtagaaacaacccaaatgcccatccataagtgaatggataaacaaaatgtattatctgcatacaatgaactattattaatcctaaaattgaaaacaaattctgatacatggtacaatatggatgaatcttgaagacatgataaatgaaagaagacagtcacaaaaagacaggtattgtataattccacctacatgaggtacctagagtagacaaattcatagagacagaaagtagaggagtgattgtcacaggctagaaggagagagaaatgaggagttattgtttaactggtacagagtttcagttttgcaacatgaaaagaattctggaggttggttaagtggtgatgattgcacaatactgtgaatgtactcagcgccactgaactgtacacttctaaatggttaagatggtaagttttatgttatgtgtattatacaacaataaaagaaatgagaaaaggaagaaatgaacaaagacagagaataacaagtgttgacaaagatatggagaaattataactctcatattctgatggtggaaatataaaatgatgcattcactggggaaaacagtttgacagttcctcaaaaagtcaaacatggagttaaccagatgactcagcggttctacttgaggtttgtactcgagtattctaaacatacattcacacaaaaacttgtacacaaatgttccactcgcattattcataacagccaaaaagtagaaataacctaaatgttcatcaactgatgaatggataaacaaattggtatatccatggaatggaataatattcgccataaaaaggaatgaagtactgataaatgctacaacatggaagagtcttgaaaaaaaggctaaatatcctcgatcctatttatatgaaatgtcctgaatagataaatccatagacacagaaaactagattcatggtcatcagaggatgagggggaaaggagatggaatgtgtctgctaatgagttttaggtttctttttggagtaatgaaaatgttctagaattagatagcagtaatggttgcacaaccttgtgaatatactaaaattctaatttgtacagttttaaatggtgaattttatggtatgtgaattatatctcaattaaaaaaataaatgacttcttaagtgtccatcaacagatgaatggttaaagacttgatatatatatccaatagaatattattcaaccatacaaaagaatgaagttttgccatttggatggacttggggggtattatgctaagtgaagcaagtcaggcagagaacgacaaatactgtatgatacgacttatacatgtggaatctgaaaaatatcaataaaccctagtgagtataacaaaaaagatgcaaactcacagatatagagaacaaactagtggttaccagttgggagagagaggtggtaggggcaatatcaagaggggattaaaaggttcaaacttatatataagtaaactacaaggatatattgtacagcacagagtatatagccaatattttataatgactataaatagaatattaccttaaaaaattgtgaatcactgtattgtacacctgtggcttatataattgtgtacaccaactatacttaaatttttttttaaatgacttcttaaaattcctaaacttagttgtgtgatttcactgaaagctgacatttcatataacttctctgcactctccacctattgtccctaccaaatgacctaatctcatctactgttttactccagttacttttctacaccctagctaccaaaagatttataggtcccaaatgcactgtgctgcaccatccctgttttttctttattcagaatgctctcatccccacttagtcccacattttctgtttctgacaaattcatgcctatcccaacactcttcacaagtgtattcacctttcttgagttttctgtgactaacgctgaagtgaagtgaagtgaagtcgctcagtcatgtcctactctttgcgaccccatggacctatgtagcctaccaggcttctctgtccatgggattctctaggcaagaatactggagtgggttaccatttccttctccaggggatcttcccaaccctgggatcgaacctgggtctcccgcatcagtaacgctagtagaatgaattaccttttcctttcaaacaagtgtagttactacaattatattttgtgtatcacactgtataagaatagtttatttccttctgtctcccccactaaattatcaacttcagagcagcaactacttattatttgtttctgtacctgcagcacctaaaaactttcttggccaagtagtaggtacatgataacaatgagaattataatcataataatagatagccattatttaatatacctactatgtgccacatgacaaacctcgacagcatattaaaaagcagagacatcactctactgacaaagggcagtatagtcaaagctatggtttttgcggtagtcatgtacaggtgtgagagttgaacaataaaaaaggctgagcactgaagaattgatgctttcgaactgtggtgttgaagactcttgagagtcccttggactgcacggagatcaaaccagtcaatcctaaaggaaatcagtccttgaatattcgttggaaggactgatgctgaagctgaagctccaatactttgaccacctgatgcaaagagccgattcattggaaaagactctgatgctgggaaagactgaaggcaagaggagaagaggatgacagaagatgagatggctggatggcatcacccactcaatggacatgagtttgagcaaattctgggagatattgaaggacagggaggcctagcatgctacagttcatggggtcacaaagagttgggacacgactgagtgactgaacaacaacaacaatgtgccatgtattattcagtgtattttgcagttagtaattcatcctaatattcacaacaatccagtcagtcagttgggtacacagtgtagttaaatagtttccccaaagttgctcagaaactacatagcaaggctaggatttgaacccagtatttatacacactactaatagagttccttgcttctgtggagaataatgaagactgtgttcccatgttagcattttagtcagtggagcatcagtcaaaaccactaaatgctgtacttagctctaacactttattatactgagtacatgtgacttcctcatgggcataattaattttttttaatttatttattttaattggaggctaattaaaatattgtagtggtttgccatacactgacatgaatctgccatgggtgtgcatgtgttccccatcctgaacacccctcctacctccctctccatcctattcctcagggtcatcccagtgcactagcccagagcaccctgtctcatgcattgaacctggactagtgatctgtttcacatatgatatacatgtttcagtgctattctctcaaatcatcccaccctcgccttctcccacagagtccaaaacactattctatacaactgtgtcttctttgctgtctcacatatagcgtcattgttatcatctttctaaattccatatatatgcacattagtatactgtattgatgtttttctttctgacttacttcactctgtataataggctccagtttcatccacctcattagaactgattcaaatgtattcttttaaatgactgagtaatattccattgtgtttttgtaccacaactttcttacccattcgtctgctgatggacatctaggttgcttccatgtcctggctattataaacagtgctgcaatgaacactggggtacatgtgtctctttcaattcttgtttccttggtatgtatgcccacaagtgggattgctgggtcatacggcagttctatttccagttttttaaggaatctccacactgttctccatagtggccatactgcattcccaccaacagtgtaagagggttcccttttctccacaccttctccagcatttattgcttgtagacttttggatagcagccattctgaccagtgtgagtgagatggtacctcattgtggttttgatttgcgtttctctgataatgagtgatgttgagcatcttttcatgtgtttgttagccatctgtatatcttctttagagaaatgtctgtttggttcttttgcccattttttgattgggtcgtttatttttctggaattgagctgcagaagctgcttatatatttttgagattaattttttgtcagttgctttgtttgctattatttttgcccattctgaaggctgtcttttcaccttgcttatagtttctttcattgtgcaaaaacttttaagtttaattaggtcctatttgtctaattttacctttatttccattactctgggaggtgaatcatagagaatcctgctgtgatttatgtcagagagtgtcttgcttatgttttcctcaaggagttttatagtttctggtcttacatttagagctttaatccattttgagtttatttttgtgtatggtgttagaaagtgttttcgtttcattcttttacaagtgattgaccagttttcccagcaccgcttgttcaagagattgtgttttctccgttgtatattcttgcctcgtttgtcaaagataaggtgtccataggtgcatggatttatctctgggctttctattttgttccattgatctatatttctgtctttgtgccagtaccatagtggtgattcctccaggtccatatttccatacaaattgtgaaattatttgttctggttctgtggagaaaaaccgttggtggcttgatagggattgcattgaatctatagattgctttgggtagtatactcattttcactatattgattcttccaatccgtgaacatggtatatttctccatctatttgtgtcttctttgacttctttcatcagtgttttatagttttctatatataggtcttttgtttctttaggtagatatagtcccaagtattttattctttttgttgcagtggtgaatggaattgtttccttagtttctctgttttcacattgttagtgtataggagtgcacgggatttctgtgtgttaattttatatcctgcaactttacaatattcattgattagctctagtaattttctgttggagtcttgagggttttctatgtagaggatcatgtcatctgcaaacagagttttacttttttttgaatctggattccttttatttctttttcttctctgattgctgtggctaaaacttccaacactatgttgaatagtagtggtgagagtgggcacccttgtcttgttcctgactttaggggaaatgctttgaatttttaacctttgaggataatgtttgttgtgggtttgtcaaaaataggttttattgtgttgagggatggcatcaccgactcgatggacatgagtttgggtaaactccgggagttggtgatggacagggaggcctggcatgctgcaattcatggggtttcaaagagtcagacacgagtgagcaactgaacggaactgaactgaactgatgttccttctattcctgctttctggagggtttttatcataaatggatgttaaattttgtcaaaggctttctctgcatctattgagataatcatatggcttttatctttcaatttgttaatgtggttttttaattgattgatttgcggatattaaagaatccttccatccctgggataaagcccacttgggcatgatgtatgatctttttaatatgttgttgaatactgtttgctaggattttcttagggatttttgcatctatgttcatcagtgatattggcctgtcgttttctttttttgtggcatctttgtcaggttttggtattagggtgatggtggcctcatggaatgagtttggaagtttaccttcctctgcaatttctggaagagtttgagtaggataggtgttagctcttctctaaatatttggtagaattcagctgtgaagccctctggtcctgggcttttgtttgttggaagatttctgattacagtttcaatttctgtgcttgtgatgggtctgttaagattttctatttcttcctggtttagttttggaaagttatacttttctaagaatttgtccatttcttccaagctgtccattttattggcatatagttgctgatagtattctcttataatcctttgtctttcattgatgtctgttgtgatttctccactttcatttctaattttgttgatctgattctactccctttgtttcttgatgagtctgactaatggtttgtcaattttatttatcttctcaaagaataagcttttggctttgttgatttttgctatggtctcttttgcttcttttgcatttatttctgccctaatttttatgatttctttccctctacgaaccctggggttcttcatttcttccctttctagttgctttaggtgtagagttaggttatttacttgactttttccttgtttcctgaggtaagcttgtattgctatgaaccttccccttagcactgcttttactgagtcccataggttttgagttattgtgtttttaatttcattcatttctatacagatttttatttcttttttgatttcttctgtgatttgttggttattcagaagcatattggatagcctccatgtgttggaatttttaacagttttttccctgtacttgacatctaatcttctgccttgtgatcagataagatgcttgaaatgatttcagtttttttcaatttaccaaggctagatttatggcccaggatgtgatctatcctggagaacgttccctgtgcacttgagaaaaaggtgaaattcattcttttggggtgaaatgtcctatagatatcaattaggtctaactggtctattgtatcatttaaagtttgtgtctccttgctaattttctgtttagttgatccatccatagatgtgagtgggatattaaagtctcccactattattgtgttactattaatttcccctttcatactcgttagcatttgccttacatattgtggtgctcctatgttgggtgcaatatatttataattgttatatcttcttcttggattgatcctttgatcattatgtagtgtccttctttgtctcatttcacagactttacttcagagtgtattttatctgatatgagtatggctactcctgctttcttttggtctccatttgtgtgaaatatctatttccagcccttcactttcagtctgtatgtgtcccttgttttgaggtagatctcttgtagacagcatatataggggtcttgtttttgtatccattaagccagtctttgtcttttggttggggcattcaacccatttacatttaaggtaataattgatgagtatgattccgttgccatttactttattgtttgggcttcagtttatacacctttctgtgtttcctgtctagagaagatcctttagcatttgttggggagctattttggtggtgctgaattctctcagcttttgcttgtctgtaaagcttttgattttgctgggtacagtaatctgggctgtaggtttctctctttcatcactttaagtatgtcctgccattccctcctggcctgaagagtttctgttgaaagatcagctgttatccttatgtgaatccccttgtgtgttgtttgttggttttcccttgctgcttttaatatttgttctttgtgtttgatctttgttaatttgattaatatgtgtcttggggtgattcgctttgggtttaaccttttgggactctctgggtttcttggacttgggtggctgtttccttccccattgtagggaagttttcaactatgatctcctcaagtattttctcatggtctttctttttgtcttcttcttctgggactcctaggattcaaatgttggggtgtttgacattgttccagaggtctctgagattgtcctcatttcttttaattctttttttcctctctgcttcatttattcccaccattgtatcttccacctcacttatcctatcttctgcctcagttattctactattggtttcctccagagtgtttttgatctcatttattgcattattcattattgatttactcttttttttctattctaggtccttgttaaacctttcttgcatcttctcaatccttgtctccaggctatttatctgtaactccattttgttttcaagattttggatcatttctactatcattattctgaattctttttcaggtagactccctatctcctcctcttttgtttgattcagcgggcatttatcatgttcctttacctgctgagtatttctctgccttttcatcttgtttagattgcctgtgtttggggtggtctttctgtattctggcaattcatggttcttctttattgtggaggtttctccctgtgggtggggttggatgagtggcttgtcaaggtttgtgttctggtgggtggagctggatttcttctctctggggtgcaatgaagtgtcccagtagtgagttttgagatgtcttgggtttggtgtggctttcagcagcctgtatattaaagctcagggctatgttcctgtgttgctggagaatgtgcatggtatgtcttgctctggaacttgttggttcttgggtgcagcttggtttcagtgtaggtatggaggcttttggatgagttcttatctatcaatgttccgtggagtcaggagttctctggtgttctcaggtttggcgtttaagctcctgcctcttgttttcagtcttattcttacagtagcctcaagacttctccattcataagcactgatgataaaacatctaggttaatgtagaaaagattctccatagtgaggaacacccagaaaggttcactgagttacatggagaagagaagagggaagaggaagataaaggtgaccaggaggaggagaagggaatcaaaagggaagagagcaatctagccagtaatcaaatccttatgtgctctccactgcctggaacacccagagaggtttacggagtaatatagagaagagaagagggagtaaggagatagaggtgaacaggatgagaagagagggggtcaaaagagagagacagacctagccagtaatcagttccctaagtgttctccacagcccagaatacccaaagaaattcacagagttgagtagagaagagaagggggggagggaggagatagaggtgacctaggggagaaaaagagtcaaaagggggagagggcaatcaagccagtaatcacactcctaagtaaaaatgggtactgaaaattggattcttaaaggtacaaaattgataacaaataccaaaaagcaaagattaaaaatctagagtagaggttgctgctgctactaagtcacatcagtcatgtccgactctgtgcgacctcatagatggcagcccaccaggctctgccgtccctgggattctccaggcaagaacactggagtgggttgccatttccttctccaatgcatgaaagtggaaagtgaaagtgaagtcgctcagttgtgtccgactcctagcaaccccatggactgcagcctaccaggctcctccgtccatgggattttccaggcaagagtactggagtggggtgccattgccttctccgagagtagaggttagactctcaaaaatacaatattttaaaaaaatcacaaaaattatattgaaaaaatagatgaaatttgctttaaaaatagggtccttttttcttgaaaggtaatagtaggttataaaatgaaaattaaaggagtaataaaggacttaaaaattttttaattaaaaaaatgaaaacagaaaaatgtatctaggaatttctctggagctgttgtgggcagtgtggggtcagttcagtttcagatagttccttgttccaacttatacttctcaaggtctataagtcccttccaatgtagttggtgctaactacagagttttaatctgttgaacctgtcacttccgaagcagttccctctgtttattttggcttcttctgtttgcaagtctccggtgtctaatttccaccctgacacaagggggtggtggtgatcacttatttaggctcacttgttcagtcatcctgttgggagggaggaacactgcaaacaaatatcactggcgtgtgtggggagtgctcgcattgtcacggccacactgggtttgcccctgctcacggcgtgtgtgctttcccagtctacactactcagactccaggttgctctacaggcgaactgtctaaagcgggccctgggttgcctaggtctaagccgcccaggctcaggttcaggttctcaggtactccgcaaaggcggagactcagttgggcctgcattttgtgcctttcctaggtctgagcagctcaggcgaccaggtgcttggcgagcacactctccccaggtggggcggggcatcttatcacctccccagtcccagccgctccgtttcctgggtgcacagcgggagcaccatctcaagtgtgttgtgtgtctcctctggggaactgatctctggctgtgaccttcctggcggatgtcaaccgtccaggattctaggaagacttggttagcaactgggagcctgctcacagtttggtagaggatgctgtctctggggctgagattgctcctttctggctctggctattgcccgcctgcctccctgcctctggcagacaatgggccagtccaagaaggctagctctcctgtggtattagcccagtcctttgttctgtgagggggccggcagtgcgttaggttagagcttttcacgggaaagttctctttttttctctctctctctctctggctgtcacactgtttgcattgctatctcacgttagctccttcacattgccctcagggcattcaggctcagtccctaccctaaacctgttcagcaccccttgctggtggcagatgctagtgtctaggctacttctccgctgggtgttgccgttaggcacaggcacgtaatctgtgggttttatttatttatttttcctcccagttatgttgccctctcagattccaaaactccccacagacctgccagggagagggtttcctgatgtttggaaacttctcctcttttaggactccctccccggaagaggtctccatccctaactcttttgtctctctttttatcttttatattttgtcctacctccttttgaagacaacgggcttcctttctgggtgcctggtgtcctctgccaatgttcagaagttgttttgtggaatttgctcagcgttcaaattatctttcaatgaatttgtgggggagaaagtggtctccctgtcctattcctccaccatcttaggactgcccccccataatctaaaattgtacagtagagcaaaggggtttatgtttgacccattgctaaggagcagtgccagcatttcttctgtttcatagcacaacagacatgatattaaaaactaagtcagaatttggccataattcataataactaataatataattcataataacaagtaggagattatacattttattttagcaataattattatatttgtggcaaagaagagttttgtttgttggtatcttaaatcttactaagaatcaaggagcctgagagaaaaataagttttgtagcttttaattactgaaacagagcagctgtattagtcttcctttccctcttataaggtttcccccaggtatactttgcttaatttgctttcttggttagagtgaataggtgctgagtgattgtgctgctacattgattaaatgatttattaacaaacactatggaacctatcaagttgactgttgcaatgacaccaataaatttcctgtggttttttttaataacatatctatacaaagctggagtttaaccattctcacatcatcttgtgcctagggaatcttcaagacattatttttatgaactaattcttcttatgtttatctgatgataaagcatataagtgaaaacactcagcagacattaagaaccacctttgaacagtcactctcctcccctacaagatttctgtattgcctgtgtttcttactggccattcttgaaatctcttccatttttaaattactcccttcagctttcctgaacatgaaggttttctttttttttctcacttctagctcttctctctctctaccttacggacacttggaggctgcaagtatttagcactggtcatgccagcctctccagatcacatctctgtctgtcattgggtctccatggtaatgagaagcagaaagtgctgaagtggcacactgtgtaaggactggcaggaggaagtggtgccatggcctgcataggaatagcactgaatccccatggtactggagaagcctgcgagaagcatgctgtgtgtggtggagagcagggggctcttggggaaggacgcagacttggcagatttattagcagcagtattctaggatgaacctaatttacagttagtgattttttttttcaactggaaaaaccgttaaatttctttcttttttttttcccttctctttcaggaggccagatgctccagtgcctgatggtgaaggtgaaaaaaacacagaagaaagttcagatagcgaatcttcttttagtgactaagcttaattttcataacaattacatatgcatgtgttagtacacctttacattctataagagagcctgaactgtaattcttagttataaaaacatcaaatggctacagatctgccaccaagcttcctctgtgttaaaaaaaaaaaaataaagcatttataataagctggcagtttgtcttgttaccaaaataaaggtccctgctgagaaatagaatagcctaaataaagtactaagatggactatttcagagatgcaaggagcatgtagaatgaagtcagtgtgaggttggtgttcaaaaatagactcaatgcaaaaaaaaaaaaaagtgactttggcaaagtgaacgattcaatttttgtgaatactttagcatgataagtattatgtacacttgtatcataaggttgttaaatttctgtcagaaattaatactggattgaaaatttttgtgacaactggaagcttatatattacgtttattgtaggtctggaacttattg

SEQ ID NO: 123 - DNA, 7703 bp, Hippotragus equinus
  source 1..7703: mol_type = genomic DNA
aatctgatgggagggtagagccccactctggagcagtgattaggagaccctctgcggtcagttgagcataacagagctccgactgcatgtagaaagcccagggactgggcagccacgaaagaagtgtggggcaaatcaggtggccagggtgggttgttggagcccagcactgtcaaggcaggtctgggatgcaagaaggaggggcccaggcaagatgcatggccaggcctgagtactggctctctgaccccctcagccctgaccccctgctttgggcctcagtctcccctcccctgcccctctgcccagggctcagggatgccatttgcttcactgagcccatctatctgaaacggtttcacatcttcctcttttgtgactggaagtcacagggcaaggcgtgaaaccatcagtcacagaggcaacacagagcctcatcgtttgaaggggttgaggtgagggggcagggggagagcggcagggtagccccgggccggtggatgaggaggggcaccagtgggagcaaggtgcccaggaccatggctgaggccatcacctatgcggacctgcggtttgtgaaggctcccctgaagaagagcaactccagccggctaggacatggtaagggcagcggcagcggctccttgattctgcagctccatcctccttcgagatcccactcccaccccacagacccccatcctgatcccacctttcctctcctctccagacccggaggctgatgaagatggcgaactcacctatgagaatgtgcccccaggcacaggaggaccctcgagcttggcttcctctggattacgggataaagcaggtctggggagcctgggggatgcgtgtttgtgaggggctgtgttttgagttgggggggtccacagcattcttgggaggacagtatccttggagaaaggatgggggttctcaggaagagaatgaggaccaatcacaggagccaaggaagaataaagcttccagtggggagcgagggctctatggagggatcagggcagccctgttggggtgcagagctccagtgagaaatgggagtccctagggagaggggagagaagagaagagagggaagggggaggaagggagagcactcctggggagagggttctggcaggcagatcagtggccccaaaggcaaagatcaagggagaccctgaagggttatagaggctccccggggaaaggataaggtaagacctacgaggggcacgggagccccaggggagatgaggagctccggagagcgctaagggtggccccgagcggcggctgaaggcaccttaggacagactggagtctcggcgcggtggagcgggtaggagtgggaagaagggggcatttcctgggctttcccaccttcacaggagtctctcccttccgcaggggcccagtcggagcagccaactgctgcctggagccccgtgacgtcaccagctgccgggcggattctctggtgtgagtacccggcgctcccagccctgcgcgcgcctcccgctgcccagctagtgttccaagtccttcgcgggatgctctctcccgcgaatctccacacccccacccctcggtctaccaattttcgtggggctcactgcacccctgcccccccaacccgctgtctccctaaggccatggagcctgcatgtggtacctggttctgggcctgctcctcacctgcctgctgtgcggggtggctgccacctgcctgggagtgcgctgtgagtatggctgcccctggttttccacttacccggaaggaacaacgtgctcccccactttccccaacagctgcccttcctcagcagggcgggagtcactaccaccacagcctcagccttgggctggtttctagccaggtctgttttcagagcgcagtgacttcctagattgtcctggcctaacccagttttaggtggtcagatcttatattccattccagcctattagggcaaacttgcaagaagcagaaaagggactgacgctgaagcctcgggttaccagggcatggctgatgatgtcctgaatctctctttatggccaaacagacttgcaggtgtctcggcagctccagcaaatgaacagggttctggaagccaccaacagcagcctgaggcagcagctgagccagaaaataacccagctggggcagagggaagaggatttgcagggatccaggatgaagctggcccagagtcaggaaacactacaggtggaacagaaggctggccaggctaccagacagcagttgcaggtctgccagtctgacggagagaagacaaaagaggccttgagaaataaggagacagagaggatgaacttggagcagaggctgaacagtatgtgggaaagactacagtctttcttcaggtgctcctccccaggtatctgctctgggaaaggagagatgggagggcctgccatgagggatggactgaagtgaggggtctgtctgtctaccggggtgccattgagttgttcaggaaggggtggtgaaccagagtgctggctgacatggacgggagctgtgcatccttggccagcagggggaaggatctagccacctactggatttagggtttgatccctgggttgggaaggtctcctggagaagggaaaggctacccactccagtattctggcctggagaattccatggactgtatagtccatggggtggcaaagagtcggacatgactgagcaactttcactttcacccagctctaagcggggggtcctcttggggagaagagggtggcagccagcagtgcaaatgatacagagcagcaagctcagggctcatctggctcatctcagggctcagggcatatcagtgtcaaggaaactccctgaatttgggtgtgaaattgattgttcacatgtttttctatagagaggacctatgctgctaagtcacttcagtcgtgtccgactctgtgcgacctcatagacggcagcccaccagactcccctgtccctgggattttccaggcaagagtactggagtgggttgccattgccttctccgagagagaacctatagttctatttaattcttgctatagctgagccccccaaagattaagaattactgatgattgtggtacagtctggagttggggcaaggtagctgaggctgtctcagagagcttggagggcagtgaactagggtggaattgctcatcccttttgaaaggaggagtgcagcagtatgtggggatgaaggagggggacacacagaaggtctgccagagtaggctgaggttgagggagggtcccctgcctgagaggaggggactgcttgtggactggttgtctagaggttaggctctgtctaggtcatgggcatctggatactcccccaaagctttaaacaaagagatcatgtacagacacctgcagccctggtttctttaaccttcttgttctctacaagcctcactttcatgccagtactgcccacccccactgccatctcccatccccacagctgaacctagacctcagcatcccaacccacacttccactgaaaggacggttcagatcttcactgtgaccacaacgggcccccacacttcttcttacagaggccttctacctgctggctcccctgcttcctcccttctcatcagctatcacctgtcttcacttctttctcaacccatcttgatttgagggcctgtccccttacttcagccagccaactcactccttggttccagtgtccttctggtatatctgattgccaatatctcaactctggatgaacacatatgcctgcacccagggatgacaagctgtgcagtcattctgcttggtgccacaaaactctagtctcaacgtctggtgggaccccacactactagctctctgtaccccactaccctctccctcactctcagcagatggccctactctgccagagaggaatttcctgttttccaccaccagttctgtgtatccatttgcatttttgtccatcctcatctcttgcaaggataactgcaacggcttgctgaatgttttctctaaacatccctcctccaaatccacttttcatgttgtagctagggtgatcctttaaaaacaaaaatctgatcatgtcatttcagttaagatcatgtcagttaattaattacatcaaaagttatggaatacatgctctgtgtccagcactgtgcccaggcacttgggatacagccagagaacaaaatgcctcagtgtaaaaccttacattgactttctcgtgctcataatctaaaaataaaaaattctcaatctggtccccactgcccctacctacctttcagtgtgccgctcatcccctcaccctcgttcatttggccacactggcttttatattcctttaagttgctgtagggcagtaactcaagggagtagctgggtggggatgagaaaatatggccagaagagagggaattggaggggaaggaatgattgttggggaggtaggatggatgggacaaagcagcagggagaggtgggttgggatcaggagcacagactggggtgtcggatattaaagaaagagggaggtttacttctgaccaatagtcaggaggagagaaaagagacaaattttgagatggagggaaggaaaatggagagagttcacacgtcaagtgtctgacaacttcaacaaagcaaggttgtcaacttgtggaagactggaggggaagctagtggctagcagcttgaggaatgaagggaagttttgaatatgcgctggggaatgcgttagggagctaatgagacaatgagatgaatgggaggtccgttgatcacttctttactggggacccaggtaaggttaaccaaaatggggggtagactgcaattgttcagaaactggggatagtaccaccagcccttttcaaataagcctcccagattgaaaaaaaaattgattgattgggttttggttgtgctgggtctacattgctgtgtgggctctctctagttgcagagaccggggactatggttcattgcataaccttctcattgccgtgtcttctcttgttgcggggcatgggctctaggtattctcaggcctcagtagttgtagcacgtgggctcagtagttgtgggctcagggcttgtgggctctagggcatggacttagttgttctgtggcatgcagaatcttcccagaccagggattgaacccatgtcccctgcactggcaggcagattcttattcactgtgccaccagggaaatccaaacctcccaggttttaaggagtaaaattgttgaatgttaaaggctttcactaagtatgcacaggtattgcatttccagggtagtcgaagaaaaaaagattacaaagtttaaggaccagtgaaggcattgaggttccactccagggaatattgttagcaaccgggttgctgagcattgagatccccctctggggtctggacagtgcagtgctgtcactctctttctgctttttagatttctgctgtcccctgggatggatacagactgagaggagttgcttttacatctcagttactaagagaaattggatggaaagccaaaaccactgtaaatctctgtcttctgatttggccaaaaccagcaacagttctcatccatatgcagtaagcaaacccctattcaaagactgtagtgggtactgttgggtaaagggacataggtcattgagtcagggatggcactgtgcagcctctcagcacagagctgcaggtggccctacctactgattagggctggcatgagagttgaaacttacaagccgtctttactttaacctgtttctcatcccagctttctggtcagttctgggctgctcaacaggttctttgactctcatggtctcccaggcagacaggttccatacctggtgtactggattgtagggaatggctccttgtgacaagaaccgtccacagaatgactcttcacaggctggcagaaattcttacccagcacgtgcatgtgggtatgcatgcatgcatgtgtaacgaggggtcagcttgtatctgcagggtggcacttgaagggtgcagggatggtcaccgatgaggcgatgtcatgcaccaaggttgggtacagtcctcttgctgaagcttatagcctctctagtatttccttcccctcctcttgacaccccctctctccccctattccaatatttcccagcactcctcacacacttctggtctcttaatctcccttcagagttctcatatttatatcagaaacttacggaaggtggtgccacagggtggttcagctgaatactgggttggccccagaaatccgttctggcagcctgatcatacaagacacacttggtaagtttgttaggactttggggcaacaaaaatgctctataatcccttcataaagacatggtaatgaactctccctccaggtcatcctctcaaaactttggatgttataatagcccatgtgtccatttcttctatttgattagtaactctcagggcaggcaagctctgtattctgtcctcagtacccagcagtccctggcacatgctttacttaaaaaaaaaaaaaaaaaaaaaaggactagtttgggacctatgtcatctttctctcagggggataagttgaggatttagctaggggtcacagctgatgaagaacctcgggtcttctaactttacagccgacaaggctacctaaactgtactttttcagtcaagtccacttggggcaccagggttgccccagagaagtgagaaaggaagtaattggggtaactttgaggaccaaccccagggaccttgaagcagggtagttacctaactgaagtttccatctttgaaaacttgggcattttctccctcccttggtcctatagcctctttgggtcggagtccaaacacctgtccctgaaccctcccacacaaagcaggcagggtgagttaggacttgggttaggtttgttcagggcaagagaagggaggatgggataagaggggccagagcttaaccctgtgctacttcactaccctttaggtattccaatccaaaatgtcccaagctagaaatcaagtggaaggatccggacctgacgacaggggcgtgtcacctttcttttccctacatctgtgagatgtcagctttcaggtctccagtcagggaccactctttgcactgagctgggtaagtgtgggggatgggactgaggcatggagcctgggggcagagggtctcacacagagggcaggaggaaaacttgtttctggaggcagcagccatgtcacagcctccaggggcttggtctgcttatggaagggagggttgggcagggaaggcctggaattgaagggaggctggcgatgcggctgtccaggttgctggggaggaggtggggtgagctggatgaggattctcagtggcagtcaatcgtggagctcaatgatgctttaatcctccaggtactcaacaacaggaccctgtgcccttcagccctaacctgtagcctgcgggtcctaagatctgccttcctccagtgtgtcttcactctgcccagacagggccctgccaagggctgacccaggcccagcatctctaggcaagcctgctggagatcctgtcccagaaactggactgttcccagggaacagggaagaagcttctagaagagattttgccccc

SEQ ID NO: 124 - DNA, 66880 bp, Hippotragus equinus
  source 1..66880: mol_type = genomic DNA
ggagatggagaagaatgatatgtgctctcagcttggttcctgagctgtaagtagacagggaaagttgttataagtccaccacagccactggaataggccaggggagcaatggtaacagcaactgtaaaaaaaaaaaaaaaaaaatccagtcccagcaggaggtgggaggaggcagcctttggccagacatagctcccaggaggaaagccaagctttctctcctgaaagctggcatctctgccattcatcacgttcgggctgactctaggtttccacctgtcagcttctaccagtgcccagaggcttagggatagaccaaatgatttctctagcttcttctgacttagctgtccatgatttggaaagaaacagcagtggtaaagggaggactaagtgtgaactggcttttattttaggcagataaagacttttttttttaattgaatgagtgatgcttgtagttgccaaggccactatgtacagagaagagggggagaactttatttcttggtttcttccttcttggacagagtccttatgatttcctccttggccttgagccgctcttcaaggtgcttgccgccttccttggtcttcaacctgtgggcctcagcctggtccaccagaagcttcttgtaagcctggtctgccttcagcttgcagatatgttccataagaatctgcttgtttttgaacatattacccttcactttaaggtacaggctgtgatacatgtagtggtcaatcttcttaggttcacactatcttctgagaagctggcacagaattctcagcctcctcatccaggttaccttctcatcggagcactggcagtaccctttcccttaactatgcctttgtgcatcccgttccagtgggtcaaggtgtctttccagcatcgagcctgggaatggaccatcatagtcttccagatcatcagcccatctttgatcagcttctagaactggtgatttcattagtcttattggggcctaaccagaccttctttttgccacagcggaggatgctgaaggcaatcctcttctgaagcctgaacacacttttggttgcagccgcagaggcaaaatggtgaactggtgtttctttattccactctgcgtccctcgtaccatgtcccagacactgagcctgcccaaggtgtatgtgtctgtgtgtaaatgacctataggtccccaccacactaaaaaaagaaaaaaaattaaaatgctatgtctcccttactattaaaatgctatttctgccctccacctgtcaccccagaatagaaagctcacttgtcatggaactcagtttcctcagacctcatcagagacactcaacttcacatttccaaggacagccttggctatttatcctctgatacatacccaaaggctgagttttccctttcccattccaggtcccaggtctgtggaaagactgctcacaggctttatccacttcagccttgaagtgtcaaaggggaaatgatttcaaatgcacaagctatgttgccccctgcttcaggatatgggcacttggcgtgatcagttgtgtcccagtctttgtgactcatggagtgtagcctgccagggtcctctacccatgggattttccagacaagaatactgggttgggttgccatttcctgctttaggaatcccaacccagggactggacctgcatctcttgcatttcctgcattggcaggcagattctttatcttcatgacactgctcttgtaacccatgaagcagagttagcagtgaagacctgaactgacccaggctgctccagtgttcttcctgcctctgacatctctctcttggttctgcccacatcgtcttcccagcaacctcagtcaaggtctgagaaagcctgctgtagtagaaagagccctattgtcttgagtcccaagctcttctttgccatttaacagcatgtgagcgtgggaaaatcacttatgagcctcaattttccctgtctatgagatggaagtaatagcaggtgccatgactgaagggttaagaaacttaataatcatgaatataaaacaacactcaggacaccaagaataggctttttcattagttgctaagtgagtacaaagtcagagcacaaagtgttccttttttcaaaaaactttgaattttattggagtatagctgatttacaatgttgtattcagtattctttaatagactaatggttaaacatggtacatctgtggtacttccatatcttgaaataaaataaactactgatacattaaaaaacttggatggatctccagaggattatgctgaatgaaaaaaattcaatccccaaaagttacacagtgtatgattccattttcaaatgacaaaattttagaactggaggatatattaggggttgtcaagggttaagaagggggtgacatagaggcgtgatcattaaaagggtaacatgaatccttgtggtgctggaactgtggtagcagatttaagaatttacagaggtaataaattgcatagaacttaatatatacacatatacaggtaaaaccagggaaatatgactaagactggtggattgaaataatggcaatattctggttgtgatgttatgatacagttttacaaaatgttactactgggtgaaagtgggcaaaatgtataagggaaccctctgtattatttttacaactgcaattaccttaatttttaaaaaggatatgatagattattaatgtttctgctgggtataggagagagaagggcctgcccttgtgttcccactgcagaattccaaagaggaagattaaaaaatattattctcattgcatcaataaaatgattataactatggggaatggggtatttgtatctgttgtaccagtaattccactcccttgaatttactttaaaaattacaggcagtttttcacaagaaaaaaagaattctgtaactattatggtgatggatgttaactagactccctgtgatgataattttgcaatatatacaaatattgaaccattatgttgtaacctgaaactaataaaatgttatatatcaattctacctcaataaaacatgaaaaaaaaccacaaagttttatgtggtaggatgttcatcatggtattatctgtaacagtaaacatatctaaatgattaaaatagtggatgagctttataattcatgacatatccaggtgatgaaatggtctatagactataaacatacttaaaaatataatacaccaagaacaatgccaggtagttcttcattttactgagatgttctgggtatttaaaagagctaatataggtaaacgcacttacaaactataaagtgcttggcaagtgctctgagttgctatctttttattttggctgtgctgcacagcatgtaggatcttagttccctgaccagggatggaacacacatgccccctgcagtggaagcatggagtcctaaccactggaccaccagggatttccattcctgtgttgttatcttactggctgtctttcccagctccattctagatgaagttgtacttccaggcaggacaccacctgaagaactcctagctgaagccatgggtatggggaaactgacttcttctggagtgtgactcaaagaactggggctacttcctttccaggacactgccaccctgtttcaaatcatcaataaaactatggacattacccccagcatttgcacaaactcacatttggctataattccaggggattcataagagtctttgaagcaatgtcagccctaacgactctgaaaaagtagtagactctaccgtatcaactgctagtgactgagcacctactcagtatcaggcactttctaaggtactttacacatattatttcactaaatgctcttcaccatcttaaaaggttatctgcatttcacagacaaggaaactaggcctaaaagaggtgaagggatttcccaaggtagcacagctagtcaacagcagcactggcattggagcccaaggctgtcagtccataaacttacagtcttacaaacttacactacacatactaggtttagaactgaggaggaaactgcaccgaggtacatgtctagagaagccccagaaaattacccctgttcttccaatgttccttgggtaaatacagacttaaaaccatccaaggcaaaagaaaagtctctaaagagaagtaggtccattctgaagtcttatatcccatgagtaagtttttccatatatctaacctctatcatctctgctaaaatcctatccctttacctctcgtttccagtggggatggtgaatatatgacatgatgcccctccatgaaaggtcctgggaccagaggggatagaggagtttctctttccccaggactgttgaggccttagttccctgggatcttccccaatgtatcaaaccaaacaatgagcaggagaaaatggattaggaaactagaccaaggagatgagcttggagggtggcctgggactctctcagaaccttagtgctgggctcgggtgaagttaaggtgggctgttttccccaccaggctcagcagccagcttcatgtttgacagctactcagctgtggaggtccagccagcatcgttcatgccagagcctcttgtttgtctcaatatgacatctctatagaaaggaggggtctgggggattctgccactctgcatttattcctcctgtgtcaatactactttgctgtacttgctcaggagcagccagtccactggggagggcggcacttagagatacccagggaagagaataatcttgtgaggagaagcctgggatcctaaggcttttctctcaacatgacagtcaggaaggaaactggggcctgagtccagacacagattgggaagaagaggtggcttccatcacgctgtctttccttccctcctccatgcactgtgctaccctgctgggacctaggcacgcccactgctcactttggcttcccttggcccacctctcttatggacaggagagagttaaagagatggtatgggcaagccataaatttcccatcagtgtggggaggggaggactgttggcagggaggggggtaagctgggaggtggggtggggagagctgggaaaaagccaggaggttgtctctaggtaacaataaacactgcaagcaaggagcagctgttacacttactctccctgcatcacaatgctgaaataacactaataaaccagtgtgcccaatgcacaggcatatacacattcagggccaagttctgctgtacccctagagctgccctttgcttcaggtcaggggccttggtgccagtggacatacttgtcttggccttgctatacttatgtggaagatgaggactggtgagtcagtctcagagccagagtggcattctcaaaagaaggagggtttcagaggctgggtattctgggttcagaaccggagggctttcaccgatgggaagaggtcaaatggggtaaatcttggttgggagttgggaggagcagaggagagtgacagagaaaaagtatagcgaacagacaactacttaccgtgtcttctcagattggagggcatgaggtagccagaagtggagtcagctaaatggaggtggaagttgaaggagggttgaggagaaagaaggtttaagaggtggtattggggagttatccttgtatctcctgaggttgaactccccacacctgcctacacccacctggtgcgccaagcctcccccttacagcaccactttcatagcagagccaggtgatatgtcagttcagttcagggttgagctttattatgggtgttccagcaggggtccctgggtttctgatgctgccaggaagagctgggggagtggaactggtcacatctccctacacaaagagcagctggcctgtccctttgtccaaccaaaactctctggattcccaggagcatcccagcagagggggccctcatctctgctggacagcagagctgccatcagtgacaagaatagaaataggcaaatgaaaacttaggttctctcagagaacacccctccaattcttctctgaggttaggaggaggatgtttattaagtgtctagatacactgttatccaagatccctatttccttttgctgaaacagggaggcccctgggactgtggtcgggggcatggctagttctcctggtcctctttctggccctgtgctgctgatgtgaccttaaacatagtattttatcatccccctgattcagaaagtctggagaagatgcacatcggctacttggcctgtaatggaagagaaaatcagcacctttgaagaccacagcttctgtttccagcaaagaaagtataagaccaagtggtaatcattccaggttctggtcttaaaatagtgccccctacttaaaaaaaaaatttctgagtgtcagctgggtgcccagagctgtggcaggcaagagagggcagggagcagtagctgtgactgcccaggagtgctgagctgcccagcacattaccctgtgtgtagcccagggacacagtagagtaagactaactagcctctcctatcctttcctcactgagaagcctctccctgggaatgctcagcattccctgccatcttctctcccttttccctctcttctttcttagctggggtttctccttgccccacaatccggatgagagacctctatccacagagcacagagttggggagaaatggggcaaaagggagctctaacaggcccggatgccttctcctcttattgttatgagtcaccagaaccttgagctcagctgagctgccagcagccttctccctccctagagccactccagccaggcagacaaggacctacaggacccaagagcccaccatcttcctacttccagggccacagtccccttcttcattcctaggaatctgcaccacagacacactgagatgagttagaaagaagtgtgagaccccaacatgtgctctgtgctgtagcagagagccagctgcctgtacggcagagtaggatcaccagccaggaaacctggcacagcctgggcacagagcctgtcagcatgtgagagggtgcgtgagacaggatgggataaggaggctttttcaggagcaggcatctcctcctggctccccctctggtcactgtctcttctccttggcttctctccccaggtattgatggacatcatgacactgccacctctgaaatatcttctttcacctcctccgtggctttgggagttaagagaatggtctgcatgataaccttcgaggtgtcaaggtgggaggttcagacatccagctctcttaccaaccagtgggacacactgagggagaaggaggaaaggagccccaacagagtaaaagttaaacctggaccaacacagagtccctcagcaacccctcttctctagagcgcaggggacactgggtactgctacctctgctttcacttacttcaagtctatccctctttccctgcaaaagctcagggttacttctggattccagagcagggtccaggctctgactccaaggctgtagatgtcatacccttggttaaatcttaagagtgtgaggcagggctagtggagattgaggggagggaagtcttgttcccgagagaaacatcaagaatctatcaacaattgaatggtttaagggccttttagctcctccagtatacctctaatcctggagtaggggtagacaaagggtgagaaagaaggccttcagaaagcctgatgcctcttgtctttctccactgaatgctcttccattgctctgtttctctaaataagagccatctaataaatcccctcaacaacactcagtatgaatagcctgctttaagttaggtagcaacaccccacccaaaggtgggactataggcctcagtttccaaattccccctctctatcttccctctttctggcttctccctgacctccaccacacctttccctgcaggttcttggaagcaggggcaatgcaaggcggccttctcatcttgttggtagtagaaagggcagagaatcagacagccaaggagatggccctgagggtctaagaaaagggcagaatgagcctgggggcacttagaaaggcacatctgggtctttcctagggactttgggggatattaaatggtgagtgtactgagatgagaatatatttctgggagtaggggataagtgttgggggcttggagagtgtgacaaagtctctaaaactcacacagctttccaagctttctgcccatccttgtccagacctcaacttagtcccatgaagcacagaacaatgttgaatttttttttaatgttgacttttttaaggaaggaaggagatgccaggaaatggcatctttggcaacgtagtgggcaagtcacttctctccataagtctttcttaactctagcatctgaacagtgaaggaggtgggggtggggacagctggaaacatgcccctctctccagtgttcatcaataccttatagaattggacggggcttcactaagagctttgggccatcagttcagttcagtcgctccgactctttgtgaccccatgaattgcagcacaccaggcctccctgtccatcaccaactcccggcgttcactcaaactcacgtccatcgagtcggtgatgccatccagccatctcatcctctgtcgtccccttttcctcctgcccccaatccctcccagcatcagagtcttttccaatgagtcaactcttcgcatgaggtggccaaagtactggagtttagctttagcatcattccttccaaagaacacccagggctgatctcctgtagaatggactggttggatctccttgcagtccaagggactctcaagagtcttctccaacaccacagttcaaaagcatcaattcttcggcactcagctttcttcacagtccaactctcacatccatacatgaccaatggaaaaaccatagccttgactagatagacctttgttggcaaagtatggtgctgcacaaatacaggggcatttctgactcagctttcagagccttaagttttaattctctcttcttggcctagacgtaggacaagaccacgccttgctatattttggggcataattttctctaccagtttttactgcagcagaaaaatttgtcataagatcccagaagaagctcaatatttagtcgccattggggaatctataccttggttaaggaactggggaagttgatgtatttccttccctgtgccttttagaatacagtaaaatctcatgggagtgggtagttctggaggatctgtctacatgaaagcaagggaatggagatgccttctggaacagactgtatgagggaaatgtccccccagtaatgcacccaccttactcccttaagttactttcaaaactcaggggtcagagacaggagactccaagaaacggaaaataatactctgccaaacctttccccttgactttgctcccaataccctacctacctacattttctggtattcccaggaattccccaaatccaggaacaaaagtaactccaggacaagattcaactgtttcccttctctgggtctccgttttcacatctgtaaaacgaatggtttgaaaagatgagctccaagttctcttcctgacaacagtaagggtctatgattcataccccaaggcatcagccctcatttgcatgtaatttccatggcacttatttcatgtctaaacacagagaaatatctctgaacccggccccactcctctctctcaccagattctccagttttttggtccccagctcttatcttcacccttcaaggacctcaaagctctgtcctcaccttcctttcacagttttacagcactcactgggacaagctcaactgcacaaaactcgggaacaagaaaacagccttagctaatattcctggctgcaatatgggggctcagaactgagtcaactggtgaggttccatcctttttgaaggtcctggcagttggggggaaatcccagtgcctctcctcctcctccaccttgctattctccatgccagaacgcaaagtggccagtgattgatgggcctgggttcccagtaaccgcacccagtggcccaatcctcctcccctacccaatctctcccctgtccctattcagagatcagattgtctcatgttggtccccgaggtcccattaattaaaaatacatccaattaaatggcaggtgaaaacgtgctattggagctctccacccccctgccccagcttggtcccccccaccccccttttaaggctcagctgtgctttgagctgagaaaaaaaagagagagagaggaagaaagagggagagagaagaggaagacatagaggtgggggtatgggggaaagctatttgaacctctgccagggtagcatgtgccagcctgggagggtggcactgtgccctggtgtctaatttctggaggtgtgagtaggttcagtcagctgggtacccacttccatttcccttaaaggggcagaggaaagtcaaaggttgcggctagctttactgccctccttctgggttcggtgaatgaaaggtagaagtgtaaatggtagagggcccttaagacagggtgtgatgttcaggggttgcaagaggctgaggcttctattcttggtatactgctcttccctaaactgcaaagaagataacgagaagcatggtgggacccaggtggcaggacatggcagtgctcccaagccaggctgtacctacccctgcccacaggaaagctgagaaaaaaatggagtgaggaaggaaggagccatgatttgggtgggagcagacgagtcaaataggataaaatataccagcatggacatttgtgtgggcagcaccttataagtaagaggctctggagggacctacttgttcgttctctgtacaaaaagacgcagaagtagtacaaagtcacctcaatttggcaggctgtgagtagggcatcttttctccttcacatttatggtgtccccagcattttgtaaggcatctgtcccgtcctccacccctctaaacccttctggccccaagcaaggcaaagttaataggcactgagagctgttgggtgaggagctacgaaaaaaggagtaactaaaagtggtactcagaatccaggcagtactgggagtatctgccaactgagggccccctcctggcctccctggcagtctcagtacctcctcacttcactttaacgctaattggagattttaatctgcactgctgctctgctcggggtgctggggggagcgccagctgtgcagcaattccagcagcaccgactgtttaatcaagctgtcctcctggggagggaccctcgggcatgggggtaggagggaggaggagaacctctgtcatctcccttagcctgttcagcatagaagggcttcctggagactgaggaccaaatgtgggagaccttatccccacaagggctccatggcccttggatccttagtggagccaatacacatatgggagcaccatgaggcttaagggccaaatcagtccccatcccatcctgctttctgacaccttttttggcacagagccccagagtgtcctgggtgtcctttagacatgcaggctgtaaatatctttcagatcatctgagctctgcaggtttgtgctgggagaagtgatgggggcatagaaggttgaactttgctactctctcagtcttctcagtcctctccctttctcttaagagagctaactctttaagagctacttctcttgaaacaactatcataagagacttttgttttttttctctctgaaaacccagatacctccaaactctgggctggaaagtgactgtctagaggctgacgacaggtggagcttgttacactcttaaagaaagaaacacctgtacaaggtgtttggtgcctaaaactaggaggcttcccaggtttgactgggaatctattgacatgtcagtccattagggaagagcattcagggtctcaggccatttttaaaggaagatcaagtgcaagaacaatgaactattcttctggctccttaggcctctgaactcaggctctctgggtatttttctcacctctgtctcagggaaatagtgtggtgccccccctctcccttcacccaaatgctgtctgctaaggggcaggagttttatttaattggtcagcagcgccctcgtgtggcaaaaaccaaggctgtagcaacatccagattgacagaggggtaggcacggtactccaggtacccaatacttccagagacatttcctactttcgaacacctaactctccatccatcccaccgtaactgcctcacctccaattcaaggtatatgcctaccagggaagggggcaccttacccagagctggcatttgcttaggcctactgcttacactgtctggattgcaggggtgaagagccattgctgagagaggagatctaaggtcaaaagggtaagctgatatcaactacaatggcaagagaggctctggaacccttgccaactccctacaggtgccagacaagagctgcctcctgagctggagactgagtattacttactgatgggttctgccctacagtgattcatttgctactccctggatgtgtctggaaatgaacagggacagactcttaagagtctgagatccttgtcctcaggaatggacacaagataagaacctttccctcaaaagattcaagttattccccaaggttccaggccatagggtagaatgcacatctgggacttcaggcttccaaccctaagagaagggctgcctgtcattagaccctaacactatccatttactgttcccttcttccctcacccactaaatgggagaaatggttttgaattacagaagaggatggtatctaacattaggaatgtcgctctaaaaattagggctggaagtcaccaagccagaaagctgagtaaacatggccttccccttgtttggagatatttaacaaaagagagaaatattcccagagagaaatatgatcctgttcggggttggagggtagggagaggagacacctacctcgccagaagaagggtaggggtaggcactgtaggttggtgacctgctcagttctgggcactgaggatgggaataaccaggctggcagacctctacttccggtgtcctgcacagtgtgtggacagggggcatggcccatcaaacctgggaaggatgtggagaaactgatgagaagtagtaaaaagggacatcaatgtcctatcctcagaagaaagagaaaatagctttttagggaaaaagaagtcagggctatgtgtgaatgacatagtgggtgagtgaggcaggtgtagagaggctgagagtaaccaatattagcatcacattattgagtaatagctgaccaatagataagaacagggatgaaatgaccactaatgtcaataaagggggttacccattctagccaggagggaggaactgctaatcagaaggtaggacactggacttccctggtggttcaatggctaagaatctgcctgccaatgcagggcacatgagtttgaaccttggtctgggaggattccacatacggtggggcaaccaagcctgtgtgccacaactaccgagcctgtgctctagagcccacattcccaactagagaggaggcccccaactagagaaatctgatgcacagcaacaaagacccagcacagcaataaataaataaataaaattttattttaaaaagaaggtaggacaccatagtagagtcaaaaaacaaaattaaagatctcctaaggcaatagaaataaaagcaaaaataaacaaatgggacctaatcaaacttataaccttttgcacaacaaaggaaacaataaacaaaatgaaaagacaacctacagactgggagaaaatatttgcaaatgatgtgaccaacaaaggcttaatttccaaaatatacaaacagctcatacaactcagtgacaaaaaaaaaaaacaactcagtccaaaaacgggcagaagacctaaataaccatttctccaaagaagacatatagatggtctactgacatgtctctattgatacatgaaaagatgttcaacatcactaattattagagaaatgcaaatcaaaactacaatgagagacttccctggtggtccagtagttaagaatcggcctgccaatgcaggggtcatgggttcgatccctggtctgggaagattccatataccatggggccattaattaatgtgtcacagctacttaagtcttcatgctctagagcctgtgctctgcaacaagagaagccactgaaatgggaagtctgtgcactgcaactaagagaaactcccactcgccacaactagaggaagcctgtgcgccacaacaaagatccagggtagccaaaaaaaaattaaattaatttttaaaaacctacaatgaggtaccacctcacactggtcagaatgaccatcattaaaaagtctaaaaataacaaattctggagggtgtagagaaaagggaaccctcccaacactgttggtggaaatgtaaattggtgcagccaagatggaaaacagtatggaggttcctttaaaaactaaaaccagagttaccatttgatccagcagtcccattcttgggcatatatccagacaaaactatgatctgaaaagatgcatacacccctataagttcatagtagcactatttacaatagccaacacacggaaacaacctaaatgtctatcaacatatgagtgaataaagaggacgtgggacatatatacaatggaatactgctgctgctgctgctaagtcgcttcagttgtgtccgactctgtgagaccccacagatggcagcccaccaggctcccccgtccctgggattctccgggcaagaacactggagtgggttgccatttccttctccaatgcatgaaagtgaaaagtgaaagtgaagtcactcagtcgtgtccgactcttctcgaccccatggactgcagtccaccaggctcctccatccatgggattctccaggcaagagtactgcagtggggtgccatggaatactactcacccataaaaaagaataaaacgatgccacttgccgtaacatggatggacctagagattatcacactaagcgaagttaagttagaaagagaaagtgaaacactatatgatatcacttatatgtggaatctaaagatatagagtacagacttgtcattgcccaaggggaagggagagagatggattgagagtttgggactagcagatgcaaattgttaaatacagaaggattaaacaagatcctattgcacagtagagggaactatatttaatatcctataataaaccaaaatggataagaattttttaaaaaagctaaggtaactcccctggagatctttgggactaagaacttccctgagactgtatgtgtgtgtatataagtgttaatcccttataaaagcagcccagtgacctctgattagcttaagatccctacctggctcgaaactctgtgaaagagagtgaatttgccaggactccggatgtcaggtaactaatggacattaccaaattcctcaggggccattcctcctcctgctgctgtcacctgtaaaagaaaatgacatgtaacattagacatgagataaggagccagacatcaaaaagggtatatgctctttcactcaaggagcatggccctagtaggtaaagtgatgacgatgatcgccactcttctactttacagagctgagaaggattcagatgaaccttaagtacacgcccaaagacagtttagagttttctaagattcctaactccaggcaagtagctcccagtctagtaaagtaaaaactatgcttcctataattaagagagaaattgggaattcaacataaaaggaagctctgaaacccagaattataaagggcaatgaaggttcgatgtgaatgcaaagttaatgcaagaaagtgactcaaaagataactagttttagattagataatcagattgttctgaaggctctcttgtctaaaacatcttcttgaagaaaggctcaggactttctatgagacagaaaggaggtttgtgggacagtagatttgacagtttgggcaggtaggtttgtatattccctatgtagcgatgaatctgcatgggaaccaacttcacatttctcctgggctatcaaccatggtatgatggagaaaatgtaaagatatgtactgggatctatttgtcatcagcaattgaaactcattttgcaaaccccctgcctctctgacctacacctataacctagacctagatctatctctaagttgcctttctcccaagattttgcttccagtttaggaactagttagcattcccctcccggctcagcggctcccagactcacatacccagaaaataagcattggaagggacacctgggagaggtccaaagaggggaagggagtctcagcaccagagtgagatgactttagaaacttccatgcctgtcagcccactgagcacactattcaggactcaggtcactgtggagcacaccaccttccttccgctccaccaaagaagaaaaccaacaatccaaaactaaaaaaataagggagagtagagctcccctcgcccccaattcgcctgtaatctcagagtatcttattttactgagagttctataatcccttctctcattcagcagctccccttagtttcccagcaactgagatgttttctttctcttttccttctgattattttcaatatgctttattataatgcaaaggagcctgagttgaaatttagggtaaattcctcacaaaatctctgaggatcttttcgtactatccaacccctggatgatggctggcaacaagctccctgaatttggggtaactctgaggcatcaggatctttggttatgacttgccacttgcttcccaacgagccagagttcttgactctaaataaaaattagttgtacaatttgcatgtcattgggtctttgaggtaaaaacatataaagcttcccagtttttctactaagtttttaacctaactttccccctcaatctgtccttcccctcctgacctgcccctcaaatctcacagccttactttcttgaggaagcataggactgtcagaactgatgatcttaaaattggaggctctatactcagtaggttaagatcctagacttttggcttctagtcttggctggctgccgctaactcactgtgagactgcggacaaggcatttcccttccctaagcctcagtttctttctccataaattgggaagttgaattagatggtctttagtttcctttctagctctggtcatctatgattctatcaggaagaagacatactgtccttccatcaggaagtgaaatattcctgcccttcgtacttttgtctcagggctacagcatagagaagctcctctgtagatgcctgccttctcaaactggcttaaattaagggacaaacaagtgagttccagtaggaggccaaacttctttcattatgaagaaatgttaaaaaggtaatctaattctaaccctgaatcttgacaaagcagatgagacaaggcaggtatggggcacaaaaaaagcatgacacccaccctgcccccaacaaacaacttatgactgtttaagagtctgagcacacatttggccttgccctagggaactctatataaccagtgactgcttaagccaatacaactgtgtgtggatggaagaaagcaaggacatgtgtaaatacttccagagcataggtgtagatgtccaatcaatacacatacactcatcctgttctctcttactttaggcctatatgtgctgtttgagaagctattgtgggaggggacaccgcatcctggtctttcccctccccaaagtcagaaaggaagagacagtgaggcaggagctacttggcttcctataaattgttttgtccttcctcacagctgcaatcagaagctaagggctcccgcaggccttgttctgatctgctgcaggcgatggagggtttttgaaaccgagaggacttggcttcagccccgtttcagctgccattggggctggctaatgggctcattctggaagacccccgcctgctgcactaaagagtcccccgctgaccccctccccagtcccaacccaattaataaatgggggctcccactttatggctctgggagaaggaaccagagatacaaatgacccccagggagggagagaaaaaggccttccaagaatcaagccagagaattgtgcatccacaggcacatgctgccacaggctagtcatatcccattttcaaagcattaacggggaagaaactggcaaaaaactgtattttctttcccagatccagagtgggatagcgttcttgaagtctgagggtacaccccaggcatcaactctctttcacctggttctccaatctgaaaaaagcagagtgcaggtgaccatctgggcacatagcacacactcaactattttccaggggctatctctccaactaaactctgcaatactgaacacagacatatcccatcaattatttggttaataaacattttctacttcttaaaaacaaagcagctacctctttccaaaatctcatcaccatgaacagtataaatacgtcctgaggttatcaaccttagcctatcttttttatttctctcctcacatccaaactatcatcaagcctagctaattctactgaccccctccctttcttctccttccccttgtcttacactagttgccgctcttagggccttacatctggacaagaacaataatatcctagtaagtttttctgcttccatgacctagtatagctgcaaaagtcctgaacattgtgttcatctcatcatgctctatttctgttactgcttaccaaatcaaattcaaattcctcattcaggccaccaagattgttccttcatttcctaatattttttcctttattatcctgactactccattcatagccctctgcacaaaacacaaagaaactttctataagctttctctctccaatcaccttcctccctctgtttcatgtcctctatcttcactaccttcaaagaatcttttctggttaactctgcgtttttcccattatttctttgctttgtttccctctgtactaggttattgttttattttataacctgcatcagtgtgttcacttataaacaccaatctctctacttcccactcaagtttaagagtcatctctcactagatccagaagcttccaaagatgagaccctcccataatcttccccagaagttgccctgtactcaggacgtcatccagctaatgatattactgctccccatagaagcaaccctcatggtataactcttggaatatcatatcaaacaactacatcaaatacaaacttatttttgtacaatgtcaactctcaggttgccatatgcaattaccaacactgaacttggtactgagtctttccaaaattacaaattgtttcatgacttcaaagtgtgttgcaaaacaaaacaaaaatattgaaaaaaaaaagtacagtaaccataggacttcatcttcttaatgcatagtatatatactgctttctttgaagcccccttaggatgagaagtcccattttgttccctaaggttaatcctatattctcaggtcatgacctgattttctagaatgcaaatcaatcccagaggcaacagtaaggttgtttcctaccagccttgcctgtagtggtctctgaccatcacatttttagaaggtcccttggaatagagaagttattcatgagtcgtctcaactacttaggaagtacttcctgagaataacctcacttccaaatactgacaccacttcctctggtttagccctgtgtgattttgttgttgtgtgtcactaagtcatatctgactctttgcaactccatggaccacagcacaccaggctcccgtcctgtgtgatttgacaggaaaaagtgacctgctaccttttatctcctacatattgctcagaataataaggacttgccttttatccttttccattctttagcctcaaggtgcttaatagtctagataataaaagcaaaggtactgtgatacctagtatatagtaggttccagacaatgctagtcaccattttctcccttcttactcccaacactttctcagcctttctgggtctgttttttcactgcctaacgatggcactaaactagacaaattaatgcccttttgtagctctagcattatctgactcaaattcatatattctggtttgtttgctcttctatgcatcatcctcacttgtatctaaaatgaaggggagaggaataacattatagtttccaggttgacctaaaacatataaaaccacctgcaggggaatgttagtactccaagaatacaaataattcttagcttggtatatccatataatttcctccttaatcctggaatactctcttgaactatgcagatagcagtgctaagtaaaatgtcctagataaaaattacttgcttaatataatctagtttcccgagtgaaactgtctgcatagcatcccccagtttaagggtttcaggccgatcctccaaccataaaggtaacactactgtaatcaaggggacgctttactctctaatggggcctccttgaaataaactgtgaatctttaatgcaattattccctttcactaccccaaccacaattttacctaccactctcatatcttatctcttctttataagcaattatacactgtttctttctgcagccccactaccagacttctccagttctcccttctttcctttatttccatttccttctcatattgcttcattttatatgagaactttggtcccctaacagaaatcgcaaatactaattcaaggccaaacctagaagctcctgaatttataaaagggatcagactcctaagttttctctagctctctgaattcagcctcttttgtccagtgtcaaaagcaaaaattgcattagccttggtggagagggttatccgtccacaaggtgatcctaaccaagggtgtccctcatcaaacacaagaagagggagcctttccatagacaatccatcagaaaggctcctaaaagacaagacacttagctgggctcttcactttgctctgctacactgtagccttttaaaggtttctccatgctgcttccctcaggggtgattttggacttggataaaatgtccttcactcttttggaactatcaacatgatcttcaagttacaaccataccagagcacaacatccccaaaaccaactattttcaggtccaaaggaacttatgtctaaatgagtttatttcatggttataccttctcattccagagaactattgtgtggctgagggctgcatacggctttattaacaactacccacttcagttcagttcagttcagtcactcagtcatgtccgactctttgcgaccccatgaatcgcagcacgccaggcctccctgtccatcaccaactcccggagttcaatcagactcacgtccatcgagtcagtgatgccatccagccatctcatcctctgtcgtccccttctcctcctgcccccaatccctcctagcatcagagtcttttccaatgagtcaactctttgcatgaggtggccaaaatacccacttagagagtattaaagactaactgcacatctatctctttctttcagccttggactgctaattcttgagataagagatatgagagcaatccagcggtcaagtgttttggcaacctagtgattaatcatcagggcatcaaagcaatcctcatgtgctctctctcctcttctcaccaagctttacttcctagagacaccatctgcaactcagctattagcaaaagcaagtttcagtatataagggaagagaatgaagtgaaggttgaccagttaaagaatctcttgtactccacaacattaagtactgcaataattaaaagctcctttcatagcccttagcaataagttattttgctttttctttcacctttcaccccattaagtttgtctcctgaattgcttctcactacccttcaaaactacaaagcagcaataattctaaattccttgcaggattaagcaatcagtatctctggcaggactaaagcatgagaattgggaagtgagtggagaaaagaaatataggaaatgaagtggatggacaggagatggagagctagctgcacatgagaggtgtggtagagtaccaccagtgattcctttaggtgtcatacttcccccactggcttggagtaaactctcacttgagtttatataggaactatataggctatataggaacactagaaatgccacacctggacagaaaaattaaagtgtccaggaatgctcaccttgcctctcaggacaaccagaagacttagcagttcatttctcctttggaatatttgactatttacttgcttgaggaactccccacatccatttcccctagcccttcaggatgactaagttgtgaacagagaagtaattcaaaaccttaaaaaaaaaaaaaaagtcaagctacggggcaatctttaataacaacgaaaatcccagttcagcccaaagaactgttaacttacttgaggcattaaccttaccacacagttaaggatgcctatcttggaaaagatagtgcctaagaaattcaggtactgaacagtatggttcctacttagaaatagccttgagtgtgatggagaaaaaagtccagcttagataggtcctcagctttcagaccaagaattgaagacggtcattgctacaaaatggaaataatattctctattaggttgaagttcacactcctagtcatgaacttgcagtataaaaagactgaaaacgaattccttttctctggagactaacaagaaacacaagactccaggaactggaacaatcttgagctctccattctccttgggtaaagatatgacagcccacaggcaagggaacatcatacttaaactgtggggattcaaaaatacactggcaatcctcatcaccaccagtttttgaattatatttcttcctaatttccttgttctgctgtactccttaatcttgtgattgcttattccacacacaacttcctgatacctatgtcccctcttcttgtctcctgatactttttttcctgtcctgtctgcttatgtcctaactagcaggacagcagcagacattacaagggaaagtttagtcttctgtatcttaaaccatgacagagaagggaaagcaattttctcctcagttggagacaggaagttttggaaataacaggaattttacccctatcaacaattttgacttacttcctggattggcaatgtatcaggaaatctcaacagagctgggaacactaatccatccccatgctgaccctactcatggtaacacaggaactggtgtggggatgagggtctctgattgaaaagactattttttggtctaaacagcctcataccaacttcttttgatgacggttgagctcaaacccacttacctctcctttcagaaggagtcagggtacatgaagctcaactcttttgacggcctggcaccatcattacttttgtacaatggttttctactttagaaaatcacatcttatggtttcccccaattcttattttctagttcccagtataatgttttgaagcacctcttcaaaccctaagaacttcttcttctggaagtctatgagtctacagagattctgagacaaagcacccctaggataaagtggaggaaaaatgctctttatacatataattagatctgctcaaagggtacaaattaagaagtaaatgcaatggagcaaaagtggtatagtaacaggaaatatttaattttccaatctccactttccatttttataaactgaaagaaaaaatttaatatattacaaaatatctgtacataaacaaagtaaacccaatgggaggcaaaacaaagagagagaaaggaatacagtgtcagtaacctaatcagggagaatgaggtcgcgactgacacttttctgatgcagcattctctctcaaaacctgctggtaaccattttagtactgtaactatatatgcatattacacacacacacacacacacacacacaccaagtggtttgggtgatgtctatggcagaagctaaaagaagtcctacttacaagtttgtgctaactgccctgcttttaaacgtatagatttgatgttttcttcaaattcttatcattccaatggacagctgaagaagaaactaaagaaactgggtcaagcaagtttgttttcaaaaccacaaaaatgatcatggtcaaaccagttttgcctctcacttgtgaacagagccagatttctcatctgttcaaaataatgtgtttcatggacttaatatctcccatgtttcaataatcaaaaccaaaaccacttccgaatataattaatttggtttgtaattttctaatacccaagtagaaattctgccaaacctttacttccatcacatttatagataacacagctgaaaaattaacaaataccttttcttcctccacacaagatattccaggatatttgagtttctttgtccctttgcctttagaaatagtcaaaattgccaaatcttttctttttaaaggttagactcccaaattgggggtgggggttgaaatgggatcatacatacacacaaacacacaccacacacatacacactcaccctattccctaatagaagggataggggaatggagacttaagtatattatttagaatatttggcataattaaaaataagggttggggagggaaaaacattattggtgactgctgataaccaaaatacaattaaaatatatagagattttattcatatttgatggaaaaccaatttttctcactggaaacttttgaaaggatccaggcttaagttctctagtcaaaaatggaagagttgggcccaatgtctttaattcaaatattctaaaatacaaaggcccatgtctgaggactaagaagtcaacagacaaaaggttcagatgaactttaatgcaatttaccaatagcgtgtcagtgagcctagcaaatctaactggactcaccggtttaaaaagccatcaatgccaaaatggctagaagtttctctttttaatcaatgattggccctgagggcaaggccagaccaaaacccagaggataataaagaaatacacacaccagatatctgcctatttcagtaacaggggaaaatagttttcatgtaagtatcagaaaaagattcttctttctttacatttttttttttattaacgcatctctctctcacaagtattgtttattttttaatatatgaacttggcattgaaacataaaactttacttgagttctgtaaactcttctccaagatgctgaaacacattttgccttttctttgtaaaggggggctaacctacatttcacaagcatctaggtctgtgcagataacttctataaatgtgtatgttttaaaaacacattatatgctggtactcacacacaactggaagccagaatgaaaaacctcccaggttatcccaccctgaaagtcttcccctctttcattttctgataataaagcaaaattcttgccatgaagttataatttaaccccttttaccaaaaccaaatctctctagaggaaaatctttaaaagaattgacaggatattcatggtgatatgtgtgtatgtcaatactgttctttcttatgggatactcttttaaaattactttttttaaaaaaggtctcaggtagtgatatatcttcagaaaaatattcaccatatactaagttacatttccatgtattttcaggatgtattttttttcctctttgacaatattacaatgctctgtttcaaagggttttttttacataaaaaaatatgtgtaaacagtatgctaactgatgttactaaccctccaggtatggagggatcatctctaaccctacctcagcagcaatgtcctaggctgtttgcatctacaaatcaacttcaccatcagaacatggtttaaaaaaaaatttttagaattgaagatttacagagaacaatataggagtttgaatttcctttcctttatttcaaaaaaagtaaagaattatcccaggttcttgggcatctcaacaattaattttttttccaaacaaatgcctcaaaaagagagcaatagagagaaagagaaagtctataaagatgggataaaaaaggtaaagagatgggataaagtctacctacttgcccaagaatgccactttctacaacctgcttcatgtgcagggaggggggtgagggcatgtcttttctcaaagtggagcaaactttaagaatgagcaatttatttggaaaaaaggtatgttcaagatgctcaatgggtaaaaaaaagagttcacttgaaagcaaaaatgtgagatggtggagaggaaggaaacatttatttaaaccagccagtcactctgtttcccttaaagcaaaagcctaagagcagctcaaattctgtgaacactattctcttaaaaaaaaaaaaagaaaccaaaaaacctaaattcaaaagaaaccattaaaaaaaaaaaaaaaaaaaaactttaagaacctctcctgagccatctcaaaactaaaactgtttccttcttctgctcaagaagtgcaggaaatgaactaattaaacatttacttttcaatttaatgaccctctccatattctctacttgtatttactaggtagagttgaagtaaatattctgactatatcccatccaggagaaactggtgccaatatcactattttataagttgcttgctaggagcaagtgagcaaggaatacaacagatagctttgcaatagccaaatacagatgattacctcgctctggcaaattatttcattaaaggttcagaggactggatggaagaaatggatagggaagggatctttcaggactctgaagtctctaggttagtaaggaactcctctccctcttccccctcttggagggactctcgtaggcccccgatacactttgccataagcagaagactgagctgaggccccccagttaaggcttgctcctgagctgctggtcccagtggttcctggccccagctccccatagttttgcaatttggtctctgcatgtaccacagagttgctgcttccctcagccttcaggaatggttgcccgaccactgagtgtaatgctaaggggaccctggcaaaacggaggtcctggtcccctgggaactgcactgaccctgtgccctggtaactgctggactccccaaggtggctcacagagcccgagaaggtcctgttcttcaccagggtctgggccaaagattctgtcaaggctggaccagagttgcgttcatcagtgtcagtggcactgaaccctgtttcaggcccatcagtgtttccgtaagtcctgttaggatggggtcgggtggagtaatccattgatctcaaggcctggtgctcatgtggcaggtggccaggaggctctgcttcaggctgggataaaagttgcagcaaggcggctgtcacggctgggttcaactcctggggggcgctggaaagatcgccttcaaccagagggggtggaggtggcggcggtggaggtccggggggctcagggggcctcttctctggtggaagaatgtgaggaggacatgctgtggaagggttacttcttttaaacaccatcttaaaaatcacatgtgattataaacacaaacacacacacacacactccccaacataaacaaatatcaatacaagtaaccaaatatatataaagcaaaaaaccttgggatcaggaaatcgcaatttataaataaaatcaagcgattaaaagtaaaacagttgcattttggatctaacagctggtgttaaaatcatgtatttcaaacgattgttctgatttttgtctgagatctcctccatttccttccttaaggaactgttctaatatgtaggctgttggtagcctccccacccctttttgctgttggatcaaaacattaatgaaaataaagtaaaaggaagttgagaggaacaatacatatgctgtggtcacatatctaggacataatcttgctgtacaacaggaaactctgtatggacttagctaacacattttacagaatgtttgatgatatcaggttaacacgtaaaataaagctagaagaatatacaggtgagatgaaattagtaaaaacctttcattaccatcatgtatacatatacacttgcttctcccagtttgagctccttctccccataatcacagtctgaggaaaaccaccgtactgtcattcagcttcctatgttacagtaattataaaaagtcactacagcaatgtcatgcagaatgggctgttgataaacatttgtttatcttggagacagtgagaagagtatttagaaatgtattgaactaatactatactctgtctttccaaaggtcttactagaaccattccctagacattttgttacccacaactggattaatttgcctaaccatggcaatcactgtctgataatgaactcctgccaaggcaagagactagaaatgtaaaatggtatgagtttgaggacacacaaaaccaagtagtcagaagcatgcctttagagttgggagttaccttgctgaagaaaaaactgttttgggatatctttcaaatgactgatttttctgttccctaacgaagcatatttttaaatgttcatataatcaattctttattatgagacagtgatataaagtcattactcaggcaagccaaaagtagtttttataattataacaattaggtattttggtagcatatataccacaattatattttgcaaaaacaatcagtaaagtaagcatacccttagtgggcagatgaaagtattctgaaaatactacaaaattgttgagcagtgggaggataaggtcaggtgctatatgtaaatacaattagggtgaccaagagtcccaattgcctgagactgaagaaggttcccaggtttaaaactttggttttaaaaccaggacagtacaaggacaagttgatcatcctatatacagtacccactcaattttttgttaacagactggctggctgactagatggtagagaaagctaaattaaaggatgaaaaattagctatagaaaactcacaacttgaaaagtagacatccaaaaacaggagagctaactggactacaaatatctatagatttcagagtttttcactatcaacactacacatctcactacataagaacatcacagtaccagttattttaaaaagtatttttggtctatacatgaaacggaacaccagtttgtttgtttttttttttaatactaagggcaaacaactttaaaaatgcctaactgcaaaaatggacaaagctaaacttatattcttccatctatactacatttcatatttaacctttgccttttatacaaatagttttagttgtatttcaatagaactaattcttgacctcacattctttcacatttatgagaggaagaaaactatttcaaaatagcaaaggcagactggttgtaaagaactattaaaggctaataaaacatcttaagaattaaaaataaagatcacatttaaaaaaacatagttataagatttaaagtgttaacaatattgccaacccttaacagtctgtaccagtggtgagagggatcaatgaaatatacaaataactgaaaatttcattttagtaattagattcaaccataaccatttctcaacaagtacagaatagctaagtgaagtgaagtcgctcagtcgtgtccgactctttgtgaccccatggactgtagcctaccaggcttctccgtccgtgggattttccaggcaagaatactggagtgggttaccatttccttctccacagaatagctaaatagtagccaaagtgatagatttttactttctctggctaactcagtctgccctctggtggaagtgctgatgaacagcaaagcagccacataagaggtagcaggagcaagatagaggcacaggagagtcaccaactggataatccggaagtgaccggaataattagggatggcatttttactctcctctgaaaagtaaatccagtaatttctggccatgagctaggcctaaactttagttcatcttcaccatttggctgatagcttgttgacgtaattattgggtgaatttctttcagtcactatgccacttaacttgaataacttctttcagttattgatcataattttttttttttttggttggtgaaggggtgggtggtggtacaagggaggagagtatgagagatgagacaaagagacctgctttaattctagatttgctttctctgttattccacatcccagagtctcttaaaaactattggaattgttatgacaaaagagcaaagtgaattaagaaacacattaattaagaaagtacaggaattctagttctgcctctgccaataatatggtgccagtagtgggaccatagataggtttatttaaattccctagattgcagtttccttatccacaaagtaaagagggtaatttatttatctttttaaaaaaaatttacatacaataacttatttgatcctgtaccagtggaaataaggcatatactctgcaccaaccgatttgaaatgtgaatacaacaccctaaaaattgaagattagtgtactccaacagcccttgtacatcttctcatttccccaattcatggggtcttcatggacagcaaaaatttccaaggagttgaaaacacttacaaataagtaaagattttagaaataaagactgtgaatcagaattgactagaaaatttaaacttcttttccctctaataaattgcatgctgtgcttatgtaagatcaagttatacatatttccttttttcgatttttaaaaaataataatgttcagttcctaatctggggtccattcacttatccttcaggaacacagatttaaatcatctttatatgctattttttggaaaggaaatgtatggtgttaattacctgcttagaaatcttctcaaatcattctttgggagattaacaatgatattttattagggctttcttgactgtatgtttccaggaactcagtacctagcatccactgttctagagtacaagtggctatttgtacaatctgataatggtttgcttggaaggcagattttcaagtgctagtactagctgaccaccacacacacagtggttcaagatgcatcactagctacggctgtggtttttttgtgtgagaacacagggactttacttacctacttcctaggaaatggaaaaatggaaaaacaatcagtatacgaaaggtgctttaagaagctttgagacttaaataaaagaagttgggcaagaaatacatcacttggtgctatgttcttctgtagactaagttacagaaaaactgaaactgaggccactgatgtgaaaaagaaaacattagagacttttaagaggatcaacagcacctgagctcaatgagattcatgaccggtctgtttacctgctgcctcctcctgtggcattgtgggagttcttcggggcccctgtggcccactgttcttgtcactgttgctttcctccaggttgcctgctggctcctgggttttcatcagttgactcaaaagaactgccaacatattctgcatgtcagctggtgtgcttgaagcttcaggggttgtctgttctgctgaaggtgggaccactggggcaggggctatctccttcaaagattcctctggggctgtgggctctgagtcctgctgttgggaagtggcagccgttagggcactgatggattggttcagggcctccagctgctgttgcatctctgggttggagtggatgttaagcagctgtgccatttgaggaatgctcaggtccgtttggctctgcagcaggttcagtaacactgccaattcactttgattcaactgctgtgtgatatcaccgaggcctgtggagagacagtggaaccaatataagaggatgaggcgaggcaaggcaaggacctttgccatcttcaactgacaatagcaacttacaatatccaatgaatgaagtttcattttgaatgtctcatttttcatgcctccaattgtgacacatttgttactctttatattttcacttaaaaatacagggactaattaaaatatctctgtattgtgagtaaaagtgactttatctatattcttcaaggtcagtgattttcagcccttactgtacattaggagagatttaaaattcagaagccttaggtcctatccctagaaatctggcaattgttcagaggtgtttatgtttaaagctttttaggtgattataatgtgtagccagtgttgaaagccactgttttaaatagacaatgaaggaaaagtgagccaaggaaggaagttgtaattcagaaaaaacagttgtaccacaggagagctactttgttgtttataaaaattcattattacacagttttggatatatttagatcaaataacagtccacagaactaactacatttagcgactgtgatttaacatgattaaattctaaggtcttatcaaatctaacacagacagggctctaattatatgttagtgagccacaggtaaactaatctttaaattcagcttacctaattcactaatttatgccacacactgaactgagatattagttttcaggatagggaaataatctattttaagttttctagaccacatgtacaaaactgggcttatctccctttccccttacataatgaggataccaaactctctactaatttttcagtggctaaaaactgaaacacacacacagatacaaatccttacacttgaccttcaaaatctgccaagtgcttaataaaagcacaaaggctccttcccagcactgacctattgcatccccagccccaggttccaccttgccaggagcaggctgaggtggtgctgggctgctgttctttacaggctcagcacttgtccctgagatagtttcttttcgagaggctttgggtggaggtggctcttctaccaaaacaccactttgtcgctgccgtcgccgtttcttactccataattcatggcaatcctgccagtgggggaggctggaaaaagacaaaaggggaaatgtgtgtgggaatgtgcactactgagtgaatggaggaacaagaaattaaaatgggaaggcaaagagcaaggggaaatggaaaggataaagaaaatataaaaataaccagaaaaattagtaaacagcagcagcgtaaatagaatcatggcatatggtagtctgaggaactaaagatccaaatgcccaaaggatttctttctacagtgagaaatgaagatcttgctaataacagagacacacctgctctataaaaatgtccatattccagtcaaatgattaagttttataattgtttgtgcttagcataacaaaaattaaggagactttttttttcttggtcaaattttaatagggaataaacagaacaaaggtgactgccttcttaatatttacaaaaagcccaggcaaggtagtaatttaaatcttggaaccacatgagcacattgtaattaaaccatctttgtgtaaaatcagtttatgtgttactcggtctctaaggaccaaaaaactggttcttttttctttctgcccactgaatttctatgaccaaatattttcatttgtgaggtttaatacatttctggactttccaatactcaataaattccagtaagttaaatcttaccacaacacagattaccacagccaaaatttccaatttttgctaaaaagcttacatacttcagccacattcaatgcatcaaaattcaaacacaataaatgaattaggacatttctttggattatcagatttgtagttattacctgttcatatactaacatctcatacatttaagatacagtgttcctataagaaaaaaatgcccgtaaactctgaggtgaaagttataatgctgtcagtgaaagtccaaaggtttctatcagaatgtgagatggggagtgtagaacctctgaggatcccatataatagagaaaattaataaaattctgatagaagaaagacacattcagagaccatgttttctatataaaaattcaggacatatggcctgacagatagacacactactggttcgatccctggtcagaaaactagatctcacatgccacagccaggagttctcatgccacaactaaagatcccacatgccacaactaagacctggtgcagccaaacaaataaatattaaaaaaaataaatacataaaattaggactgttcttgcacatacgggataacatgatcattgcagatataaggaattaaaaaagatgaaatgtttaaaaacccctctatttggttggccactgcagcttcttttttaaaaaatctattatttttagtttctcaggtttagagtcactataaggccactagcacttactctggaggatccattttgctgagctcaacatctttaaggaaatcactctgtagagtctgttcagctgtacaacgtttgctaggatctaacgtcagcatgtggtcaagtaaatcaagtgctgctgaaggaatgctgtggaaaggaagagcaaaagaacaagttcacaatgactccagttcttaagcctgtaacttaatgccaaaggtctctaaatttccaactccatgtaaaaaccatgggaagggagttggaacctggctaaacaagaaagcagatttgcttccacacaggattcaagaaatgcaatagtaccacaggtagaaaacatgaagccttgaatgcaagactatgatgaaactcataatgctcaaaaataaaatgttttcctacagtgtgttggcataataaactgggatagtactaattccccaggacaggaaaaagctaagtccaaacaacagccaaacacataaacaaacagatgtacatatttgtcaaactcacaaagagaattcttctcgtaggcgccttctatattgcttcttcggtttcattgtattgaagtagggcagcttgataacatcaggccacacagctggacaagggctaccacagagtcgactgaaaacaaagcaaaaagcaagaacaaggaagtgagtgagcattataaattttagcaattctagaagcagaaatgattacctgctcaggtatgggggctttcggcttattaaactaaaaggcatgcagagaggtaaaacctgaccttactgctttaaggacagaggagttggttaaaaaatagcaatgagaaaatactggcacaatagtctaaaatgattcacatatttggctttgtaaaacatgttcttaatgtcccacatagattttcattaccagttttgttctgttcagttagcattaatttcaaagagctgaactggtcctataacgtccttgttgaactagaagaggagagcttaagactggaattctgatggaaaactgagtttattgcataacacataatgggttatacaccaccttttaaaaaaagtgtatattagcttgtcatattcttccctttaatcttattgcaaaacaaaaaacaaaattcaaattccatcccaatcccagaccttacccaaaccctctattaaaggctctcttttataactatctgtttacatgatgcatcacttactaaactctgagttctttgaaggcagggacctatttctgaatcctaaagttaaacagtgataggaatttgttagagaataggctcaatgaatgtttgccgaataaagttgatcttaatctaacctaagtaagaataaacaactactctgaaaacagcatgcatttacatgaagaactaataaaaactatgcaaattaagtaactgaaatacacttacttatatatataagtatgtgtgtatgtatatatatacatatatatatatatatacatacacacatacatacacactttttgtatacagcccatgacaaaatatatggtaaacctgactgaagagaagcttacttggacataaggagcataaaatcatttagtagaatgaatgaaaagtattagaaattagaggatgagattactgatcaaccttgggcactcagagcacatacacagctgtacctgatcagttctagctgagccagttccagattggcttgaaaaataggcttctttgtgaatagttccccaagaatgcatctagaaagaataaaattgagaggtcagaagagaaatccctggaacttatttaaagtgtatttcaataaacttttatagtatatcaggttgcatctaatataataaaaaagcccaaaactaagggcctgactttcataaaagaaaatacttcttatggtgaaaataatattaaagattaagatttgctggtagatcaaatttttgccacctataaaagacagtctataagcagaaacaagaagtcaagggactttcctggtagtccagtggttaagactctgtgcttccaatgcagggggaatgtgcttaatccctggtgggggaactaagatcctacgtgtcacatagtgtggcaaaaaaataaagaaaaaaggagtcaagagtccttttctaccaattccactgtaaatttaaggaaatagctaaacactaaaaaactcctgacttcaattttacaaagatgctgagcaattccagtaagaataatattagcctttttcttcatctgctctgcagaatgggcactatatacagccctcttgacattatatttgtaaagttcattgtcatcagttagaatcagtttcaacaggactttcaaatatattatgcttcaattctttcaccattttgaaaaggccttacaaaactatattgacgtatttacacagtctccaagtatctctcaataaattaaaattataaaaggaaaactagtaactatttagtagtgaagaaaacaacaccttagctaagtgaccaaagtaacatccccagaaaaaggtaagcagggttcatgtgagtacaaatgtaataccttaaaaagaacacttctgaaatatgaaagaatgaaattctgccatctgcaacatggatggacctagagggtattatgcttaagtgaaataattcagataaatacagtatattaccatttatatgcataatctaaaaaataaaacgaatgaaagaatgtaacaaagcagaaacaaactcacagatatagggaaaaaactaatgattaccagtggggagaaggaactggaaaagagcaatctaggggtaggggactatgtataaaataaataagctacaaggacaggaatacagtcaatattttacagtaacttgaaatggaatataatctacaaaaattctgaatcattatgttgtatacctgaaactaatattttaaattaacaaaacttaaaatttcagccaaaatcaaaaccgaaaaaaagccaagtaactgttccagattaagaatgaaaactaaatgtaatatgtgctactaaactggatcctctattacatgagatattgttgccaggaccttatgagtgtactgacaaaattagtgtgtgaatatacagaactactggagaaggaaatggcaacccattacagtgttcttccctgggaaataccaaggacagaggagcctggcgggctacagtctgtggggtcacaagagttagacatgatttagcaactacaccaccaccactaccatataaaattactttcaaatggttctggaaaaaagatatatatatagtacacatatacaaacatacattttattctatgaatatactgtatattacatataagtacatatatatattatatatacatacaacacacatatatgtgtataaaatatatgaatataaaagaaatgtagggcttccctggtggctcagtggcaaaaaaatctgcctgctgatcaacgcaggagacacaggttcaatttctgatctgagaagatcccacatgctgcagagcaactaagcccttgcaccacaatcattgacactgtgctctagagtctgggagccgcaagtactgaagcccatgcatctagagaccatgctctgcaacaagagaaaccaccacaatgagaagcctgagcactgcaactagagactagcccccgctagtcacaactagagaaaagcccatgcaccaagaagtcccagcacagccaaaaataaataaataaaattatttaaagaaggtaatgtggcaagttaaaaatcagtaaaactaacataaataatcttaaaataattatgttgagtaaaagctgccaatgtgaaaaaagaacatgtacattatgcttctgtttaccacaaaattctagaaatataaagcaatctaaagagcgagcagaagagtgggtgtggggaatgggatgatgtggacagtaaagagggattacaaaggaacacatggataattttgcagcacattactttggttgtggtgatgattttaccaatgtcaaaacttaaattatacacgttaaatatatgcagtttacatcaacactctatacttttttatacctgaaatatttttttcaaaatgtgaggaaagaaaaaaaaaaaaggacaacaaatctcttttctggcctgtgttctgaaatgagatttatttacaaatactcctgaaaccagtgtttacagtcagccctccatatctgtaggtaccatatccacagattaaaccaaccatgaactgaaaatattcagaaaataaattccagaaagtttcaaaaaatcaaaacttaaatttgccacgctggcaactattggagcatttacagtgtttaggtattataagtaatcagagattattgaaaatatagtggaggtatgtgggagggtgtgtgtaggttatatgtaaacattacactatttaatataacacacttgagcatcttgtaaacactacactatttaatataacacacttgagcatccccaggattttgcgtgcagggggtcctagaaccaaccctgctgtgggcatggaaggacgactataatacagtttaactttgaaattctttagcttgacaaaatttgagaaagcaaacaaatgtagcttttaaagttagcagcaactttcttttagcatctgttaacctcaaattcttacttccaatagtctctcaaaccttatccagagaaagaaaagcgtaagcaaaatttgtttctaatattaactgccaaatcaaattccaaatacagtgttatcacaacaggtagaataaaacacagaaagaacagtgctgctgagtttacagactctaggtacaatgtgttgtactagtctgtgtggtttctcccttgattttcatcctgaactgctctgctccatcaattaattctgccaagaacatcccacaaaaacatcttcagagagactactatgatcaccaaagtattaagtgcacatcaaaagtcaagcaaaatctcagttcaatgagtcactgagcttttaaagaaagcataattttctacaattttaattttcaactgtgtttttgtgttttcagtttctagtccttcagtgaggaagacactgttatgtaatcaacacttggctactgcattgaggtggtagattgcacagaaataataccaacagagctatgaactttccccgtgcatcttaatggggcattaactttacagcctagctgtgacaatttaaaagctaatactgttaaagcaaatagtccagaacacaaacatactcagcttgagtcagtaaaatttaactaaagcttcatttgagttgggtaggctactacagaaattaagctctttctccatcacccttttcaattttgaaataaaagccccgtagttctcctttgaaagaatgacattaatagaggagagaaaggatggaaaaaagtgatatgctccctgtttagtatatgtgtcagaatcctaaagtatggaggtcaaggtcagtgtgcataaataatacagcttaagaaacaactaacatgacccatttaaaatgtctatgcccctaacatacaaactgtggtctctaaatataattttctactaaaaggacaccttaagagaaatggccaattccaggtctgtggcaggaaatgaactagatgagactagaaccagaaaacaatagaggctatcaattccactatggttgagtcaaaaggtcccaagaattaacctgaataaactcccaatgactgaagtctggacagtttgaagaggaataaggatgataactctaatgaattaaatatgtttaaatccatgagttcataatgacactaaaaaccaaaccccaaacaacgtcttctttggtcatctttggaggataacagtaagctaccttattattttgaaaactggtaaataaaatggaagatttaaaccgttaataaaaccctttaaaaaacttccttttggccccacccaggtggaatttcagctccccaactaggggctgaacccatgctctcaccagtgaaaatgtgtagtcttaaccactggactgccaggtaacttcctaattaagccttttcaatatcatttgtacccaaggttagccaaatagataacctttctttattccaagaaagaatgaaatgattagaatatcataccacaaaaatcccaaatgaattgatggatgcagaccactaatagctaacaacacttccaaacgagacaattacatattattacataaagtggtgtgtgtatatgtaactccactccaatagggatgactattttattagacattgtttagaagagcctgtgtaagaggataataaaagttgactaatttgcaatggattttttaaaattgtttttaaattttctacagataatgcacccagttattgcctgtatgtactctggacaagaggctcccaccgcttcctacccccaactaggatatacaagtaactatgtgatctgtcagaagtacataaaaccaccggtaaaatagtttcagggtcagtgggtattgggaatcagacctgaactcacctataatttataggaaataaaaatagagaactatgcaaaaaaaaatcaccatgaagatgcaataatcagcaaagtctagatggtgagaaactctataggacaagtaaaccaatttcttctaaaaaaaaaaagttataaggagggggaacctaagagagatggaggggaaatctataattaaaagatgagatatcaattgcaatctatgaatcttataaactatgtgtctgatattaagaaatatttcacatatttctttgaactctggctaaaagttgatccctatccttttgaacttaaagaagagctgcaaaaaaatgaatggagagataaaacatgatacaagttcatcagtatgtgagttacaaacaaaaaaaagatgaaaggaatcttacccacagctccaaacatctatcgctggtgtataacgctcctctcccagcagaagttctggaggtcggtaccacagagtaataactttgtttgtataaggacggctgaaaagtaaaatacaaccatgacataaatttataatggtttctgatgaaaaatacttatataattaaatgcaaattaaaacagctgtcaattggagatgggatcatcaaaacagctccatagcaacctaacagttcaaaagtaaactggacagaagatgatgaagaaataacttccattccaatttgggttgatttatttcagtctaaagcaggttcaaaaattcagaaagaattaagtgtctaaaatctaggtggtaacacatttagaaaatcatggaactcttcagttactgcaatttacagaatactagcatatccaagaataaaaaggactttttcctatttcccatatgtaattttgatgaatgactcacctctcttcagaattatagagccgagcaagtccaaaatctgctagtttgatctgaccactgtaaaacaaaaataattattttcataagtaacaacaggagcttccaaattacacttaaaaagtcaagtgctggaacttccctgacagtccagcggttaagactcggagtttctgcttcagggggcgtaggttcaattcctgatcggggaactaagatcccacatgcaacaagatgagaccaaaaatataaaagttaagtgctaatttaggaattaaaggaattacaaaaatgaattttaaccttttagttctgctcttaatggtaactctcccagattaagtttctttgaccacaccactctggaaagcctaagggaggtttttttaagactactattatgtttttggatttgattccttaactaaatatttcttttatttcttggcaacaaaagtgactagaacctgctagattaaacacttatggttgggaaaaaattaaatgggctatttcagattaagggagatttatgaggcctaacaactaaatccaattcaaaatccctgactgattttggtttgaacaaattagctccacaaaagactatttttttattctggccacgccatggggcttgctggatcttagttccccaaccagggattgaatctgggcaacaacagcaaaagtgccaagtcctaaccactggacttccaggaaatccctacaaaagatatttttgacataactgaaaaaatataaaatatggactgttagaaaataatatataataattttgtcagagatttagagtcaaacacactgatgtaatttactttaaaataagtatggcagaaaaataagggagcaactacaccaaaatgttaattgttatataatgttaatgttaaagagaccacatccatgtttcactctgctaaatatccttcctttgacattgaatcaagtaatattttaataaaatgcaacacaaaattctgggaaactatttaaaccataattaactattggattaagcatacctatctcaatttttgtgtacagtttgtgttacctcttggggaatgaaaagccagttgactttttaaaggactggggatatctcaggtgtttgatagctcagatctagcagaaaaatgagacagaagaggggggaaaaggctattctatgaggtgctcctcaaaatctgagcaataggacaaaatattaaagccaggtaactactagcaacaaaattttacattaaatcaactcaacattcctagaaaagattatgggcaccttacccacttgtcccatacctcatcacattttaagttcaatttataagcaatttttgagaaaagcaaaaaggaaagaaatagctgtcttgagtcctatattgagacaaaaagtgttcctcaaattccttggcatccttactttgaccccaagactcaaggtaagttctattatggtacgacttaaaagttaaaatggcaatagaggcactatctcggtgatccagtggtttaagaatcagcctgccaatgcagggaacatgggtttaatacttgctctgggatgattccatttgcagcagagcaactaagcctgtgcaccacaactactaagcccacactccgcaaccagagaagccaccacagtgagaagcctgcacagcgcagctagatagtagccactgcacactgcaactagagaaagtccaggtgtagcaacaaagacccagtacagctaaataaatgaataaaatcaacaattaattaaatgtaaataaataaaaaatttaaaaagatggtggaaatgataaaatgtattaaaaaaaaaaagcagtagatatatggaaatggaaaattaggctagacctaaatattaccagaacctagtttatttcctaatccatccccacaccctcttactctcagtagataaccttcttcactgaaaacagatgtcatctgttaggtgggagctatttaacattgttttacctatacttatttacacctctaaccttgctttctccttttccttcagttacagaaaaaatgtgtctatctcttttcctgttcaaggataatccataccaccacctctggctttgatgccatctcctctagaatctcattcctttaaattactttggttctttcctgaatcatcaactttcccctctttattgactttcattttccttagcatttaaatatgctcaaagctctgcatccttaataaaaaattaacaaaaacaattaaagtcacaactacaatcacctccccattaattatgctacccacccacttaccccacactttcaccactgaccttttttattttcagattctcttcttgggtcctaaaacctatttacatcacctgacatctataaccactcatttcttaaacctgctaattttgcattcatgatatttccttattttcttctgatctatctgaccagtttctcaggtttcatcttctcatatcttttctatgcttggtaactcctgaatctacactgctagtttgaaactcgcatgtgatcatatgcctacttggtatcactaccctggatatattatagtaccctggatatattatagtaccctgaatatattatagtatggggtttcccctttcacctcacgcatcctattcttcctgtattccctatattgaccactgtgccgcccatctagatagtttctcaagtgagaaatctgtgagtacactgattgattccccaccattcactctctcaagtctactgatctaccaagtccatgctgtccatcctctactagcaatgccttggttagtttaagttcagaccatttcttacgacgtttttaataagtctgtgtgcccccagtccacaccctatatagtgaccattcagtgacttttctaaagcagaagactaattggtctctcttatatctaaaataatttggtttcatttatagttgtgtaattaagataaacatcacgaagcccaaaccccctctcctccctctctcatcaactgttttccctccttcatccagctgaggactcctctctctactccatctcactcaaaagtctctgtgtagacactaaatgggcaagagcagaggctggttggatcagactagactatgagactcctgcagcctgcttagaaaactgaaaagaaaattcactttagtctagaagctcaccagcttcctgaactcgggaagtcagggacagagaggggctggacccaccagaatggacaccaagcaggactgcaattatttcctggcctgacatcccccaacagaagagcaaaaggaatagaagaaagtatattaaaattatagtccagaaaactgaaagatgataaccatcatcattaaagtttttgatgcattattactgtatatatagctggtttttaagtgcagctttaataagaactgtggtgggtcacagatatagtgatagaaaggaatcttttaatatcacgttttatctcataaaggtatttaagtataaataatagttttacagtaatttgggcaattaatgaaatgcattaattatataatttgaaaacaaaaaattaaccagcacctcttaatggctgtctcttataaataaaatttaaattggctcctgcaactgtccagcttcatctcgccattatgtgtttcactcttcttgccctagcaatactgactcctttttcagtttttcaaacatgctatgttattttcacatttatgtgcttttgtaaattttgtgaatttgtaaattcaatctcttttgcctagaaatgtaaccctctgttgtcattctttctggtaaattcctgttcattccttgaaatcacatattcccagatgctcccaaatctgggggtcacatctgggggagtttaataaatgtttacagaaataagcaatttatttgttcagcttccctactaaatgcaactctccagggaccaaccatccaacatgggactttaggtgctaaaaccaggacagttctgggcaaccctgaagagttggctacccaactccacaaagataggaaacatgtcacagtcattctatatttccatctattaatagataatgtttgttaaacagaactgaacagaaatatttaatacaaagggtgcatcagacaagttcagttcagttcagtcgctcagttgtgtacgactctttgcgaccccaggaactgcagcacactaggcctcccggtccatcaccaactcccagagtttacccaaactcatgtccattgagtcagtgatgccatccaaccatcgcatcctctgtcgtccccttctcctcctgccctcaatctttcccagcatcagggtcttttcataggagtcagctcttcgcatcaggtggcccaagtattggagttacagcttcaacatcagtccttccaatgaaaacccaggactgatctcctttaggatggattggctggatctccttgcatcagacaaagatggttataaacagcctaattacctacagaaccaacactggccttatttcaatggttccagacttgctttttattcctcaatatgtagggctattactcaaggctactgtgagtaacaaaggatatcaccaattcactttaagcaaatagccaaagaggaaggaagcagatgataaaaacttctgaaggattaacactgttctttaccaaattcctgtctatactattaaaacccaggagtaagtgctggcagtggaagagaaggggatgacagaggatgagatggtgggatggcatcaccgactctatggacatgagtttgggtgaactctgggagttggtgacagacaggaacgcctggcgtgctgcaattcatggggttgcaaagagtcggacatgactgagcgactgaactgaagtgctggcagaaaggtcagtccccaaatacatctgtatttactctgaaatctgataactaagaaagtctcaaaagcagctataagagcaggtttctctcaatgaaacaaaggagaatttctttaactcaatgtgtgtgggaatttgcctaggaccacaaaagtattactaactatggcaaccatctctgaatattcctgtaggatgtgagtgattccctaaaatgtttccatttaaaaaaacctttacaaataaaattaaaaatacctttataatcctatctcctttagctccttaccaagactgagtctgagactctgctgataaaagtatcccatcacaagttgttcctaaggtacagacatcagatgtacataaacacaaacactgcattattgggtctatctataactctttaattaattagctgaaactaagggtgtcatggacggaggaacctggtaagctgtagtccatggggttgctaagagtcggacacgactgagcgacttcactttgacttttcactttcatgcattggagaaggaaatggcaacccactccagtattcttgcctagagaatcccagggatgggggagcctggtgggctgctgtctatggggtcgcacagagtcggacacgactgaagtgacttagcagcagcagcagcagcagaagggtgtcagaagagagggagaaaatgcttaacctcatatggttactatgttacctgttgttcagcaaaatgttagaacacttaatatcccgatgcaggaaattctttttgtgacagtaatccaatccttccattagctgtttcatgaatgacttgatatggtcctcagaaaagtgcaccaaaccagattccagaagtcccattaaatcatggtccatatattcaaatacaaggtaaaaggctcctacataggatgaaagaaaaaatttagaaaagagaaaaaggatgctgaaataacgatgccttaatttttatataattttggagttgaccataagctctctagaaaaagatgtttaattctatatatgaaaaaactaaaactccagcaattgaataacttgcccattttaataataaataacaaaactactatttgaattaatcttctgacccacagtctggtgctctttggactacttatatcttgaaggggacaactcccccagttaggttgtataactagtcttttatgatctaaatcagctggcaaattacagactgcttggggcaaatcccttctgtctactgctgtaaataaaagttttatttgtaacacacaaccatgcccatttgttacacactgtctgagactacttttgcagaagtctttacagaagtgctaacagcactcacataatatgccaggggtgcatttagtacagactattaatgaaatttatagtatttaagaattgaaagaaaaatgaatcattcaattcaacatcctacatttaaaagtaggtaaaaggctaagagaatccacattatctttacactttcagcatggtgcatgatagaggcaaattctgtaacataagaaacactagaccttctatccagtctaaaattcttctctcagtaacataaaggcatggattcttagtctagagggtaggcttcaaggactctgaaatagcatataacattttaaatgttttttttgaagaatgaatccatgagctattttaaaaggtccatgactgtcaaaaagttaacaaccactggattaaaggtataccttagctttagttaagccctcctacaaaaaaagaaaactaaaattgcaaaagaggagtggataaaggatataaagggacaactcaagaaagagaaaaataagcaaaattcatagacaagggaaaaaactggaatgcaatccaaaataatggtatcactcatacttcacctcagatgacagttttttaaaaagataaattcaacattatggaggattgagtgagatgggactcactggtgggacataaattattacacagtctacaattaaatatgaaaattcctttcaccaaataattctatttctaggaaactatattaagaaataaatcaaaatgcaaagatttatgcaaagatgctcaatgcagtgctattataatattttttttaactgacaactaattgctcaacaaggactgatgaaattaaatttggattcatttatcttcacgtacagtcattaaaacatgttaatgatacaggaaattgctaatgacaagttataaaacactaaatacaccttgatctcagttatgttaaaataaatacaatatctatgaagcaccagaaagaaatatgccaaaatattaatactatatagtgatcttctatggatggtagtatactggatgggagtggcaaagaagtgattgccattttccttttcttattcatctatattttcatttcttccatataggtatgcatcacatccattaattcacttatttttttgtaattaaaaagaaatgtattttttggccattccgcacagcatgttagtttctctgaccatggattgaacctgtgcccacttcagtgaaagcatggagtcccaaggaagtcctcaattattttatgatttttttttttaagaaaaagaatttgaacagtatatagtaaattacttatacagtacagaatgatatggataaaagcaagcacccgtccaaaagcaaccaattaacattttcttatgcatctttactctatattatttttataatcagaaaaggttaaaaaacacacccagaaataaacctagtatacttaattctattccaatctaactttcataaatttatctaagcagaatttccttttctttaaaactacttctatcaaactcaagagatactactcccttaatgctaatatctctgaggctctgtaaagaagtccaacttaactttaaccaatacccttctaattttatgtacttcaatcatattttctcttaatatcccagggtatattcacatatgccatctctttacagctgcccatttccaaaccttcagatttattttaacagaagttggctggatgtcatagatagactacaacaattttattgcccaaagacaagttacaaatccaggaaaaccacaatgtgacctgaagaaaattgttttagaaatacctgcttttaaactgtgagcacaaagctacgtttaaaaaaaaaaaagatgcatataaatgaaggagggcttcccagtagctcagccagtaaagaatccgcctgcaatgcaagagaccccagttctgggtcgggaagatcccctggagaagggctaggctacccactccagtattcctgggcctccctggtggcttcagatggtaaagaatctgcctgcaatgtgggagacctggatttaaaccctggattgggaagatcccctggaggagggcatggcaacccactccagtattcttgcctggagaatccccatggatacagtagcctggcgggctatagtccatggggtggcagagttggacatgattgagtgactaagcacagcataaatgaaggaaggatgaaaaaatgagaataactgtctaatctgggttttaactttcattactattattacaatttgtgaaaaacaaaacaaaacaaaaagaacacttcaaaatgttgcttggaggagaatcttacatttttttatgtgctcgccttattaggtgtaacagcactctaattgtaatgattaacaatcatttcaaaagtgtaagagtacactgatgaggatggacggacattttataaaatatgcactgttcagcataagagcaatgtattaacatcttaattctgatatgaattaaagaaactggacttgtttagtacaacctgttaaaaaacacaaacgtgcaaacaagctaagaaagggaaataaaatgtaccaatctaccatacagaaacatgattctttgctagtacctttgtccttcttgaaatccagtgcatcctgcttatctgtgacaatttccttcatgttaacaacacttcggtggatcagctgacgaaggattttgatctcacgaatggctgtgattgggaagccctctttttcattgtccagtctcaccttcttcagggccactagctctcctgttgcagcaaattcaaacagttttatcataattagcattttctggccaccatcatgaatcaaccaatatatgctcttgctctgataaatttaatgcctactttaatgctacatgcaagatattttatatatatatattttaaaaaatccccaggttccctttcttatctttgatttttaaatgactttccacttaaagcagcagtaccactaaatttttaaccttctggcatctagaattttttggcattatttacctgtgtctttgtccttggctttatatacctggccataagttccctctccaataatcccaataatgtcaaacttgtccacacagcgttttccccagtcactttctgtttgtcttctttctccgtaacgcggacaacaaattctaaaaaaggcaaaacaaaaaaataaacaaaaaagttgctctaaaaatttaagtttttttttttttcttgcatcacacagcttgtggaatcttgtttcccaaccagggatcaaacccatgaccttcagtggaagctcggaatactaactaaccatgccaaggaattccctaagtgtattcaaaaagaacaaaacagaattcttttatgatgatttctctgattcctgggtcttttatcagtttctttattaaaaaggcaggaatcaaataatataaaataaacagtaaacagtctctcacagtagctgagatttttccttttttttgcctcaggaagacataagatcaaataatagaattgctgcttactttctaacttcttactagcttcctcaactatagaatgggaaaataatccatacatcatagggttactataaaagtaaaatataaaactttggcaataatatatgctcaataaatggcaactgtttttcttactaagagaaggcagctaacaatcagaagatcaaactcagattctactacattatgacatggcaactcatgtagttcagcagaaaaaaaccccgcatctattaattcctcattaatatatacatggttgatatcctctgaataaaacgatttttgtcttctttaatactcttaagtagtatgaactcaaaagatactgtgggatcaatgttcatggtaaacttgaacttgggaaattattacttttctaaaaaacatgacaaggtatctgggaatgtagatgaaagaattttatctgtgaaaataaaggaagagctacattaggcccaatcctctatgatcctaatggtgtaggttgtggtccaaaggtatccagaccaaaactcactttggtctctttttgtatggttgctgaggtggtgtgattgcctttggttctggagagtctgggggtgatggatccccaccagggagctctggagggagagggaggtctgtgagtaggtgacgtggtctttgttccttctctttcttcacaggttttgaaggtagagtttctttcggactaaacaacagagaggaaaaaaagaaaaagaccacaattacttaaagaatgtgcaaataaaactcaaagattgtaatgtctggttattaaaagattacaaaggttttactaaagggaaagcccctataatataacataaagaaatggagtttagtcacagttaaagagacttggattttgcaaaaagaaatctatagtatattaaaaaaaaacaaaactgggatattatttgtagaaactttaataaactttttaatgtcctcctgaagaggctatctggatttttactgagatgaaataaaatacaggaagttataaccttaaatttgcaaaacaccatggcaacctgcgtagtcaccaaacctgctctaaagatttcaataatgatggaaagcccaacagtgtaatactactatgttactaaagatgtggagagaaacttggaaaaagcaaagagtagtttagagtgttttgtaagaaatacagctaagctggaaatcaaaataaatgaaaaattcactgatttattctactggttgggaataaaaagcaatcatattcaaccacccaaaatggataaataatcctcaaactaagaatctaaggagaacaagtccaagagactatttcagaatcattaaagcactggtggctcaaatggtaatggttaaagaaccttcctgccaatgctgaagacacgggttcaatccctgggtggggaagatcccctggagaaggaaatggcaacccatgccagtattcttgcctgggaaatttcctggaaaaaggagcctaatgggctacagttcatgggggtcacaagaatcagacacgacaatgactaaacaacaacaacaacaacaacaaagtactggcagcagaaagcctctccaacaaattataatagtcagtgggggaacaaaagggatggcttttctggaatagattagaaaattcaattttcagatctaattttttaaccacctctacttatgagtaaaagaaggattttgtgccatgcatgtcctcagaaaaaataggcagcatactaattcatgtctagaaataaaaccatgatagtcttttgtattccatcacagtatcagaagattaaaaaggatctgagaatcctaatcacagtaggaacatctattttttcagcaagtggttattaagagaaaattttcataaatacttacatagaaccataaatacatctaagggataatacagctatgccttgcaacgtatctttttaaagcatactgctaccttcagtgtgtgaaatacaatctcaaaagctactacttcctattatttttcatcattttaatctcaaaattcatacaaaataacagaatctagtttgtaccatattaaccagaactggggtagtcaaggtagagcaaaacgatcatctgaaattttctgttaaattactgatagtgatgaacacacaccaacttgcagtaagatttttctaccctgaaacaaagtcttaaacaaaagagttaccagaaaactcttgggtcagaatgtctatagattttttaaatttccccaacttttaagacatttagaaaagaaaattcctagtttttcaattactgtgccaaaatactttttataaacttcaattcatgattcaaaaataaagtctagcttggttctgtgtcactagaattaaattaactgaattctttcaccatcatttcatgtaagttcattctatattttacatttacatcttattttctccaaaatttactttatgagctcaaatattatttgctattgtgaaaatgtacattgcttctgaaaaattgtatttcagtctgttatttcaagaaagaatgaatgtttgatgggatatgtactaccagtttagagcacacaagttaaacagaggttaaattttgtttcaacaaattccacatgtaccaaaaaccttgcaataatgatgcataaaataaaaacgataaaattgcaatgcttagcagtattatggtctttagcctttagtgtagggtagtcactaaaataaagctctatatagttctgataacatatggtagatgcagaaagggtctaacatagtggaagaaatattgtcggagaaggcgatggcaacccactccagtgttcttgcctagagaatcccagggacgggggagcctggtgggctgccgtctctggggtcacacagagtcggacacgactgaagcgacttagcagcagcagcagcaagtcattacttgaagattcagtaccagaaagaacagattcaccctatcaatatcagtatttcctgcttctccatttataccagcagatgggttcactcatggagacaaggttgcattaatgcctgtgtatgctgctgctactgctaagtcacttcagtcgtgtccgacactgtgcgacctcatagacagcagcccaccaggctcccccatccctgggattctccaggcaagaacaccggagtgggttgccatttccttctccaatgcatgaaagtgaaaagtgaaagtgaagtcgctcagttgtgtccgactcttggcgatcccatggactgcagcctaccaggctcctccatccatgggattttccaggcaagagtactggagtggggtgccattgccttctccaatgcctgtgtataattttttaaaaaaagttgtcaaatcccagcgtgctcaaattttagaatatggatcgtctcttggaatttatgatgctgaatttattctgtaggtacaatgtaaacgcctctgaaaactctttactgttaataaaaaaaaatgaatttacatatgaactctaccaaaataaaattaactttattttgggccatatcacacagcttgtaggttctcaattccctgaccagggatggaacttgggcccacagcagtggaagtttggagtcctaaccattgaaaagtcagggaattccccaaaattaatttttataattttcaaaatttaagataaactactttaaatatccccatccctgatggctcagtgactaaagaatctgccggcaatgcagcagacagaggagtcatgggttcgatccctgggttgggaagatcccctggaggaagaaatggcaacacactctattcttgcttgggaaatcccatggatagaggagactgggtgattaaacatgcactttaaatatggccatttatctcattcctcttaaagaaggttgtttaaaaagtgatttatttttataaacttctattaaaatttgaatgaacacattaaaaacattccattagcagtctaatagaacagaaatagaaaacaagcattctattagcaaaatcctaaattcaaacctgaacgtttaataggtcttttatacaagagttcagtactttaaaaatacagcctttaagaatcctgtagactcagacatagctgttcatggggatatgcttcttttaaggagatcatccataggcatgtggctaaactgcttcagttgtgtccaactctgtgcgaccttatggactgtaactcccccctcctccaggctctgtccgtggctctgtctatgggattctccaggcaagaatactggagtgggtattattctttatttattctttattcaagtctgataaaactccagatgaaccaggctatccaaaaaatagagaagaaaacaacattttgaaaaccctctatggttaactgaaaatttaaagaagagtatacagatgattggacttcccaggtggctcagtggtaaagaacctgcctgccaatgcaggagacataagagatgcaggtttgatcactgggtcaggaagatcccctggaggagggcatggcaacccactccagtattcttgcctggagaatcccatggacagagcctggaggaggggggagttacagtccacagggtcgcacagagttggacacagctgaagcaatttagccgcatgcatatggatgatctccttaaaagaagcatatccccatgaacagctatgtctgtgaagaatgcattatatcaaagtggatgtttggaagcctttgcttctagaaatcaagaattgtagactgtgaatcagaaaggtttttgcaaatatcattaattaaaattcactcttctattatacttctgctcaatgtacatactatacacacacacacatacacacgcacacgcacacatttgaaagagagattaattcttttcccagaaggacaaatcctctaatacaagctttatatcatccaggtgacaaataatttcttaactacatgccaaatttcatttcatacaagccctgaccctggttccttcagcagttttacttattcaaataatcaatatttaatgactacattctatgttttatgtttaaagtactataggcaataaaaggagaaggcaatggcaccctactctagtactcttgcctggaaaaatcccatggacagaggagcctggtaggctgcagtccatgggaccgctaagagtcggacacgactgagcgacttctctttcactgttcactttcatgcattggagaagggggagcctggtaggctgccgtctatggggtcgcacagagtcggacatgactgaaggaacctagcagcagcagcagcaggcaataaaaagatgtataagtcacattctcaacatttaagctcctgcagtctcctatgagataaagtacagaggaacagaagttccattcacaactttcagatttcttcctaaaaagtcttcttacataaaattattttttcgggacttccctggcggttcaatggttaagattcagcacttcctatgcagggggcacaagtttgatccctggttgagtaactagggtcccaaatgccacacggccaaaaaaaacttgttttaaattaataaacaaatgtttttcatgtgaaaggtgcagctgtacatggaaagggtgcaccaaataagtaaatgaagacaaaaacagaaaagccatgaattttaagttagtacatagtgaaaaaataaaattgatattggaaaaaatcttcacttccatttttctacctttaataaggactattaaatgaaacagttatacttttggaatcagaatatgtaacaaaaataatttttctcacttctctctcgtgagtgttcttaaagacagctacacatactcaaataatcactgaatgatcttactttacccttcatttacaatctgaaagacagaaatctctatgtgccttctatcaaaattgttccacctctgtaaatctgcactctaccgtgactcatggtagataggttcaatgtctacttggttagttagccaagtaaacatttcaaaaggaagattcctagccacactgatatgatactagccactatgtaaactaatatttccaaggttaccgtggaaagatagtggcctaggttccctctggatgacttctttttcaacaaaactacaaaaatatatattttgtatctatgataagtatattgtgtacctcaaacaaatttttctacataaatttcaggttcttttcttctcctttgtagttctcaggatgtggcagaattcattaatacctattaatattagaaagagcatgtggaatttttctttaaaatcttatttaccactatatatagtaatggagccattcatttaaatagtctcttttcccatcatttattgcacttgcaccttctaaaaaagcagagagagtagtctgaaaaaatatagacctaaagggctgaaatgtatcactatttaaactactgctatcacctggagagtaatggaagcttgggaattagaaggcaatggcaccccactccagtactcttgcctggaaaatcccaccggtggaggagcctggtaggctgcagtccatggggtcgctaagagtcgaacacgacttcactttcacttttcactttcatgcattggagaaggaaatggcaacccactccagtgttcttgccttgagaatcccagggatgggggagcctggtgggctgccgtctatggggtcgcacagagtcggacatgactgaagcgacttagcagcagcagcagcagcacgactgataatatttatttctgtgcttacgatgaaaacttgttgcattaagtgaaactcatattctctataacaagagggcagaatctccatagaaaaacaataacccgaagactgccatggtatatgtcactgctaaatcaagtttgtttggttgtacttgcctagctaggtccgccaagaaattaaacaaatatatttccctaatgccttccatgaaatcagattcatgcttcaaatcatttcaggtctcaacagtcagaggattcattaaaatgagagctcttcttgtcaccacactgtgaatttatattctaattagcaaagactctacatattgttcttttgcttcttaaggataatttttttaaagcatcaagatggaaaaaagtcgatataaaagacatttttgggaccacttaggatattaatattattgatatgctactgatattattcaataaatgaatttttagggtgataaaggtattgtgattatacaggaaagtgttcttgttaggagagacatgctaaactattcaaaaatgtcataatatctatagtttaaaaaaatatggcaaaaaattaacaactggtcaatctagctgaagggcatacagttgtttatttttctgcagctatgtaatactgaaattttcaacataaaaatttaagaagaaaaacatgatttttaaaactttaaatcaaaattattgataaatactcttgtgagaaaaaggattactagacctcaaactgtaattctcttttcctaatcatgtcatacataaggactttttccactgaaaaccaaacatcacaggcatttcctattcatgaaagcattataaacagacatgcatcagaagaattttgacaaagtcttgagaacaaaaactacattacacttagatcagggttaaaatttcccaattaactacaggacttacctatccatgtcatcatctcccagtaataagggtgggaggggcagaggaggcaacgttgaagtttttaggtgtggaatagcagctgttacagatacttgagtcttcacagaaacctgtacagggggctgagaatttgcctgagaggacagagtagatgtccttggatgaacagaggggggcaaagttgaagtacttgaagaaagaacctgactaaatgttggctggggaggaggcagaggtggctgctgtggaatagctggcagtggaggcaaaggtggcaaggggggtgtctgtggtggaggggtagtagttggtaaaggaggtggagaagtaactgtgggaagaggtggaaaggtctccttttcagatgtctctgtctcttttggagtaacaatctcctctttcagtgctacaggtttagagtctcttgttccctgtactttcgtatctttaagaacaggctgcttctcagagttctcatccaacttcactttccctgtatctaaagaatttttgacctctgtgttaagatgtgttacattcaccagttcagtatctggggcagatttttccaattttacacctctgggtaactttttaggctccaagcctgaatccttagcctccactgaactgttctcttttctaggcaaaaatataggtgaacccttggattccttcccatccattttagctgctgcagcagctgctgctctttccttctttttcctactgagttcagctcccaagctggagttcaatggaagcctgacaggtgagatactggaatgtcgactgcgtgacccggatctcttctttttactatgagaagatgagtgtcttgaatatgcaggacttctacttctagacttcattgattttctactggaaaaagaaaaaaaaaattaaatggatagactacagcaatatggaagaaaaaagattagttaaactatgaagaactataactaaaaaaacccagtttgagtacttagcaatcttaaaaatatattgttgttgttgttcagttgctcagtcctgtctgactctttgtgaccccatggactgcagcacaccaggcttccttgtccttcactatctcccggagtttgctcaaattcatgttcattgagtcggtgacgctatctaaccatctcatcctctgccaccctcttctcctcctgccctcaattctccccagcatcagagccttttccaaggagctggctcttcgcattaggtggccaaagtattagagtttcagctttagcatcagtccttcctatgaatattcagggttgatttcttttaggattgactggtttaatcgccttgcagtccatggcacccactctcaagagtcttctccagcaccacaattcgaaagcatcaattctttggcactcagccttctttatggtccaactctcacatccatacatgactaatgggaaaaccataccttcgactatacagacctttgtcggcaaagtgatgtctttgtttttaatatgttgtctaagtttgtcatagctttccttccaaggagcatgtgtcttttaatttcacggctgcagtcaccgtttccgaagtgattttggagcccaagaaaataaaatctgtcactgcttccatttttttccccttttatttgccatgaagtgatgggactggatggtaccatcaaataataataataatgatgtatcaatattggttcattaattataacaaatataagatattaatattaggggaaactgagtttgaagatatgaaagaattctttgtactagcttcagaatttttctataaattaaaaaatgttctttactctaaaaaatggattggaaggaaataatccttcatggtaacatatttcagtcatataatctaaaaattatccactacttattcaactgaaaaaagatggatggatattttttcccatgttagaaaatatccatattcatgattacttttagaattttggtttaaatatctgataaagtgaaaacatgatttttaaaagtcatacttaatgctaaacgtagtaactagcacactttaccaaaacctaaaattttaaactagagagctatctaattgagaaatcccaggaaaagattttgttcctgaatcctcagtttataattaagttgtgcctatactaaacaaactcccaagatgcaagccttaggatttacaaactacataaactggagaaactgtcttgacaaaataatttatgatgttcttaaaactatgatgacttctagtactttcaaatataaaatgatttccaataaacattttagaagttcataaagcaaggtattattgcatgctcaacttattttctccattattaagaaaggattggaaagtaaaatctgggaatctaaaaggcagattattctaaattaaaatccaagcccctcttaattctttttgctttttaataaagtcaaatgtactacggccttctcaggtagtgctagtggtaaagaacttgcctgccaatgcaggagacataagagacacaggttcgacccttgggtcaggaagatcccctggaggagggcgtggcaacccactccagtattcttgccaggagaatccccatggacagaggagcctggcaggctaaaatccatggggtcacaaagagtcagacacaactgaaggaacttagcaggcacacaatgtatcaagtatgactggacaaaacataatttgcccaatagtctaaaacaaattgttcccatttcagatcttcaatatctcccttttatggttgatcattggtaagactgatgtgattcaaaatgtttcaaaacaaacagcatatacatggtaggggaaacaactcacatgatgttagtcatgatcttcttatacccataatgccttttggaaattttcttccaaaagttaattaacatataaaataatcactggaatcaaacaacaacatttgtatgaacatgaggatacaagacaatgaaactagttaaatggatttactaaatactcagttactcttaagaaaactaatacatctgtaaataaagtggctaaaacaagaggctttctctaaattacaaactgggttgaaactaacattatcttaggaaaacactaagtaatgtcagaaacatgctctacaacccactgtttctttaatctttcagcatgactaaatcttcctaaagaactctgctacaaatcctttaacttctgaacagaatcttactgtaataggacatttggatggctctaagttacataaatgttaaagttgaggtccagatccactctttaagggaaaaagggggtaaaaaggggacaacaaataggtaaatcgtcttcaaagagtgaacaaaacggtcttcaataacaaatgtattttttccctgaaaaaagttaggttccacccgtttgaaatgaaattgctactattaatcactactaatttggtggatgtaaagatcttcagtttctctcaaagcattttcagtctttaaaaatgatatcgcttgtttaattctgactgtctctctcaaggcaaaaaaaataaataaataataacccagaagaccataaaagggatctgtatgttccctaccctaagaaattgaatgaggaaacatatgtacatatgcacatatcgcacacctacaaacatgtaatgctctttactagccaactaaaaatgtgcatgtgactccaggattattatttagtgtttatatttgtgtcctataggatcatgttgtgttttcaattctttcttgatttatttttatcattactgcactaatttcaactaagtgagtataagctttgtgcagtggcagtatcgtagccaatgaggtttatctgaggcgcgattattgctaattgaaaacttttctcaactaagtgagtataggaagagagaacttgagatttgaacccaaaaggaattattgcaaaagcagcttgtttttactgaaacttgttttagcctcaatgcaattctaaaatattctttcttaggcatccttaaaaaaacctaagcaattttagaaatagtacacttaagacatctacttcactgtatataaattgacttctcattcctccagaaaaaaaaagtgaactctagctaacggtgtacatgctaaagtgtttatagtgaagtatactgatgtacgcaacttactttgagatgaatcaaaacaaatgaagatggcttgatgaagcgatggatagaaatgataaaatgtatatcaagtattaattgtagaatctaggtggtacgtatttgagtcctgactacaataataaaatggaggggaaagcctaaggaacttcatactctgacagctaggaactcctttaacttgatgaattcaaactagtttatgaataattgtaactttaagtcagcaaaaattactcacatttacatataaaagacatggcatggatttttttctaatttctctactagttttcaacatttttctcactcactgataaaatttactgagcaggcactgtacctggctatgcactcatatttgctaattaaacctcgcaactctagaactaggtagttattactctcatttcacacacagagaaattaaattatatgccaaaggatacaaaacaagattaggattccactcagacgtgactcctaaactcaagttctaattttgtggaaaatggtaagactacaaagagggaggtacatacacctcatcacttaggaacaagaacagttttctgtagacaattcactccaacaattaaattttaaactaacatggctttatcaccaaaaatatcacagtgaagatactattagcattttttaaaagaaagattctgaaaactgctgtggtcacaagatagtcaatggtgatgcttgtaaagaaaatcaaagtatccttggaaccaatttctgccaggttataccataaaagggaagagctcagcttaattcccactagaaacatcaaagatgggagtctcttgtaagttgccaaaaaactatctataaagaaataaacttacaggtttggagacacagtggacaaggcaaatggtagatgacctaggaaaacagcctcaaataacacaaatgaaatctccaatcaggtccaataaagcttaaagcactaattccaaagtgaattttgaaaagttaagacaaagcaaccgaaataattggataaactctgggagccagtatcaactccatgcattcggtaagcagaagcctatgatttttctcacataggagcttacagccgaaggtcccagcattggaagtacctacctttatttagcagctttagacatgtgaactctcctcttcaattctgggttaaggggagaccagtctcacctacattatgactagccaacagcaaagtgttctagacaatgccaaacactgggggcttccacaaaatgttaacaggtctaatccccagttcctcataagccacagtaggaaagaacggactgttagacaaatagctcacctgggaagtggactccggctcagagagcgcttgctcagaaaagggctgctggaccgccttcgaccgtagggactgggtgatctcccactgtaagagccactcctttcatagctggaagaacgtcgccggccatagggactcacagacctctgtcgtctactgtagggactgggtgaccgagtgctggactggtaggcggaaggctccttgtaaggcgggctgattgactgccttctagaggtacttcccggactcttcttgtaggagtcgtaattgctagaggtgtgagatctcgggggactaaggtcataatcttggccgtaagacgctccggaggggctatcatcttgcttgggactgtcggaccacttccggtggggactcctggatctccgtttagggctgtccacggttttgtaacttttgggtgtttcccttttccgatgacttttacttcggtctttgtgtcccgacttcaactcacgttctttccgggtcttctccttatggagtttggatgacctggattccttgttgctgcttttcgagatctgagccttcccatggtcatcattctcctcatttgaacgctttgaacttcctgatatccggtccttcgtcgagcccgacttgctggaggcttccaggtttttttctttctctgtctgtttagtttttaataagtcgcgagtacgtcggtgctggtggtgacggtgtttatggaggcggtcactgcgatcagtcccgcgacgttcatcattttccctccggtccagtttgaaaggcaggtcgtcagaaaaggtatcggaatcagagctaatgtcatcatattccaccaaaggtttgataactgtgcccaaaggtgctgcttcgggtgtcaccaatcccatgtctttggagtgcttggacttatgccgcttgtgcttcgaccccaagcggtgacgctctctgctgttggagctgccacctcccgatgacggctgcaaagttccagaagctcccccactcccgtccttcttgcccccatgtctctctggattgggcattcccttccccctggcctcaaaaaggggaaaaagttccccagcactccaaaaagtaacccccaccctcccccccagccccacgcctaccaaagcgcccctacaagggggtggggagggaagggacggtagtccaggctcctcctccctcccgtctcctcagcaccctcctacatgaggtgggggtgaaggagccagggaagaaatgagacttcctcagcagtggagttgcgagacaacgagtagctgctcgaatctgtttctcctcctccccacgccgagccaatcctcaggcccagacgccggggaggtcgaagaagtaggaagccgacggctcggtgctgtgtggccgactctggctctggggccctgtgaggactacgcgggcccttcccctacccggtagcccggctcggggcggcttcctgtcgctggggtcccgcggcttaggtgcctcacgccccctttgtccctcgctcctgagagagtctcttttctagctt

SEQ ID NO: 125 - DNA, 39218 bp, Hippotragus equinus
  source 1..39218: mol_type = genomic DNA
tgataattgtgtaaagaaatggacggagacggtgaaatgatcttgacagacagaagcttcaaagtgtgtaggtgtaagagccccaaaaaggggttggcttatttctttttttctcttttggtttcaaagcagaaatgtggatgttctttctgctgtgtctctgtcctcagcttacctcacatttccctcttctcttactattttgatgctatttgatattacaggtagatattttccctgaggtcacctcctttgcttacttgtcatttgtctttctacaacaggagttccatcatcttcctctgaagacctagccatcttgctccatgaaggtcaggacagtctgacatgcacttgttttcttgcctctttacctgaagagtagtcctcttccattgtgtacatttttttcttaataggggaggggaggggagagccagtaccccccctccccttccctccttaaaccttggggaagtaacccccattgctttcccaagatggcagaccccatcatggatctgtttgatgacccaaatttatttggcctggactctctgactgatgacagcttcaatcaggtcacacaagaccctattgaagaagcccttggactgccaagctctctggactccttggatcagatgaaccaggatggtggaggtggtgatgtggcgaattcatcagcaaatgacttggtccccccaccagaggaaacagcccccacagaacttcccaaagaatcaacagctccagctccagaatctttaaccttgcatgattataccactcagcccgtcagccaagagcagccagcccaacctgtcttacagacagcaacgccaacatcaggacttttgcaggtctccaagagccaggagatcctgagccaagggaatcctttcatgggtgtctctgccacagctgtctcctccagtagtgctggaggacaaccacctcagtccgcccctaagattgttatccttaaagccccaccaagctcctcagtcactggtgcccatgtggcacaaattcaggcccaaggtatcaccagcacagctcagcccctcgtggctggcacagccaatggtggaaaagtcacttttaccaaagtgctaaccggcactccccttcgacctggtgtttccattgtctctggtaatacagtgttggccgccaaggtccctgggaaccaggctactgttcagcgcattgtccagcccagccgaccagtaaagcagctggtcctacagccagttaagggttcagctcctgctggaaaccctggggccacagggcccccactgaagcctgcagttacactgacctctacacccacccaggtgacttgagtgaaagggggaggtgaattttggtttaatagcgggcccagcaactgtgtgagagcaagcacatgagagctgtctctaggaaatctgcttaaattccgtctttactttttatcagttagtgttgatagccacgttatttgttacttacaaggtgaaagcagttagtgttaatgcattttttgagctcttactacatatttacactgtgcctagctggtgctgaacaagatagacacagtccctgtccttacagagctcaccatctgccaggaaatacagactttaaggaagaactcacagtggtggatgatacaaagttatacgagtactataggatacaatgggaacaaagaatcatttttgaaaaatatgtgtatttatatttgcaagacttacagaaactatgtgtatctttcctgttcttactaagattgtcctcctccagctttgcccagtgaaaagacttgtttcttttataagaaaataaagactctagcctctgaatcaagggccagaagaatttggaggaggggaagacagtgttcagataagtagggctggtgaagagaagctctgaggaggtggattttagttcattgtaaagacttttattctaataggtttccaaaaaatggaatgactgccttagaaaatagcaaacctttcagcagtttttcaagaatagacttggtacccactgggcagaggttatagaaaagatttatcaggacagataggaagatgaacaaaggggattgtactgtcttttctgaccctcagtttttataattccaggatgaggaaaactggtgtaaatactaagaggtctacccttctttaatgtcctacctctcttggaatttcctgtcttcactctagggtgaatcgaaacgcatcacactggtcctccagcagccacagtctggaggtccccaaggacaccggcatgtcgtgctagggagtctaccaggcaagatagtgttacagggcaaccagctagcagccctgactcaagccaagaatgcccaggggcagcctgccaaagtagtaaccatacagctgcaggtgcagcaaccacagcagaaaatccagattgtaccacagcctccatcatcgcagccacaaccccagcagccaccctccacccagccagtgactctctcttctgtgcagcaggctcagataatgggaccaggacaggccccaggacagagactttcagtacccctcaaggtggtacttcagccacaggtgagactcaacatgttgagctaagaaggcaaacacgctcttagtcccctgatgttatcctcagcaaccactcactgttgaatgtggggccggtctagattcatatctctgaagtgagatacaggcttttctttctttcacccatgggaaccttattttaattatatcatgaaaagatttgagggttattgttgggtttgggataagagatgatttgtctagtatttgtctttaaattgttttatttacaatctttcctgatatccttgtgaaatgaaaatgactgaaaataacccctcatctgaaagataaatagtcttgaagaggtcaagtgcttatctatcattcctccccctatccccaccccaccccccaccacccccaggaagataaaggtaggacaagaatggaatttgaattttcttactagcctagacactagtgttgtctgtattgtttggaaattttattgtggagatgagtattgacattagaagcatggctaaagaatatagaaggttaatttggcacaattgccttttctcatccccatcccaccaaaaaattactttaaaaaaaagcgtgcctctagattcagtaatgagtcttattcttaaggaattaagagaactaacgtttccagcctgtgtgctttagggctgttttattcaggtggtttagctataagcatgttgaaattgtagtgtctttatttctataggccggctcttcccaaggggcctcctctgggctctccgtagttaaagttctcagtgccagtgaagtggcagctctgtcctcaccagcaagtgctgctccccatactgggggcaagacaggaatcgaggaaaaccgtaggctggaacaccaaaagaagcaagagaaagcaaaccggattgtagcagaggccattgcgagggcccgtgctcggggcgaacagaacatacctcgagtcctgaatgaggatgagctgcccagtgtccggcctgaggaggaaggggagaagaaacgcaggaagaagagcagtggggagaggctcaaggaagaaaagccgaagaagagcaaaacatctggtacctccaaaaccaagggcaagagtaagctaaagtgagtgccaccgtttgctgttgtgatggggtctttggggagagtgcatacatgtttaaattcctatttttaaattcatgctgtatatagcagctacagagttcaaggggatgtgtcatagaaaataataagtcctttctcttctctgttccaagtgaacatcaaggcctgggaaagacagccagtcttgagttaggagttttgtgtaaaagctgtattcttgattttgtatcactgtagtgtgaaagacttctccctagccccctacaacccacgccggtaaaagagctgctgcagacatagctgccctgttcttgcatttcatatgtgaactggagaagatttcagcagccactgtcagccttaagcagtcttgacagagccacagcttgtcacataactcttgccacaattgagtgtgctctcttccttccatgtcttgtaacttcactcctttctcgctagcttctactccctgagatgcttcaggctttgtggtgtaattataataatgctttatatttgtacagggttttttagcttaaaaaagcaagtttcatgtctgttattttacttgatcttcaacagctatcacgctaggttttatcatcagtgtttgctagttagaagacttaacgccgagctagtgagagaactggaactgaaatgaggccttgtaactcttagtcaggaattggttctgctgtgttatgctgccttcattcaggtattcgtgaatacagtggtagcaaaaatttgtcaaatctggtgtaaaagccagctggtagtttagagatccccaaatcttttttttcaaacaccctactcaatagttatgtgtccccagactgaatatctagagcattggagaaggaaatggcagcccactccaagcctggtgagctgccgtctaaggggtcgcacagagttggacacgactaaagtgacttagcagcagcagcagcatgcctggaggtttcatatgtgataggttagattaattgtattttctattcctaaattttccttgccttcactgtaactgaatttggtttttcctttttagcaccatcactcctgtggtgggtaagaagagaaaacgtaatacctcatctgataattcagatgtagaagtcatgcccgcacaatcaccccgggaagatgaagaaagcagcattcaggtaaaagaatccctaaaaaacttcatgaaaagatcctgtttacttctttacaggcagaccaggaatagatagtgagagaccataagactatgcatatttcaacagcttttctaaaccagaggtaggcaaaaaaaagtaaaagaggcaaaacctggtcatggtcgtggcttaaattttatttatttatgtttttaaggcaaaacgtgtattactctaaaaatgcatattactctacagtagtcattttctcaaattccagtgtttcagagactaagcagatatgcaattatgctgcaattgttgttttgggtatgttagtactttggtctttcttagaacagtccggctatcccttgtgcattacttacacttcagggttttgactctgtgaactggggagcttaaggcgcagtgtttttgctaccttttaaagatgagaaacattgggaagagaataaaaaaagctggatcaaaagaactttagtcctctgtctctgtggccttatggtaccatctttgactttagtttccaaccatggaaagaagaagctattaatgattcaggatacccatagtacttctgagtagctctaatgggtctggctagtttacttagctatatctaaattccttatctgaaagtggaggtttggactaaacaaacctcaggtccctcactagctatcaatactttataaatgtctcccctcttctttaatatatatttactgcattgacaaactgagacttgagtttttctgggggatattaacgtgaggataggacagacatttttgaaatggagagtgaagcaaaagctagatttaacagacattaaagtatattatgcaattataattaccaagagtttaaagaagaaatagcagagtgaaaaataacagtctagaaacagatccagataattttgagacattagaatgtgaattaaaaggccatttaaaatcagtggagagaattgcatggtggtccagtggttagaaccccacactttgattgctgagggcccggggctcaatccctggtcagggaactaggatactgcaagccaccaaggatggtgcagccaaaaaaaaaagaaagaaaaacgataataaaatcaatggaaagaaagattatttaacacattatgttaggatgactactcatttaggaagaaataaaactggatttcttacattactctttaagaaaaacaaattctagtttaatcaaaggtcaaaatgtaaaaattgaaatcatggacctttataaaacgtgattgagttaaggagggtattaaaatttccaagtcataaagggagagattgatatatttactatataaaaactatgtatatgtagcaacaacgaaaaatgctctaaatagcatagtgtttaagaccaagaccatttcttgggttctcatgttaactctagtatttgctaatattgtcacttaaggcaagtttacttgaccttgtggtgtctcaatttcttcatctctaaagtacagatagtaatatctactaagtagagttgttaggattaaatgtaaatgtttacaaaccatatagaagagtgtttaggtaagagagcacagtaagagttagatatgtttgttaaataaacagttaaataaagtgttatataatcaaaacaccaagtgagtatggcagaaactatcacagcatttaaagtaactatcctccaattaaaaataaaattaaaacacaaactgtaggcaaatctttgtaatacaagaaatacaagaattaataaaatttaaaaagtggtatattaatttgctagggttaccataacaaaataccacggactagatagtttaaacaacagaaatttattttcttacaggtctgaaggctagaagtgcaagatcaggaggtctggttacctccgaggcctctctccgtggcttgcagaggccgcctcctcactgcccccgcatgatctttgctcagtgcgtgcgtccctgttgtctttgcgtgtggccagattccctcctcttttaagggccctgatccagtagtgcccaccccaacttaatcacctctttaaggccctgtctccagacagtcacattctgaggtactagggggttaggattttaatgtcagaatttgaggaaacacaattaattgacctaattgtgtttcctcaaataccagtcttggcagtggaggcctcataattccacttccactcaatgttagtattccatacctattcttctgtactgtgcttttttctctaacagtatatcttgaatatagttctttattagaaaagataaatctaacccattcttcctcacactctttttttattatgaaaaatttgaaatatacaccaaagtagagaaattatttaatgaagccccacgttccatcatcccagaaggttccctggtaccctcttttctgtcagttcaccatcctctccccaccatctccccataagcaacaattgtgctcatttctgttaaccatagattaaacttagcctgttcttaaacttcatgtaaatggaatcacatagtatatactcttgggtctcacttttttcagcatagtggtgttcagaattattcatgttgatgtatcagaagttcattccttttttttttcttgagaaacattttactttaggaatataccacagtgtttattcattctgttagacatttggtttcttcagtttggagctgttttgagtaaggatgcagtggacagtcttagtacacatgctttgtggacataggttttcatttctcatagctaaatagccaggagttgatagactatggggtagttaaacatttgaccttttaaccttataagaatctgctgccttctgaagtgattgtcattttacacatggaccagcagtgagagttccagctcctcatcttcactgttcattcttgtccgtctaccccattctttttatatagttctatagtgttcctttttttgactgtagcatgatttgttcaatccagcccctgttggtgggcatttaggttttctctgctcttttaccaccacagataatgctgacagagatttgctattctttgttgttgttgtttagttgctaagttgcgtttgactcttttgtggccccatggactgccaggctcctctgtccgtgggatttcccaggcaaaaatacgggagtgggttgccgtttccttctccagggaaccttcctaactaagggattgaacccacgtctcctgcattggcaggcaggttctttaaccagtaagccaccagagaagcccacagagatttgtatacatgtacagatttatctgtaggataatatctttgaaatggaattgttgggtcaatggatattgtcaaattttgttatatagaaattttcttcatgccagtgtgtactctcaccagcagtgtatgagttcctatttcaaatatttgatcaaactcagatttttgcctctcggttagatgcaaaaaaaaaaaaagttttcagttataacaattttattgtgaatgtgagcatcattttacattgaaagccattcatgtttttttcctacaaaaattgtctattcatgttatttgctcatatttctattgtattgattttttttcttagttataagatcaaattgataagtcactttatcagaaatacctttcctactccaggattatttaaagaaaaaaattcttccacatcttttagaaattttgcctttttttaaactttgaaattattcaatctttttataaatttgtttcttatatcctctagatataagaaacaaatttgttttgtttggctagtggtctgttttcaatctcatttatagaataatccactttttcctcactgattaaaaatactatttttatcatgttctaaatccacctaagtattttaatctatatttggacactatttcattgatctgtttatctcctcctggagagataccaagctgtgttaatccttatagctttatactggctttaacattggataaggccaagtacaccttttcatatttttatggttattcttagatgtttagttctctgttgaattttagaatcagcttatctaatttaaaacttctgttaaatttgttttttaaatttttgtgattgaggaggttataaatatttcattatttcttactaaatttaatacttaagatgatcttttttcataaaaagacttttcttttattgtgttttctggcttagtctatgtaagaatgccattgattttttaaaattaactttatgccaagcaaatttatcaaatcaattttagtacaattgattgtactaaattgtactactaactactaaaattgaatttagaaatcaaatctgcttctaatgactcatttggttttggatattccaggggttataatcattactgaaaaataattttttctctccatccttcctaatttttatcatgagctgtacctattactgagattatttaattaaattttgctcaaccacttgaaagaatgaggtagatctgaaattcattgatatggaaaacatctccaagaaaaatgttaacaaaaagtaagcagcagaacagtatgtgcagtatgatcctatttgttaaacaaacaaaactttagaactaaaacagacaaacagttagaaacaatgtttttgtaccagtggactccaaggttgctcctggtgtgaagttcattgcaccctgcaggtagagagtttaaagagttctattttagtttttcagagcctcttgccaatagtacccaggttactttcagatggattctgatactataatgaaagaattcaggaaattaatatttattcagtacatagaatacgttacatggtttaatatcatacaatttgataaataagctctttaccatcttttggtttgatttttcctagggaatttggagtcaaatctaagtacatgactatagtcaaatagttttaaaggttttctgtttgagagacctaagcagttattttgactgtttttgcccctgtagaagagacgctcgaatcgccaagttaagcggaaaaaatatacagaggatctggatataaagatcacagacgatgaagaagaagaagaagtggatgtaactggtccaatcaaaactgagcctatccttcctgagccagtgcaggaaccagatggcgagactttgccttccatgcagttctttgtggtaagctgagaactaagcaatttgagatgtgtgtcttgctgctcacaatctctttgtttgactgactgcatcttttcctgcaggagaatcccagtgaagaagatgctgccattgtggacaaagtgctttctatgcgtattgtgaagaaggaggtgaggcctattttccatgttagcccataattctatagttacagactttatgtaatgagcaccttcggatgtcagtctatatcgctacaatgtagttacaagagatagcggagaaaagttaggtggaaagtaaggactgtcttattgccccttctttcacttacctgcttaagtccagaaagggcttattttctccagctatcaggcttctagtattgaaatgccagattaggttctttaatcctttagtcagtgatatatcctggatgatatatattttattcttggtatggaagtctaccacgtgtattaaaattaaggagtctctttgacagataagttgttaataactgtaatttttttcttcccagcttccttctggacagtatactgaagcagaagaattctttgtcaagtacaagaactagtacgtgatctgtacaaaaagcttttcaccccaaattccacggggttgtaataagttctcctgtatagtctgtcctggttgggaaagtgtcccttttttaaaaaaatagttttcctcacccaaattgtttccagtgaggaaaatgtctgttcagagagaggctcagaaattgactgattaatatttgcctacagaaaagtggggtaagggtggttcctgataaaattccttgtaatcctgacattaagaccttgctactcagtgtgatccattgaccagcagaattagcatcatttgggtgcctgctagaaatgtgagctttcgggaggtgggagaggggttcaggatggggaacacaggtacacacttggtggattcatgttgatgtatggtaaaaccaatacaatattgtaaagtaattagcctccaattaaaatagataaatttatattaaaaaaaaagaaatgtgaactttcaagccaaccctaaactaagtggttggtgtacaaaatcaagtttaagaggcactgatctaagagactatctccccactgaagcaacatactcttaggtctgcttttggctactatcctcatctcggacactagcttaccagttccactttctcataccatggctgacgatttccatctcctttagctcctatctgcactgtgaatgggctaccatctcccagctggagaaggataagaggatccatcaaaaactaaagcgcttcaaaacaaaaatggctcagatgagacacttcttccatgaggtaattagggataggtattgcttatcatttatttcataaaagcataaatttctgaggttatccctgactgattgttcaaaagacttatagtttagttgctttatatatatgggtatgtaagtttcatttcgatcattggactctccttatttaattgccctatgctttgttttactaggtctaaatatggtctttttataagttatagaatgttttgaaattgagttgtttgatatcatgaagtattttcaaaacggatgattaactctctggtccacttcaggcattcttctccctctattgtcagtctttagcaactgatggtatctgtagacataagcaaccatgtcattaagagggagcatttattttctcaagtttctaatccagtataactaaaaatagtgataaaggaactttaatatcttacatttggtgttactactagttaagtactggagcatctgtgagaatctcttgagctgtattttaacactttatttttctttgaaaactttttgtacatatatcttttccaaaatgggatttttaaaatctgtatttaatatataatactaagtgccttgagaaaaagaattctttttcaaagtttcttaagacctaaagaggaagaggtctaataagaagactgaaagaaggaataatgtatagcttcagcaaaaaaaggccagttgtggccatattcatctgatgaagctatctttatatcaccagatttatcaataagtgagttattttccacatcacttggagagagcaagtaggaccatgtaggttttataatttctttttatatgaaaataaaataatgattgggttgtggaggttttgttttgggttgttgttttggcctatgttcttttaaagcctaatttgtgaaatgtacagtgaaactgtaatcccatttcagctgatactatatatataatttgtggccattgagccaagctctgctaactgacttgtgtgccagtcagatttgcctttataggtaggtcatttagccaaatcaatcactcatttattcattattttatgtgctagtcactgcggttaacagatcactcatggtctgtgttcttatatagctcactgtctaatggggagggagagagagattttaaaataattcaaattgtgataagtaccagcaaagaaggagcataggaagacattaaaaaatgcttgctttggataatccgggaaggcgtcactgagaattgaattatgaatagaagttagcaaggccataaacacctgtaaatagtacccctggcacaggaagtagcagtatatgaagaccccgagacaggatgaggaactgaaagcacaatggtatttatgtatgatagaagcaggtgcccacagaccttttagttttgtttttattctaagtgcaaaaggggaaaccactggactatttaaaacaggccagagacataaaccagttttcacctttaaaagatcatctagactttggagaatggatgggagaagagtaagcatgaaagtaggatgagccgtaaggaggccattgaagttttctagatgagaaattaccaatgctttatagcagagtgctttcagttgttggagagaagggatagatttgagtttactttaaagtagaattgacggcaattggtgtaatggcttacatagacggtattaaagaatggaagatcttagaagcaactggtttggggaaaatcaagattttagtttagaccatgttaagtttaaaattccataacatggctagcaaggagatagatacacaaaactggattttttaggctacaattaaaatttggaatgtatcagcatatacatagttactaaagccttaatgactatgccagagtgataggagaaatattagggaaaagataggccacaaaaatcaatgggaaagtgccataagaaagaagaatttttttcccctaaagtttctttgagatttctctttggagccttgggttatttatcttggcatatcacccaaagttagataccagtgacttagggaaaaaagccagtgaacgtgactgagaattgaccaaaacaaaaagtgaatccaaaataaggctataaaagtgaatatggtgtctcagaaaagcctagagggtgctttcgggagaaagatgaattgttgaatactttatagctataaattaaggtaagtacagaaatgtttccattgtatttggcaatttggagatcatgaatgaccttgatgagtggtttcattatgtgatggaagtagaagagtggaatggatggacaaatagagaagtgatgaaatggaggtactgtgtatttaaaactcttgggaaagtttacatatgaagcagaacagaagaatagttgcggggggatgtagagtttttaagatgtgaactagtagaacatgtgtgtatattatgggaatgttgcactagagagggattcctaagaaggcaggaaggaatgaaatccaaagcatatatggagagagtagccactgttaggagtagtcacacttgatctggtaacatgagaagataggtgcaaacacaggtaagtgtgtaggatttgatagggtgaaaatggggaactcccttcttttttcttaataaattttgaagtaaggatatccactaaaggttgggtggaagggtgaatttcctagacagtgatctttttggttttattgtttggtttcataattcctctaggatgaagagcccttcaatccagactatgtagaggtggataggatattggatgagtctcacagtattgacaaggacaatggggaggtgagttgggatgtggaggaacatggaaggccttaaagatttctgcctgtctgcttgcccatcctttatttttcagatttggctgaaacattcttggattgaaaaggtacttttgaatttttttctgagagaacctcagaatgatattgggaaggtagaggagcacagagagaggctaaagagaaagattctcttgaagtcagatatctggaaggtgtatttgcaaggactcattcaccttgatctcattttctctcaggttttatataagagacccttgacattcagttgagggtgagaggtggggatagagaaaggaatactttatcaatttccaaatatatgaatataaaaatacttgcatagactcatagctttctctaagttgttgagaattatttatttcctgaactggggcttccccagtggctcagtggtaaagaatctgcctgtggtgcagaagccacaggagacacgggttctatccctgggtctggaagatcccctggaggaggaaatggcaatccactccagtattcttgcctgggaaatccagtggacagaggatcctggcgggctccagtcgataaggtcacaaagagtcagacacgactgaagcgactgcgcacacatgcacagcatcaggtaaatgcatttccatttgtcactaaaacacatactacatttgagtcaggacttctaaacagactgtgggctcttgctcccacaagtgcagatttagtacatctaagggaggaccgagagatctgtatttttaagttggttcttcgaggggttctcatgcatagcttggtttagggaccccagaactaaagcttccttagattgggtagcagattttacatatgttgaaacatttggtgacatgttttctttcattaatcactttttttcattttccaaccaagagttatgtagatctaagccacgagtgaattcaacgttgctctcttttattcagatttacttggaccgtgaatcagcactttgttagaactcttttcacttctagtctgagttgttagtttaacatcacaggatcacatttcatcaaaattttatcactcaaacagttcctgcttacagagtgactagtagggaacagcagagccttgttaagacatcagtgctagatggcagactgcgttcactcacaaagtgacttgctcccatatgacatccttgtagaaccttatagaacctaagagtcaaagtcttccatctgttaaagcccaagtttgttttataagctttcaaggttactcagatagaaccttagctatccaaagtcattagaacacaatgtctttaaatcctaacaaaaatacctcagaaaccacatatttctgcttttgcgcttaggggtgggaattattgcttattgtttatttgtgggaggtgagagtgaaatggaccagttattagtcaggacaggttagccattgttatattattctcattactttcaggttctcagccttcctagccttaaaaatgttatgctctttatcactatacttgtactttcatcttccaaaagtaattagattttgattaggcccctctggaatgttattagacctggcatgacagatgaaagtgttttagtaccctaatttacacttctaatattggataaaaactttgcccatttccactgtcccaaaatgagcttaattagtcatccttattacattacacagtagtggaaataagtattacaataaatattaattgaagtccttggaaaattagttatgatgctggaaatgtgtgacctggacaaatgtctttatgtaggaagtgacccgagttactacaataaagaagaaaataaaagagaaattacatagattctagtttttccatgatctgtgtctcttaaacacatcgatcttaagacttcttgctggctattttaaggagtattttatcagtagattattagagatttcttgatgattatactcagttcagttcagtcgctcagtcatgtccaactctttgcaaccccatgaatcgcagcacgccaggcctccctatccatcaccaactcacggagttcacccaaactcatgggcatcgagtcagtgatgccatccagccatctcatcctctgtcgtccccttctcctcctgcccccaatccctcccagcatcagggtcttttccagtgagtcatctcttctcatgaggtggccaaagtataggagtctcagcctcagcatcagtccttccagtgaacacccaggactggtctcctttagaatggactggttggatctccttgcagtccaagggactctcaagagtcttctccaacaccacagttcaaaagcatcaactctttggcactcaggtttcttcacagtccaactctcacatccatacatgaccactggaaaaaccatagccttgactagacggacctttgttggcaaagtaatatctctgctttttaataggctatctaggttggtcataactttccttccaaggagcaagcatcttttaatttcatggctgcagtcaccatccgcagtgattttggagcccccaaaaataaagtctgacactgtttctactgtttccccatctatttcccatgaagtgatgggaccagatgccataatctttgttttctgaatgttgagctttaagccaactttttcactctccactttcactttcatcaagaggctttttagtttttcttcactttctgccataagggtggtgtcatctgcatatctgaggttattgctatttctcccggcagtcttgattccagcttgtgcttcttccagcccagcatttctcatgatgtagtctgcatagaagttaaataagcagggcgacaatatacagccttgacgtactccttttcctttttggaaccagtctgttgttccatgtccggttctaactgttgcttcctgacctgcatataggtttctcaagaggcaggtcaggtggtctgctattcccatctctttcagaattttccacagtttattgtgatccacacagctaaaggctttggcatagtcagtaaagcagaaatagatgtttttctggaactagcttgccttttcgatgatccagcagatgttggcaatttgatctctggttcctctgccttttctaaaaccagcttgaacatctgaaagttcatggttcacatattgctgaagcctggcttggagaattttgagcattactttactagcgtgtgagatgagtgcaattgtttggtagtttgagcattctttggcattgcctttctttgggattggaatgaaaactgaccttttccagtctgttgttgctgctgctaaggcgcttcagtcgtgtccgactctgtgtgaccccgtagatggcagcccatgaggctcccctgtctctgggattctccaggcaagaacactggagtgggttgccatttccttctccagtgcatgaacgtgaaaagcgaaagtgaagtcgctcagtcgtgtccgactcttagcgaccccatggactgcggcccatcaggctcctccgtccatggggttttccaggcaggattgctggagtggggtgccattgcctcttctgcttccagtctaggcctagtctaattcttcatataagccccaaattaaaatgcagtcaagtcaggagtcatcttaagtactgagaataggagcaatattaccactggaatgcctgcatagagcatagcagtgtgattggagcttcagcatccccttttcactcttacctcttttcagtgataccccttgtagttatctcctagcttcctgggactcacaaggaaatctctttcccaccatatgactgctcttttttttcatgtgactgctctttgaagtagcacctgcattcagagctccaggaactcagaagcccagtaatttcagccctgctttgttctgtggatttaacctgtttctcacttgtaaaagcagccttgcttccactattattatattaggtgccaggaggatagtatggaatggggctgccatatcttctaatttcaatctaattcaacacaatatagaatttttttttttttttgatctgcttggttggtgagcctaatatttcagtgattagtgttctagataatgctgggtagaaatttctcttttagattctgataatttgtctggaagcatgatcaaaggcacaaatagtacagtgcatctgcaggtgagcctatggctggtgttttcagtctgatattttgggcacctttttaggtattgacacttagttaaattcttaatcttcaaatcacagcagagaacacggcatcatttcactaaagctctgacttcttctcctctagcctgtaatttactacctggtgaaatggtgctctctaccctacgaggatagtacgtgggagctcaaagaggatgttgatgagggcaagattcgagaatttaaacgcatccagtcaaggcacccggaactcaaaagggtggtaagtacatctgcatttagagtgtaaagtccatatagggaatgatttaatttccttcatatagagtttgggctttcctgatagctcagttggtaaagaatcagcctgcaattcaggagaccccagtttgattcctaggttgggaagatccactggagaagggatgggctacccactccagtattcttggacttccttggtggctcagtgggttttctgtcttttttttgttatgaaagtgtcattgtgaagtcatgaatttgaatatatttaacatgtttaatccaagcaataatgtctttgaattgacttcacctattagaactacgtagtaagtttacctggcaccccactccagtactcttgcctggaaagtcccatggatggaggagcctggtgggctacagtccatgggatcactaagagtcggacacggctgagcaacttcactttcacttttcactttcatgcattggagaaggaaatggcaacccactccagtgttcttgcctggagaatcccagggacgggggagcctggtgggctgccatctatggggttgcacagagtcggacacgactgaagcgacttagcagcagcagcagcagtaaatttacctaatttcattagtacctccgcaccatttattcaaattccttactttttagaatcgtccacaggcaagtgcctggaagaagttggagttgtcacatgagtataaaaacagaaaccagttacgggaatatcagttggaaggggtcaactggctgctctttaattggtataacaggtaaggaaaagagtaggaccacaagatacaggcttagtctggaattatttttatttattttctgtagaaacaggttcattttatgtacttttttataagatggtctcttttgacatgcttttcttttttttgtgatgaattggcaggcagaactgcattctggctgatgagatgggattgggcaaaaccattcagtccattgccttcttgcaggaagtatataatgtgggcatccatggccctttcctagtcattgccccactgtccacaattactaactgggagcgggaattcaacacatggacagagatgaacactattgtgtaccatggcagcctggccagccggcagatgatacagcaatatgaaatgtactgcaaagactcacgggtgagtttcctataatgcaaatgttacggcttagagagtaggtcaaagtacctggtattttagaagcttttatatgagtcaaagacttttattgagactctctgtgatgtaaggtggtgttgtctactttatgcaggatacttttccaactttgctattttgatccagtgaacattttgatccagtggaaattctgactttatttatgaatatatacattttaaatagttttaccaggattgattagttttcatcaagaaataattttccagaatgaaattcatttagctacttttaattccttgattcataaaatggtgaacataagacatttcttccttttttttttaagtctgctgaagttttcatcaagattagttcttttttctatataagtttggaaaaggtttcttaacattgaattttgagtttttttcctaccattagtttcccatttttatttctacgaaacccaagtttattcaagtcattttgtggctcttaattttgttaagataattggattcttttgtccatttttagatagtaaccaatattaccacatactacattagctgtttcacttttagttttatcttgtgtgtttcagcagtgctcaacatttgtggattttagtgtttaccaacagaagatgtagggctgaaatacatgaggtaggcatgcagcaaagtcaagaatgtccagcttctttcagtaaggtctgtgattttcccaagaagctgagtgtgttgaagaggcagtgattcagtgatttgacactgtttatcaggaatatgaacagtggcagaggtgggtggtggtgcaatttgtgttttctattaggcctgcctaaatataaaatgcagaatatatagtccagaagagcttctcatttaagtacattttaggccttttctgactttgttgccttcatgcttaggggcgcctcatcccaggtgcatacaagtttgatgccttgatcaccacttttgagatgattttgtcagactgtcctgagcttcgtgagattgaatggcggtgtgtcatcattgatgaggcccatcgactaaagaaccgtaattgcaaactgcttgatagtctcaagcacatggacctggtgagttcctcccactgacttgtggccagaaacacctagaattaagtaatcttaattccatgtgaattaattttacagagaagaatcagaatcttggtattgagtggtgggtgtggcctatggggatggtagcctgaaagtcataaaattcatataaattttagagttagaagatgattgtgggttagtggttctcaattgggtgaagaggtgagatgttaaattagttacctatttctccataacaaaatatccaaaaacctagtgacttaaaacaactatgtttttcatgactctctagctcagcaacttgggctgggctaagtgatctcattctttcagtggccttgccaggagtcagtgatacaactgcagctgacagttggtactggttgttggctaggccatcttccatgtggtctgtcacccctctgtgggccagactttgcttctgtacctggtagagtcagagcagtgttccaagagggtaaaggtggaaggcaaggcctttgaggctctgaaactcacatggtacccacttctgctacattctcattgtcagagcaagttataaagcacgaccatgttcaagtggtgaatcttgataggaggaactaccaaaaatcaatggccatatttagtcccgcacaggtacatttcttagaggcagatatattaatggatatccgtgggaacttgagtgtggagaggcatatttaattggaaaaaatatgttctaaatatttctttattgccgtatgatattaaagaaattaatatgttaaataatatcaagaatattcttgagtattttgtgtttatcaaaagaggcagcaagtaaaagtaatctggtccatttccataattttacagttaaagaaatggaaactaaagttacatacttgatggaaaacttcagaagtctttctgagttttatctttcttctgtgttctccatttctaggagcacaaagtgctgctcacaggaacaccattgcaaaatactgtggaggaactgtttagcttgcttcatttcttggaaccatcacagtttccatcagaatcagaattcctcaaagattttggggatctcaaaacagaagaacaggtaggaagttgtctgatgcgatattaatgcagaataaaaaaatttgtactagggaagatatctactgtcactgatatccatgtttccatctaatgtgacaacgtttgtcctcatgttgttattttttcctctgttggttacaggttcaaaagctacaggccattctcaaaccaatgatgctgagaagactcaaagaagatgttgaaaagaacctggcacccaaacaggagaccattattgaagtagagctaaccaatattcagaagaaatactaccgggctattttggagaaaaatttctcctttctttccaaaggggcaggtcatactaacatgccgaatctactcaacacaatgatggagttgcggaaatgctgcaaccacccatatctcatcaatggtgagagaactcctgaaacacctgcatttctgtgttaccttgattactaaatggtgttcctcagaaacaatagatgggttggctgatccatcctagtttggaaatagaggggatttctctttttaaaaccattctcaagtggaacgtcttcctctagttctttctgaccctttgactctgcataatctccaaagttaaaaaggatttgctgttaggaattctgttctgtcttcactgatattctatgttgctgtttctgttttggatggcagtatggtggtaacagtggtccttttccacatatttacatattttactctgatttatgtggaataattcttaagcctgacttatatggaatattttgtattaacaaaattgaggatattttagggtttgggagttgctgaaattctgttttcaaataatattgatatcaagtcaggttattttcttttctttgcttccttatctcagttaaataaactgcagccttagtatgtgtctcgggatctcaccatcaggtctgatttttcttttggcaggtgcagaagaaaaaatcctaacagagtttcgagaagcttgccatatcatacctcatgacttccacttgcaggccatggttcgttcagctggcaaattggttcttattgacaagttacttccgaaacttaaagctggtggccataaggttctgatcttctcccagatggtacgctgcctagatatcctagaggattatctaatccagagaaggtgagaagaaagtcattcctcgcctgtttactttgtacttaaagagctgcaaagaatgggaggcctgggtttaaataaaattgaccaggactgggctaagagaagtattcaaaactctcactctcaactttctgataaaatttttggtgaactagcaatacaggggtactggtattgatcccagcctgcttttttcttctctttttctgctcagctgattaaacttttttcctgtgattcccgtgcaggtacttatatgagcgtattgatgggcgagttagaggcaaccttcggcaagctgctattgaccgttttagcaagcctgactcggaccgatttgtcttcctgctctgcacccgggctggtggacttggcattaatctcacagctgctgatacttgcatcatctttgattcggactggaatccgcaaaatgacctgcaggtagaggaaatcattgtcttagggactaatcacctaacctgagaggttttgcaacaggatcaggttctcttagaaagtcttatcttttcaagagtctggaattgtttagttagttaggtcatcaaactttttctgtacagggcagatagttaatattttaggctgtgcaaatcagtctctgttgtaacggttctcctttgctcttggactacaaaaaacatctgtaagcaaatataaatgaatgggtagagctgtgtttcagcaaaaactttagaaataggtgaccaagatttgctgacacctggtctagatgatgaggcagtaatttcatcttgaaattgactttctgatgttgagttgatctcatggctgctttataaatgtaaatcagtattttgaatgcttctcctccccaccccttctaatgttatctttgcccttccttccatttgttaaaactaggcccaagcacgttgtcatcgaattgggcagagcaaagctgtgaaggtgtaccgtctcatcactcgtaattcttacgagagggagatgtttgataaggctagcctcaagttgggattggataaagctgtgcttcagtccatgagtggtcgggatggcaacattactggagtgagtcttctttttagctgtatttattaataggtcatggtgatgaagggaggcaaaagctattttttgtataggaacctgaccccttgtttggattctcaatgattattctttaaaatataataaaatatcatgatatggttagataatattctctgatttttttttttaacctttctgttggattttgtagatccaacagttctctaagaaggagattgaagatctcttaaggaaaggagcgtatgcagccataatggaggaagatgatgagggctccaagttttgtgaagaggacattgaccagatcttgttaagacgaaccactaccatcaccattgaatctgaaggaaagggttctacctttgccaaggtatgttctgtcagtgctagaggcttttagcacagggagacaggaatctctagaatttaatattttttaaaaatatagtttttttttaatatagttttaaaatatactgatttccctttactcaaaaaagtggtgtagtcaactttagtatttcttcgttcctcattaggcaagctttgtggcttctgaaaataggactgatatttctctggatgacccaaacttttggcaaaagtgggccaaaaaggctgacctggacatggatctactcaatagcaaggtgagcttccttttccttcaaagaagaactatggcaggaaacacattactttctggagtctttacaactgctctgattcttcagtgctgaccttggcttatgatggtatatcacaggccattgtaaaagctttctacatagagggccactaaaaagtacttagataattatcacttaagtttgcttcctgaatccctgtagattatcttgcatgtccaaaaaagaatctatctttgagtatctacagatattacatgcaaggctatttcagtctgattatctttaattcctttcccatgattatattgtgaaaagagttacttctccttctgttctctgcatagaataacttggtgattgacacacctagagtacgaaaacagacccgccacttcagcactctgaaagatgatgacctagtggaattctctgatttggaaagtgaagacgatgagcgaccacgctctcgccgacatgaccgtcatcatacctatgggcgcactgactgttttcgagtggagaagcatctcctggtatatgggtaagaccccatcttgcctcagaggtagtgcattccttcctgatagacatctcgttcgctttttaaattggaaggtatgatcaaagaggggataatgggaaaaaatttattctgttaccatgttttcccaagatcattttgtctcccaccatctgggaagtatgaatttgagggactggggtccctaggaaaatatccatatgattgcatttttctgtagttggggacgatggcgagatattctgtctcatggacgcttcaagcgacggatgactgaaagagatgtggaaacaatttgccgggccatcctcgtgtactgtctcttacactatcgtggggatgaaaatatcaaaggcttcatttgggacttgattagccctgctgaaaatggcaagacaaaagaattgcagaatcattcaggtgattatcaagtctttgctttttgtctttctataggttacctaatccttttcaggtccaagggtttttctcaatccaagtcttcgatgtatccccttccccaggtctgtctatccctgtgcctcgtggacgcaaggggaaaaaagtaaagtcacaaagcacttttgatatccataaggcagattggatccggaaatataaccctgatactctgtttcaagatgagagttataagaagcacttgaaacatcagtgtaacaagtaaggatggaatttagcagactaaaggattttccacctcacgctttctgcactattactgagccagttcttcttctctcccttctagggtgctgttgcgggtacgaatgctatattatctgagacaggaggttattggagaccaggcagagaaggtgttagggggtgcaattgccaggtaaagttatgctttatttttctttatgctatgccttattccagaatagattggtttacttacttcactcttaactatctttcggatacctgataattaaaatctgtatatcaggtcttcagtgctatgcagttggccttttgtatccttgggttttgcatccttttgagccacagttgatcaaatccatggatatcgagggccagctgtatttactgtatgattccatcttatattaggggcctgaacatcagtggattttggtgtctggggtggaacgaatcccttacagatacaaggggacagctgttcttgataccagtggaaggaaataggcagatgtaggactatttaaattaatacagaaaggaagatacctgtaataatctttccaaagattgtttgcttttatttcctgcatcactgtgctgactctgcctcttacacctacagtgagattgacatatggttcccagtagtggatcagctggaggttccaacaacatggtgggacagtgaggctgataagtccctgctcattggagtctttaagcatggtaggtatctgctcttagtctgttcttttcctgttacagagttttgtccacagatgaaatattttgcaaagtacttaagaccaataattatgtttgaatggttaactggttctcagaaatatagagcagagctgttcctatgaatagatggtcaggaaagaccagatggatagttaaatcgcaaggtagggtgtctcccatctgttctgtgattaatcagttactaccagtctgtatgcagtggtgtctaagttaaggtttgcaatcaggggagatgatgcatgtctactgttgttaataataaacatgtttactttgcatagctttgctgtgccttgctgaaaatgttctgtttctatagcatcttgtttgtctaaatattcagcactcactcttacataggtatgaatagccatgcttgagtgaaagaaaaatgaaaaaaaatttttttaggccagtggaaaaaactggcttgaagtagagtagaaaaagggagaagactccctttgcaatcttccctaatcacaaattccacatataaaaagtagtaagggctaacttccagcctattaacttagtgaattggaagattatttcttttttaatatacttttctgtttacttctataaaataaaagtaatggcacttaattcacatttttgacaagtttaattggatgagaaaaactgtgagcatttgtagtattagatttacttgtgaggtgcagaggctttagaagagtccaaatatcctgaagtacattcatcattcatccaccattcagagtacctgtttgcaggtacaaatttcttatcctttatttgaaagtgcattacctaggtctaaattattggactttaaaaagttcctcacctgtgtagtaagaatgatgataaaaaattacccgttaaatggctatgtaaatctgtcaccattctctatacacactgattaaattcctattttcggtaactagtgataaaactctttatgactctgaattggacccaacagctgtccaaagtaacattttcagagtactttacactatgagcaaagtagcccacatttttattccagcagcatatgaagtaagcgtaaaagcaaaatgagtctctgattttctttaaattatggctctttttcttcaaggctatgaaaaatataatactatgagggcagacccagccttatgcttcctggaaaaggctggccgaccagatgacaaagccatcgcagcagaacatcgcgtgttagataatttttctgacatagtggaagggtaagcattgatgtttagttctcttaaagctgtatctgcattacaaaggatatttgttgcttgtgctaagagatgacatgactctagccttgactgaatccattgggattcctaatggtggttatactcacaaatcataaattcttaacaaacagtgcgaccagcagaaaggtccaaaatggtgaaccatacattgtcatacaatgcaactaagggggacaattattcccaaatggcttatttgatcttctcttcagttttctgtgccgtgctttcagctacagtagcggagaggataactgcttctcttgaaagatggtagccctgcaacagtcccataccacctgtgtgatagatcctcaggaaactttagccttggtctgtcattttccagtgtcagctgacacataaaggtgtttactctgcctgagtccatgcctcagtgatgagttgccatgctaatactgagccaccagctagggcagtattgccctggtttgggtgccagtgagtttaacaaaacttctcatgtggagacctgaggggcatgtgaaatatttgacttagttcatgaataccctcccagtcccttattattgaaagatttttcttcagtgatcacagcctcagtttgcctactgtaggacccacaaaggaaattagatttatttattgcaaatcatgtaatatccttttgctcagtagagcaaagtagtaaaaataagcaggcatagatcattcattccagtgaaataataaaagtagatactagttgggacagagggggaaaatgggttaaataataaaaagctattaagaaaaaggaaatgtgctgtttcattttaaaatcaagcagtttagaactcaatttgtcattttctcatacctctggataattttagggttgactttgataaagattgtgaagatcctgaatacaaaccactccagggacccccaaaggaccaagatgatgaggtgaggaattttcatttgagtctagcttttctgtattactaaacagtattttccaattccctgaatcatgaagtatactgattaatttataataaaaaatgaaaagtaccattcaagaatataaagtattaatggaaaggattgtaacaccagctagggggggtcagggatgattttttggaggaggtgggacctactaagctggacaatgaactatattattggactatttaattctcgagtctcactgtcttcaagacattgataagaactaactttgcaggttatactttcttattcttttagttgattgctttcagttttctgtgagggttcctttcattagaaaatatcttgataccttgatgacataaaaggacacacacacgagtgatttgagagtgccaattttacccccttttcctcccctctccatcctgcggggtggatctccttctctagggtgatcccttgatgatgatggatgaggagatctcagtgatagatggagatgaaggtaaatttctaagtcaacttgtatgggttggtggaattgggaaattgaccaaattctctcctttactgggatttctgagagctttgcctttgggtgggttgaaataccactattatctctactatctttcctgtacttgttgtttattctactttgcttcccacagcccaggtgacccaacagccaggccatctattctggcctccaggctctgctttgacggctaggcttcggcgcctagtaacagcctatcagcgcagctataagagagaacagatgaagatagaggctgcagaacgtggggatcggagaaggcgacgttgtgaggcagccttcaagctaaaagaaattgcacggcgggagaaacagcaacggtaaaatgtggctgggaatttggactaagctgtaaacttctcttcaactatgggccctatattgaaaagcatctttggaaggattatggcatccctattggctcagatggtaaagaatctgcttacaatgccggagacctaggtttgatccctgggtcaggaagatcccctggagaagggaatggctacccattccagtattcttgtctggagaattccatggacagaggagcgtggagggctacagtctgtggggttgcaaagagttggacatgactgagcaactaacactttcacttttcacagagggaccacttcttttgcctttgttatacatctgcaacccatacttaacccctataaaaccatacttaacccctgtaaaaccatacttaacccctgtaaaaccatacttaacccctgtaaaaccatacttaaccgtaactcctgggaaagtcttgtacatagtcatcctcatggagttttttgcatcattttcccccttagcttgctaattcttaaattattccttgttataaactacctcttctgctctttgggggctccctgcccgccccccccccacttccctgccaactttcattttttgtgtgttcaaatattccacgctatactaagaagtaaccagtccgtgggttctgatcactattgccttattcgtcttccctttgtagatggacaaggcgtgagcaaactgatttctatcgagtggtttctacctttggtgtggagtatgaccctgataccatgcagttccattgggatcgcttccgtacttttgcccgactggacaaaaaaacagatgaaagccttaccaaatatttccatggctttgtggccatgtgccgccaagtgtgccgccttcccccagcagctggagatggtaagcaagactgaagatcttgagtgagtgggcatggattgtgacagaaccagctctgggttcatttcttcttctacccttatctcttgcagaacccccggaccctaatctgtttattgagcccatcactgaggaaagggcctcacggactctctaccgtattgaattgcttcggcgcttacgggaacaagttttatgccaccctcttttggaagatcggctggcattatgtcagcctccaggtcctgaattgcccaagtggtgggagcccattcggcatgacggggagcttctacgaggggcagcccgccacggggtgagccaaacagactgcaacatcatgcaggacccagacttttctttcctggctgcccgtatgaattatatgcagaaccatcaggcaggagcaccagctccatccctgtcacgctgctctactccactgctccaccagcagtacacctcacgcactgcctcaccactgcccctgcgcccagatgctcctgttgaaaagccacctgaggagacagctgcccaggtccccagtctggagagtctgactttaaagctagagcatgaggtggtggccaggagccgaccaaccccacaagactatgagatgcgagtagccccctctgatactacccctctggtctcccgaagtgttccaccagtcaaactggaggatgaggatgattcagactctgagttggacttgagcaagctgtcaccatcatcctcttcttcctcatcctcatccagctccagctccagcactgatgagagtgaggacgagaaggaagagaagctaagtgagtgcatgtgacaggctgttggccgtcttccccattcccccctctctgcatttcccttcttttctaaatgcattttctaagattccgattttaatttgatagaatatcagaagagatctgttactcttagggcctttatttaaagtctatacaataccattcctatgtaactttattcttccacctttgctcacatgttctgtgtgatcaatccctagctgctgaccagtcctgctcaaagctctatgatgaagagagtctcctgtcccttcctatgtcccaagatggattcccaaatgaagatggagaacaaatgacccctgagcttctgctgctacaagaaagacagagagcttctgagtggcccaaggtaacagcctcattactggacatgttgagtctgaaaatatagcatgatacagccactatggagaatagtatggagattctttaaaaaactaggattaaaactaccatatgacccagcaatcccactactgggcatattctctcaggaaaccataattgaaaaaagacacatgtatcctaatattcattgcagcactacttacaatagctaggacatggaagcaacctagatgtccaccaacagatgaatggataaagacgtgctacgtatatacaatggaatattactcatccataaaaaggaacaagagttcagtcatttctaatgaggtggatgaacctagagcctattgtacaaagtgaactaaatcagagagagaaagacaaataccatatattaacacatatatatggaatctagaaagatggaactaatgaaattatttgcagtgcagcaatgaagacacagacatgaagaacagacttttggtcacaggaagggagagagtgggatgacttgagagactagtgttgaaacactggttaacgtacattactgtaaaatagaaagccagtgggaatttgctgtatgattcaggaaacacaaagccagtgctctgtgacaacctagatgggtagagtggggagggaggtgggagggcaatttaagccggaggggacatatgtctgtggctgattcttgttgatgtatggcagaaaccgtcacaatactataaagtaatttatcctccaatgaaaaataaaattctaaagagagtgacatatacagagaacaagtagatggttctaggtctcttcaattatgtttagtggtacatgttttttcatgaagctcttacctgtcgactttgggttctgatactattacctccctcatttttgacatataatttttacttatcttaatgatggtgcaattacttgtcacaggatcacatgactaattgatttctttttccctcactcaggatcgtgtcctgataaaccgtattgacctcgtctgccaggctgtactctcagggaagtggccttctaatcgccggagccaggaaatggtaacaggaggaattttggggccaggcaaccacttgctggacagtccctcattgactccaggagaatatggtgactctccagtccccacaccacgaagtagcagcgcagcttccatggcagaagaggaagtgtctgcagtcaccacagcagcagctcagttcaccaaacttcgccgaggcatggatgagaaggagtttacggttcagatcaaagatgtaagctgagcatttaggcactgggaagtgaggaaggaggctgtaattcttgttaactagttttatgaacataacattaatattaagctcatttggtcagctaaccttaaaaatgagcagagaaaaaagaaattagagctcacaaagatccgttgaggaaaagtcactgaagtaaaggaagggatcttatgttgacttgtatctcttgtgagtgcttagtcactcagttgtctccgactctttgtgaccccatagactgtagcacgccaggcttctctgtccatggggattctccaggcaggaatactggagtgggttgccatgccctcctccaggggatcttcccaacccagggatcgaacccaggtctcccacattgcaggtggattctttaccatctgagccaccagggaagtcccaagaatactggagtgggtagcctatcccttctacaggggatctttccaacccaggaatcgaaccggggtctcctgcattgtaggcagattctttaccagctgagctaccagggaagcccttgtatctcctagtggctagattaaaagggttcttttgagtgtcttgcttatagaccctagaaacttagtttttaaaaattgaaatcaaattatggaaaagatattaaaatgatactaaagtgttatgggccttattaaaaataaaaagaaattattcctactgaaattaaatcagtattgtttgggaaatggatggaaattttatttttcctgatgctcttccctaatgaaccctagtagatggttattaagtattcaacaagaaaaatgttttagttacataacaggaatatcaggattttgcccctatgatgagttgccatgctaattctgagacaccaggtaggggatttttccctgcattgggtgttactgagataaattctacttctcttaaatcaacctgaggggcactgagtcaagaaatgaagtctttctaaggaaaaatatatgtcttaattgtatttctagtttgcacccattagtcagatggccttccttctcaccatcattgaaccagaggatgacccttacttaattccttctaaagttaatctttgttttaaaaacatgctatgtgacgtcttggatgggtcgggtgtctttctaggaggaaggattgaagttaacattccaaaagcacaagttgatggctaatggagtaatgggagatggacatcctctttttcataagaagaaagggaacagaaagaagctagttgaggtaagtggtagacaaagtctttaacatgatgattagataaaatctttctgttcccagtaactgatgaaggcagttgggattgagggagtagaagatactattttctggctaccattggctctgctccccctccctccctactcataacagtatgtgctcatgggggtggattctgggtttgcagctggaggtggagtgcatggaagagcctaatcaccttgatgtggacctggagacccggatccctgtcatcaataaggtggatggtactttgctcgtgggtgaggatgcccctcgccgggctgaactggagatgtggttacagggtcatccagagtttgctgtcgatccccgatttctagcggtgagtggcagttccatccagctagatttaaagtcattcccttgatatttaagctgtgtgagagggaagaagcatgccatattatgtcattgtttctgcatcggcaaaataagagtaattatactcagtctttctatttcacagagtcgttgtgaggatcaaaataatgttccagtacttgttaaactaaatgctaggcactgagctagatataatcacctaatttttttggagaagtctgcttgatggcagttttccactaggattaatcctttattcacacaataagcattatggtcagaatagacactagtaccttaataattactccagagaagttttattcttttaggataactgcaacttttctcttatagtatatggaggatcgcagaaaacagaaatggcagaggtataaaaaaaacaataaggcagaattgaactgtttgggaatagaaccagtacagacagctaactctagaaatggaaaaaaggtgagtgaaactgagatattaccactctgttcccaggctaggtatgactagagaaattatttaatgttgtttatctttttttcccctgtatgtttgagaaaatttatcctcagttcacaaagaagccataatatttttattgatatttttatggtcctgtagtatcctcatctctagaagagcatgaaattctaaaagctaactttagcacttcaagcatattaaaatgtaagaattagtaagacatgttagaaaattcagtgctttatcctgcttttctatgacttaagggattttgggcaaatccttttaactttttcaatttgtatatcctgaaaaattgaaggtttgggagcagataatctcttaaaagttttatattttagaagtgatttgggaaattctctagcagtccagtggttaggactctgtgctttcactgctgagggcctggggttcagtccctgatgagggaacctgcaaagctgcacagcacagcccccctcaagaagtgatttggaacctattaaaacagccatgttttaataggcttctcaacacagaagatgttgagaatcattaataatatgccagtaatggaaaaagacaggaaatcatgttctatagtttataacaacaattttggtcattatgttattccatgatttgcaagtgtacttatacttttatatggttatagatttggtagattaagaacccataatcctttccatcaaaatataactgcaaaagtttcccttggctatgtttcccttactttggacaatagttgtgtaaatataaacatataaatcagggtttggtaaacatttaaatggattaatactttgtatattcactttaatcattccccttttgattttctatatacatgtgtatgtatgtgtgtatatatatatatatatatatatatatatatataaccacatggtttatcttttaacaaaatttccaaatgaaaaatatccatcatttgcatttaacgaattctgagaacattattttgcccataagatatatttatttgtgaggtgaatttataaggtgtattgtttttatactaggtgaaagttgtttcatacaaatattgttgccatggaagaatgtttttttctctcttatcctccatgggcccaagggtttgataagcagagtggttgatatgggaggctgatggcaagaaggctgataccatctctgtgttgaatttagcattacagagcagccggtaaagaaggctttttctccaggattacctatttttgcctcaagtacttttgctcttctttataatcagttgttaactctaagaaagaaaaagatcatagcaaatcacagaaaattataatgtgattagtacaatattcttattgcagaattgatcatgtatctagcattgtattattattgcatcctaatgtgatttggtgctattatgtgaaagtatgttagttgctcagtcgtatccaattctctttgaccccatggactagcccactaggctcctctgtccatggggtttttccaggcaaaaatactggagtgggttgccattctcttctccgggggttcttcctgacccaggggatcgaacctgggtctcctgcattgcaggcagattatttaccatctgagctaccagggaaaccctggtagttattacagttacattttagaagcctaaaaaattaagtattaagatgtttgtaactgtctgagtttaatcccagtttactcagtattgtacttaggtctagtaatgttccagcttctgtgaacttaaccagaatttattgtgagctcatttacatgaaacaattcaaaattcagcagatatgtaagtttattatagtgaggaaaaaaattagtttagtaaattttctaaggagctatcccgtagtctttttggtgttctatacatctagactcttaatctggtctgtcttgtgtttaccccattctgatgcaataatgaaggataatattgattatgtcagtatggtcgtactgtccttcacatggtaagatcaggtgaacaatccgccatcaggagagcatactgtataagtactgattcattcattgtcttactcaggcttcttattaacaaaaataataagcaattttgaaatggttggctagagtaaaggtatagtgtagtcgtggggaaaaaatcaaagctctggttgagatgagtgtcagtgtcaaatctttgcgtttagcttcaacatcctaatgtttcaacctgctacatccagctttacctccattaccatcaagtctgattggactgtacttactttgcccctcctaaaggtagttcagtgaaaaagcatttgcaagctaggactctgttgacttctattttgttttttcttccatttactatcttctgttccttcttcccagggtcatcatactgaaactgtgttgaaccgggttttgccagggcctattgcaccagacagcagcaagaagcgggcccgtaggacgcgaccagacctttctaagatgatggccctgatgcagggtggaggcactgggtccctgtctctgcataataccttccaacacagcagtagtggcctgcaatctgtgtcatctctgggtcacagcagtgccacttctgcatctttgccttttatgccgtttgtgatgggtggtgcagcatcatcccctcatgtagactccagcaccatgcttcatcaccaccaccaccacccccacccccaccatcaccaccatcaccatccaggcctgagagccactggctacccttcttcaccagccactaccacctctgctactgccttgaggttgccaccactgcaacctgaggaggaggaggacgatgaggatgaagatgatgatgatgatttatctcagggctatgatagctcagaaagggacttctcactcattgatgatcctatgatgccagccaactcagactccagcgaagatgctgatgactgaagacccagcatggtccccattgcttgggtggctgctgtatttcatttactctggcccttggactatggaaaagtgggaggggcaggggagatgtggggagacccaggactccaggaggtgaaaaggaaaaagaacacttgtacctgattgcttccaaatttgagaggattgggtgggtaggggaactcctaaaataatacatgattacttcctcggttctggggaaggaaaggagactagagcagccaacgtgctcacccctccctagacacctccattaaccacagactatgtagcgctggcactagcctctggcagagcctgttcctgaccgaactgtggatacagctggagagtcaggaactgttaccttccttccccttggcattaataaatttaagttaatcctttcccactcttccctcgttctatatttgctcaaacccaatataaatattaccagttgatgttcatgatgggtaatttcaacaccactttct

SEQ ID NO: 126 - DNA, 3157 bp, Hippotragus equinus
  source 1..3157: mol_type = genomic DNA
gtctgacattatccacactgatggtgtgaaatggcaactctgtgtggctgccatttgcatttccttaatggccagcaaagcccaacatctcttcaggtgctcatcagcattttaccttgttcttctttgagataatctattcaacccccttgctcattttgtggacttgtctgccttgtttttcattgactttggggttggggggagccggggttggggggacccaccccgcggcttgcacagtcttgaacctgaaccacggcagtgaaagcgccaaggtcctaaccacctgaacgccaaggaacgtccctcactgacttctgaaatatcactctatggagataaatggacaccccgtcaatttacccattcaaagagaacaactgagaggcgaagctcgctcccatttttgtgcaggcgagcgtcgcggcccagagtctgcactcagcccctcccgtgcccccacaccccagagccgaccgcgtctcttcggtccacagccgccgcggaaaccgcagagctgaaaccgcagagcttcccgcggatgcggagcctgggcctcgcccctccgaccgcggagcaccgagagcagtcctccagcagccctagagcggcccgtggagaagggtagggcgtggcgagcgtcacctctcagtcggttccgggaaccaggccctgcctccggctatttgcggtgctgctccaggctcaggactgggtgtaaggtgcgggctgcggggtgggagagggctgccctgcctgcggaacggcgagcgcccgggaggcaggaagccgatatggcagttcagggcggggacgaaggtcgctgaccgctggtgggacggtggctccgtcgaagcttggaggctgcctcgggggctcttttctccgagcctggaggcagctcacgggcctcccgggagcggagcccgagcggccggcagcggggcagtggacggttgtcctggcacaggccaggccctgagggaaaacccggaattcgggcagtggctggtcgctgacgaccggggtgaggggcgctcggccttcctggagagcgaggtgcgaggaagcctggagagctcccctttcccccgggccgccttgctgaggacggctctgcgaactcatgtgtgctctccttttcctggttctcttccttttctcctcctcacctcatctccgttttcagctgctttctgcctcccctcttgcagggactagagagggctttctgccacatgattccagggcacctcctgtcacactggctgtcatcagtggttcatagcatcagcatctgggaggtggagaccctgtcagtcctaattctctggcccaaagggtgtgggggtcactgggcttctctcacaccccttccaggccggctcgactgagacctcctactaggctgcctgtcaaagagcaggaagcatcgatgtctgctgtgggtcctgccgctgcacacctgcatcgccctggtgacagtcacagtgactatgtgagtttcctgggggcccagttgccccctgaggtggcagcaatgccccagctcctgggcgacttggatagggccacgttcagaaaattgctgaagctggtggtcagcagcctgcagggagaagactgccgggaggctgtgcagcacctcagggctggcaccgacctgcctgaggagcagctgggtgccctgatagctggcacacacaccctgctccagcaggccctccggctgcccccagccagcctgaagcccgacaccttcaagaaccagctccaggagctttgcatcccccaagacctggttgtggacttggccagcgtggtgtttggtagccagcggcctctacttgactctgtggccaggcagcagggggcctggctgccccacgtcgccgactttcggtggagggtggacgtggccatctccaccagcgccttggcccgctccctgcagccgagcgtcctgatgcacctgaagctctcggatgggtccgccctccgctttgaggttcccacggccaaattccaggagctgcggtttgctgtggccctggtcctgaaggagatggccgacctggagaagaggtgcgagcgcaagctgcaggactgagcctctcgccagtgcctctggttgcccaggcggctgtctcagatgggctctccagagcgaagcccgcccttctgagaagggactccagtgagggagtgtaaccatgtctttctctaagtgaagtagacagctgtgtctttccctttttttggaagtaaagcaactgtaaaaaaaaaaaaagtcctcctgggtaggcatcaaaccgcatgcaccctctccacaccctctccacagtggtcagtctgtcttcctgccaggtaagggcacccactgcgctggtgggcccacgtgtggtctggggttcaggccaaggcctttgtgaggacacaggctgttcagcctgccttgtgcagcatccgagctgttgctcctttgctcttggaaaccctatgtttcagggtgcatatttcattccccgtcttaaatccctgaccttaaagcgcattctagtggagggggtgcggggagaaatgtgtaataaaaacaagcagtgtagcttgggagagggtaagcgctgcaggaggtgcagcagcctccagagatgggaggcagggcggtgggatagctgggctgcactttaaatcaggtcttggggtgggtctcctgaggacgtggttcttgagccaacaggaggcagggacactgctcggagggaaagcctgtgggcgcagggctgcagccaagtgggaggagatgagtggaagcgcaggggcaggccgagggcctctctgggaactcggctcaactctgagtgaaatgcgtcgatagacgtgttagaggatcacactggatactgtgttgactgcagagggcaggccgcaggatggggtgaggagtctggagttggtggtggcggcggagaggggagcgggggcctcgcctaggtttcttgcagctgggtggctcaggcagctcagaccgccatagaccaagtggcttgaacaacagaaatgacttgcttgcagttctggaggctggggtcagcgtgccagcagggtcaggtcctggtgaggcctctcccctgacctttagacttgcctctgt

SEQ ID NO: 127 - DNA, 33617 bp, Hippotragus equinus
  source 1..33617: mol_type = genomic DNA
ggcagtctcccttatcacctccttgaaggcaacgcaatagcctagcgccgcttcgcgccgcacagcctgacgggagcctcagcctgcgggcacgggcggcgccctcggcgcgtccctggccacgcccccttcccccgcggggcacgtcgggagagccgagtttaccccctccccctggtcaacgggcgagaagaagaggcatttccggcgtcaagactggtctttgcggaaggggtggggtttcctcgatcccgcccctcacgcccgggggaggccgggccgagagtgacagtcctcgacccacgctaaggcccgcccctgcgccggaaggaagaagagtggggggagggaggtgtcgcactggccgcgggagcagggtcacgtgatgctgctgctggcggggagaagggggcggggccccgggcggaggggcggggcgagtcctcccagcctttcggtcacgcgcggcaggaagtggtgcgcggggaggagtattcacgatggggaccaccctggacattaagattaaaagagcgaacaaggtttatcacgctggggtaagtgggggaatgggcgggcctgcaggttctgtggtctcctcgggtctggcacacttcggagttttcctgggcgggtgcgtccgggtcaggtgggagcagccaggtgcatcctccgccaggtgcgtcccccaccaggtgcgtcttgcctgcgcggctggctgctctgcagcggcgtcccccggggttgccgccgcggttggggggcgtgcagggcgcctgggctgcagcgcgcaacagtctggccccttggacatccagcctggccgggggcttgagctgtgacttagcactgcggtctgaggagctcaaccaccagacgctccgtttctcgcttgtaagaggaatgcaaaggtctagggccagaaagacagatgtaaccttggaagcagaaatacactctgtaggcggtacaaaagttactcgtttctctggttttggggactgaaggaattgcatgttaaaatgcaaattaaaaaaaaaattttaacgatgccatgaacaagttttgtgccatagcctcttaatctcctcgggtgccagtttccttatttgccaaaggagaatgcaaggtttttctccctctaactagggcaatctcaacccttactgtaactaaatcaaaatccataaccctgggaatatacgctgaccggggtttcatacctagagacccctgtgattctggcccctgtgcagccgggttgaaatcgcagccaactctatgagtatgtggaataaaactgagaggagtggttggtcacgtgcatgcagcgagggttcaaaagggatgcttaaagcctttgggggcaagaccattgaggaaactaaatgtttacacagatgcaagacagtttgattatctccagattattaatgacagagggaaaaagctacgtttatagtgcaagaatcggacagtccctgtcctaaccaagacctgtggtgataccaccttaccaccacagttgacgcgctctggcacaataaaagaggattttggtagggagcactgaaggaagatacgactcagctatgtggtgttcctgctgaaaatgcctaacttttcttagttcatagggaaacaggcatgttcacaattgagaaacattctgtgcatttattggcctggattcttcagatatgtcagtgtcattaaaaggtcaggacatttttattttttaagattcaagagatgacagggatgtaacaaccaaatatgatacctaatttttgataaatttgaatatgggctatatgttaaataagagctttaaattcccccagtctgatgttcatattttggttatgtgggcgactgctctacatgctgaagtatttaggagtaaagtgtaataataactaaattttaaatgacctggtcataaattgtgtgtgtgtgtgtgcgcacgcacgtgcatgtggggagaaagaaagcaacagcgccaacatactaacagttgctgactctgcttgaaagccttatgggtctaatttgatgtctttaaaaaaaaagctttattgcaatctaataccataaaattcactcttttcaagtgtataattcagtggttttaatatactcaagagttgtgcaaccatcacacccgtctaatcttagaacatttttatcaccccttccccggaagaaacactgcacccagaatccttccttcctcattccctctccctcttagacccaggcaatcacagacctgttttctgtctcagtgaatttgcctgattaggacatggtcgtgtatataggattgtacaatctgtggtcttttgtgactgacttctttcacttatgagtgaactctgaacacattatgctgctgtagctgatatcagttcctcatttgtttccatggctcagtggtattctgttgtgtggatacgtcacattttatttatccattcatctgttgatggacatttgggttctcactttttgactattatgattaatgctactttgaacagcattaatctaatacaggtttttgtgtgaacatatgttccatttctcttggatatataccttggagtggatttgctgggtaatatgctaaacagtgtcagactttattttggggggctccaaaatcactgcagatggtgactgcagccataaaattaaaagatgcttactccttggaagaaaagttatgaccaacccagatagcatattgaaaagcagagacattactttgccaacaaaggtctatctgtcaaggctatggtttttccattagtcatgtatggatgcgagagttggactgtgaagaaggctgaatgctgaagaattgatgcttttgaactgtggtgttggagaagactcttgcgaatcccttggactgcaaggagatccaaccagtccattctgaaggagatcagccttgggtgttctttggagggaatgatgctgaagctgaaactccagtactttggccacctcatgcgaagagttgactgattggaaaagactctgatgctgggagggactggggacaggaggagaaggggatgacagaggatgagatggctggatggcgtcactgactcaatggacgtgagtctgggtgaactccgggagctggtgatagacagggaggcctggcgtgctgcgattcatggggtcgcaaagagtcggacacgactgagtgactgagcaactgaactgaactgaactgaatgctaactttggctcagtggtaaagaacccacccatcagtgcaagagatgtgggttcagtccctgggtcaggaagatcgatggggaaggaaatgacaacccactccaatcttcttgcctggaaaatctcatggacaggggagcctggtgggctacagttcatggggtcccaaagggttgggcgtgacttagtgactcaacaacgctaactttatattaggtatttaagggccttccaaacagttttctgaagcacctgcatagttttacgttcttaccgttattgtgtgagggtttcagttttctcggtactttgtattttcttaacttttctgtatcttagaaaataccaaaagtaagaattgggaagacttccctggtggtccagctgttaagactttgtgcttccactgtaggagtcaaagattcaatccctggtcagggaactaagatcccgcatactgtacagtgcagtcaaaaggtaaaaaaataaatgaatttgaaaaggggggggtagggccaggcagtatgtacatttagttttaggacttattattttccttcaaaagatgacacattttattctgagatgttacagcagctgggatgttttctgtgttttaaagtatggtagaagcagtaaaagttccgttcagtcgctcagtcgtgtccgactctcttcgacgccatgggctgcagcacgccaggcctccctgtccatcaccagctcctggagttcactcagacttatgtccatggtgtcggtgttgccatccagccatctcttcctctgtcgtccccttctcccgccttcagtcttggcatcagggtcttttccaaggagtcagttcttcgtatcaggtggccaaagtactggagtttcagcttcaggatcggtccttcctatagatggtgtatgcattactaatagcagatgtcaaaaaccaagagatgctgtgaaacggaaattcctcagaatgtgggctcctgagtctgtttctgtgcttttcaggctcttagttattatggaagcgtgtgagaatgattttggttctgtggacactgagagcctaagttatactggggttttaaaattgtcatttaggtggttttcctcgaaaaggatgctcattcaagatggtagtgcttgttcccccgcccccccttccccccacaaatcacagttgaatcatttttttttaatatatatataaacacaggattttacagaaggctgggaagtgaaaagtcgggttcctcctctttccgaccctttttctgtccttggagggacccgttgactctgtgtgtgttcttgcgccagacgttgtctgtgagcaggagtggcacatgtgcgcagactcgcacgcagatgcaaaacgtaacctttttgctgaaccgtgtagcctggctgtgcacgcctttccatatcatcacatcgtcatcagttccttctttttagactgttaaagcagatttattcaacccgtgtctgtggatctcctgatagaggtaaacataccctcacttgtgctccaggggtgcgtctctgtgtaagggagcgcagagggaggtgtagttgtttgtgggtggtggggggcagggcccttctggagcttcattgagaaggtgaggctccaacctagtgttgaaagctaagtgctgggccagggtctccctctacccccccaccccctcagccctatttgtttccagaagaagaaacagacaatagaagcaaagagagcaggatctgggagacactggcaaagccatccaagtccacaaactggcttctcttattcttatttccctacctcttatagctgctcaccctcatctcatttgtcagtgactttttaaagagactttgctaccttgtctttccagaatatttttcttttccttgggtttattcccctcttctcatgtttattgtttgtttgttcattttcatattttaacttcataaattggctgtttggtttactaaattgtagcccttttaaaaaaagaaggctttttcttcctaagtgcaacttctccaggtcttaattctcatctggaggatgagtctgagcctgctcagagactttgtcgtgagaattaaatgagataatgtttgaagatatttactatagcttcagactcaagtgaagtgaaagttgctcagtcgtgtccgactctttgcgaccccatagactatacagtccatggaattctccagaccaggatactgaagtgggtagcctttcccttctccagggccaggggatcttcccaacccaagaattgaacccaagcctcctgcattgcagacagattctttaccagctgagctgtgagggaggggtcaaatggtaggtggtggtagcgccccgcttttccatgacttcagagtcgctgatgtcaatcacgttgttcatgcacctcacacatggcgtggtgtgcgctcgtcagacgcggcagtgactggtggatgcgtccccgctgcagactggccgtgactttggcatccctgtgtacttcttcgctcagtgaggtaggtgtgttcttgaaccaaaagtttgactcaaatgcattgtacattacactgtattggttcaaagaaccctgcagtaaatatttttgtaatgtaaatatggtttatttgtttttataaattcaaaatgttttacattctgaaatcctggcccacatactcatgaaaatgacactgtttaatattatggttgtgaaaaacatcagtgggaggtttactgcccagcgtagccaggttgcagtgatgaggaatttgtgcacagtgggctgattactgttaccacaagaacatctaggtttgcattgtgtcttactggctttcatgtaatttcttgttaaaaaaaaaagattaaagaggaaaaatccttattatgccagttcattattttgaagaaaaattgcaaagctaggatgttgtggaaaaagcctcagtattctgctggattcttgatacattaatggtcagttttagtgaatgctggtgcagatccttggggtaggactttgacctaggaggaatctcaggataattttgtgggaggtgtgaaccttttaaggaacacagttatctaaaccttaagtgagtcttttttctcactaattatctaatactcctgaaaaggcttgtcttctcaatcatatcccagcacttagatgatgcatgagaagtattttcagttacccaaggctgtttgaaccctgggacatggtgagagtgttcattagtggcctgtttggtgtttgttgcagcaaattctgtcctggcgggaagattactgatcaagttccctaacttcagattatgttacaaagctctggaacagtgtggtactggccccaaaacagaaatacaaatgaatggacaggatagaacacccagaaataaacccacgcacatatggttaattaatctatgacaaagaaagcaagaatattcaatgtagaaaacacagtctccttgataagtggtgctgggaaaactggactgctacatgtaaaagaatgaaattagaacattctctaatacgatacacagaaataaacttgaaatggattaaatacgtcaatgttagactggatactataaaactagaggaaaacataggcagaacacttcttgacatacatctctacaatatctttttggatctatctcctagagtaatggaaataaaaacaaaaccaaatgggacctaattaaacttataagctttttgcacagcaaagaaaaccatttacaaaaaaaatagagaatgggagaaaatatttgcaaatgatgtgaataacaagagattcatctccaaaatatacaaaagtctcctagagctcagtgtcaaaaaacaacccatccagaaaacgggcagaagatctaaatagacatttctccaaagaagacttacagagggtaaaaaggtccgtgaaaagatggtcagcattgccagttattagaaaaatgtgaatcaaaactgcaatgagattccatctcacaccaattggaatggccatcctcaaaaagtctacaagtagcacacctggagaaggtatggagagaagggagccctcctactccatgggtgggaatgtaaactggtacagccacgatggagaacagcatggagggtcctcaaaaactaaagatagagcgattctgtgatcgagcagtcccactcctgaccgtatatccagagaaaaccatactttgaaaagatgcatgccctctcaatggggcatgcattattctcaataactaagacatggaaaccacctaaatgtccatcaacggtggtagatatataactatggaatactactcaggcataaaaaagtgaaagaatgccatttgcataacatcagttcagttcagttgctcagtcatgtccgactctttgccaccccatggattgcagcacgccaggcctccctgtccatcaccaactcccggagtttactcaaactcatgcccattgagttggtgatgtcatccaactgtctcattctctgtcttccccttctcccgccttcaatctttcccagcatcagggtcttttccagtgagttggttcttcgaatcagggggccatagtattggcgtttcagcttcagcatcagtctttccaaaaaatattcaggactgatttccttgaggattgacgggtttgatctccttgcaatccaagggattctcaagaatcttctccagcaccacagttccaaagcatcaattcttcggcgctcagctttgtttatagtctagctctcacatccatacatgaccactggaaaaaccatagccttgactagacggacctttgttggcaaagtaatgtcttgctgctttttaatatgctgtctaggttggtcataacttttcttccaaggagaaagtgtcttttaatttcatggctgcagtcaccatctgcagtgattttgtagccccccccaaaataagagtaaaatggatggacctaaaaactatcatctgagtgaagtcagacagagacaaatatcatgtgataccacttatgtgtggaatctggaaaaatgatgcaaatgaacttatttacaaagcagactcagaaaacaaacttatggctgttaaagtttatgcagagggataaattaggagtttgggatgaaaatatatataaaatagatattaataactaccaaagacctactgtatagtgcaggtaactatactcagttaacttgtaataacctataatggaagagaatgtaagaaaagaatatatatgtatagctgaatcactttatacctgaaactaacacaacattgtaaatcactatatttcaataaaaattttttttaaatattgtctttttttttttttttgtctatatggaacagacagtctgctcttcattcatacgctggagaaaattcaggctcagagaaatggtgcttttctcaaagtgatggaaattatatcttacccttcatcccacaaactacagtgaatgtttcctcataaacagttcaagataatgagcattgtttaggataaagagttcacccgcctccttccagttctaagcaatgagacttttattaaatgaaatcttatcaaattagctttctaatacatcagttttaataaatctgctgctgctgcttcagtcgcgtccaactctgcgtccccatagatggcagcccaccaggctcctccgtccctgggattctccaggcaagaacactggagtggggttaataaatctaacatccattaaaatagttccttttataagcagataatagcagagcttttgcatttgaagtgaccctcccaccctgccctccctaacacttcctcagttcccaaagtggctgctgaagcatcagcacacagcaggggcccactggttcacagtttgaaaagtgctagttgtagtatgtaatgaccagccaaagccaatgaggttgaagtttcttaatatcaacccattttattttgtttcgtgccaaaacctgtagggcctgttaacttttttaatgcagtacagtgcagccaggcttaaaatgttttgcttttatttactggaggattaaagtaaaaaaaaaaaaaaaaacaacgtcgccccctacaccatacagattttcagcccacaatccgtgattaccaaggttaactgtggactgaccatccgaggttaatcacctgccagtttccctcttgaatcctgcttacctgaggttcttgggccaggagagccagcagaagctggtgggctctgtccacctcactcttctcctgggtgtttaaacgtacccagggaagggcagtaggaggttgtcggtagcctttaactcttgttgggaccctgtacctgattgtacctgacttatctcctctgactgatgctcagaagggatttctgagctcagaaagggctctcccctgaggaaccgggagggttacaccagctgtcctcccagctgcccggcaggttcttttggtgaccttggtgtccgtgctttctggtgatgcctgggctctgttcatcctcactaccctgtccgcggtggtgttcttacccatgctcatggtttcactgtcagactgcagccacatgaaggatacagatggtaaagaatctgcctgctaggcgggagactcgagttcgatccccgggtcaggaagatcccctggaggaggaaatggcagccactccaatattttcgcctggagaatcccatggacagaggagcctcgtgggctaccgttcatggggtcacagtcagacgtgactgagagactaacagttccacagcaggcacgacatctgccaaaacctggcctgccttttgtttcacaagaagagatcgtttaagactgttaactctaaaatgcaaacatccccttttggaaaggagtagaaatcccatcagtggaaaagtaaggggtgaatggacagaaatgcctttcttcaataataatcgggttggggagaggggaacaaccttcttaaaatgaaaaaagtttttttgtttcgtaaatttcaaaagaaattgttttatacgttaaaaggattgttttaacttgctgagaacaagtaacagggactatcagatgggaagtgttctgtgccccccgccactgctccacgcgcagttcccgggactgacgctccgcgctctcagcctcctccacgggatgcacggtggtgctgggagctgcggggcccttggtggggcgggggcgggggcgacccctcctctcctgggcaccgggcacccctttgccctcaacagcccttgggccgtgggcgcacccctccgccgctggccctggagcctgcctactgcgtgggtttggatggcgcactatcctcactcatgcatgcgtttccctccgactgcggttcagtttggtggctgctgttcattccttaagtgagcgctggctactcagagcctttcccttggccagctgcctgtattccacagtcattactttgccctgtaatcaggccatctctgaaacgcctctgtggtcagagttctgaacctcttgggttgtataatctggagtctttagattcacttaggtgagtagtttcaaacgaactggtgtaaagtttctcttgagtttttacgttattgacatctgaaagccagtcatctctattaactcgtacttttgtgagtatgtggtgacccctgaaaccacagtgcacgccatgattcgattttaatattcctgtgcttaggacctcgtatttacttaactgatttttcctttttttaactggtattggcaatctcattttgccccattcttctaaacttttattcagggactcaggtttcttttccagattttcaagaaaatttcacaactagaaatttcagagatggcttcatcagacaatagctgtgatttttgtcatcctattttcctaagtattgagacctgtatttacaccctactgagcaactgaactgaactgaactgaactgaactaagaagaagcctgcttacaacagcatccttattacaatagcatcagaatgcagtactaaaatataagatccctgaaaaaagcagagacatttctttatcaacaaaggtccatctcatcaaggctatggtttttccagcggtcatgtatggatgtgagagttggactgtgaagaaagctgagcgccaaagaattgatgcttttgaactgtggtgttggagaagactcttgagagtcccttggactgcaaggagatccaaccaagtccatcctaaaggagatcagtcctgggtgttcattggaaggactgatgttgaagctgaaactgcaatacttgggctacctgatgtgaagaactgactcatttgtaaagaccctgatgctaggaaagattgacggcaggaagagaaggggatgacagaggatgagatggttgcatggcatcactgactcaatggacatgagtttgagtacactccaggagttggtgatggacagggaggcctggcgtgctgcggtccatggggtcacaaagagttggagacgactgagcgactgaactgaactgagaacaggggctttgccttgtttgtttttgcctgtgctgggtgtgtgtggctgtgcatgggctttctctagctgcagcgagggggaccacgcttcattgaggtgcacaggcttcttgttgcagtggcttctgttgttgcccagtgccggctctagagtgcgggattcaggtagctgtggcactcaggcttagtttctctggtgcatctggggtcttcctcaaccagagattgaacctgtttccatgagttccaaaaggaatgtctgtgccctccactgtccatcaaggtcctcttctatgggacaactaaaacctcttgatgtctagtgatttctgtcaaagatattttaggcatatcaagtaaatacatataaaggttctttttctacccccttttcacagtggtgcaatatgaaagtgaaagtttctcagtcatgtccaattccttgtgactgcatggactcttggaattctccaggccagaatactggattaggtagcatttccctactccaggggatcttcccaacccagggatcgaacccaggtccccacattacaggtggattctttaccagcttagccatagttcagtcactcagtcgtgtccaactctttgcaaccccatggactacagcacaccaggcttccctgtccatcaccaactccaggaacttgctcaaactcatgtccatcaagttggtgatgccattcaagcatctcatcctctgtcatccccttctcctcctgccttcaatctttctcagcatcaggatcttttccagtgagtcagctctttgcatcaggtggccaaagtattggagtttcagcttcagcatcagtccttctaatgaaagtccttccaatgaatattcaggactgatctactttaggatggactggttggatctccttgcagtccaagggactctcaagagtcttctccaacaccacagttcaaaagcatcaattcttcggcgctcagctttcttcacagtccaactctcacatccacacatgactactggaaaaaccatagctttgactagatgaacctttgttggcaaagtaatgtctctgctttttaatatattgtctaggttggtcacagcttttcttccaaggagcaagcgtcttcatttcatggctacagtcactatctgcagtgatttggagcttagccacaagggaagccccaaaaccatgacccatgacctttctcttaatttaaagagacgggttgtctggtaggcagaaagtgcctttttggaagtggtggtggtggtggtggtggtggtgtttagtcgctcagtcatgtctgattccttgtgaccccacggactgtagcccaccaggctcctgtccatgggattctctaggcgagaatactgaatgggtgggttgccatttccttctccaggagatcttcccaacccaggaattgaacctgtggtgcaatatgtaaccttcaaaaaaagaacatacatgtactaatgtgaatgatctcccgacatattaaggggaaaaaaaaaaaaagccccacaacccactgttttcctgttgttggaatttaggtttacattctttttattacaagttgcagtgagtaattcagtcgtttcagtgtgcaaatgtatctgaagaaagctcctggaagtggaattgctgcacccggtgtttatggcatgtttccggtgttgcctagtggctggtctggcggattctcagctcctccctccctgttgtacccttccccaccacaatatggccacattttttatctttgctaatctgatagggggaaaatggtgcttaggatagatttggtgatcgtttctcaaaatgttacttttgaaattgagaatttttttcatgggcttacgagcaattgcatttcttatgaactgtaataatatttagaatggaatacttttctgggaggttacgcagtttattttgtattatatgatgttgtgtatttgttttggctgtgctgggccttccttgccgctcgggctgccctctagttgcggtgcctgggcttattgcagtggcttctccggtggggcgtggcctctagggcgctccgggtttggtggttgcagcgtgtgaactcagttgtatcatctcctgggctccagagcgcatgctcaatagttgtggcgtttgggcttcgttcctttgcagcgtgtgggatcttcccaggccagagatcgaacctgtgtctcctgcattggctggcggtttctttctttgccgctgagccaccagggaagcccaaggtggtttgtttttttatttcttaaaatattagagaaattagctttttgcctattaagttgcattatttccctagtttatagaagcagtgttgctcgtaatcactttgatgtaataaactatttttggtttggcagtcatatttgttattcagagttttgaatcattcttagaaaggcgtgtcccactttgatgtgataaaagtcattctctggtttcttctaaagttttggttattcaggtgtttgtatttagaacttcttgcctacaaaggttttcagtatgaatccaacttaacttttttctttttttttgccagctttctggccgctttttatcccagatctctggctagttttccagtattatttagtgaataaatccctctggatttaaagtgcttcctttatcatctattaaattcctctgtaatctgggtctgtttctggggtttccctcttgtcccattgatctttcagcccacatacaccctgccccacactttgtaagttattttggtgttacagtatctcatagggctagtctccctctttcctcctcattttagaacctatttattattccagatgatttaaaaatcagctttctaatctatcttacccttccataccatgcccttctaaaaaaaggaaaaaaaaattctgatgttgttttctttggattatgttacctttatagattgaaagtagacacattaagagtcataaaacttcaaaaacagggtatggctttccatgtatttcttttgtgctcttcaactatgtttgaagttttcattttatcagggttttattcatttcctgttaaattgatttatatattttaacttttgttgccttaaaaaaaataattttatttatgtatttattttggccacactgggtctttgttgcttccagcttctctctagttgcagtgagcagggggctactctgtagttgcagtgtgagggcttgtcattggggtgttgtcccctgttgcagagtataggctctagaccagtgggcttgagtaattgtggcttgaggacacagtagtttcagctcccaggctctagagcacaggtttaatagttgtggcacacaggcttggctgctctgcctcatatgggatcttcctggaccaggaattgaacccatgaactgtggtactggagaagactcttgagagtctcttggactgcaaggagatccaaccagtctatcctaaaggagatcaatcctaggtgttcattggacggactgatgctgaagctgaaactccaatactttgcccatctgatgcaaagaactaactcattggaaaagaccttgatactgggaaagattgagggcagggggaaaagggtacgacagaggatgagatggttggatggcatcaccaacttaatggacatgggtttgggtaaattccgggagttggtgatggacagggaggcctggcatgctgcagttcatggggtcgccaagagtcagacacgactgagtgactgaactgaactgaactgattgccaggcagattctttaccactgagccaccaggaaagccttttttttttttttttgctttgaaaaaaaagtatttttttccaacatgttttctcattgattgttgttgtgcacgtgttgccttcttgatttctgtatgttaattttctaccccaccatcttccttcctaaaattctcttcatgttgatcagttcaattcagtcgctcattcgtgtccgtttctttgcaaccctgtggactgcagcactccaggcctccctgtccatcaccaactcccggagtatactcaaactcatgtccattgagtcggtgatgccatccaaccgtctcatcccctgtcgtccccttctcctgccttcaatcttactcagcatcagggttttttccattgagtcagttcttcgcatcaggtggccaaagtattggagtttcagcttcagcatcagtccttccaatgaatattcaggacagatttccttaggaaatcagaactggttggatctccttgcactccaagggactctcaagagtcttctccaacaccacagttcaaaaggatcaagtcttcagcactcagctttctttatagtccaactctcacgtccatacatgactactggagaaaccatagctttgactagacagacctttgttggaaaagtaatgtctctgctttttaatatgctctctaggttggtcataactttccttccaaggagtaagcgtcttttaatttcatggctgcagtcaccatctgcagtgattttggagccccgcaaaataaagtctgtcactgtttccattgtttccccatctatttcccatgaagtgatgggaccagatgccatgatcttcgttttctgaatgttgagctttaagccaactttttcactctcctctttcactttcatcaagaggctcttttagtccttcttcgttttctgccataagggtggtgtcatctgcatatctcaagttattgatatttctcccagcaatcttgattccttttgtgtttcttccagcccagcgtttctcatgatgtactctgcatataagttaaataagcagagtgataatatacagctttgacatactcctttcccaatttggaaccagtctgttgttccatgtccagttcaaactgttgcttcttaacgtgcatacagatttctcaggaggcaggtcaggtgtgtatagattttgtcttactttggtggtgttgtatttgcttaacttttttaaacagaaattctttttctgtgttttggagtagtttaatattggttttttctgtacttaaacatttgggaatgatctgtgaagctctctaggcctggtgctttgtgggtgtgggggactcgtgtgtaactttttctaatttttctaacttgtttgtttagctttcccatctcctttggagttagtttggataaattatattttcctagaaaaataaatcactttattgacttttcaaatttacttatatgcagttgaacaatgtgttcttttattattattttaattactactgtgtctttgatatttgttatttcttgattagttatttgctttgctatttttttccctgaagaaagacctataagacctattggcctcatttacaggctaatttgttcagtttttgtgactctaccatgggcttccctggtgactcagacagtaaagaatctgcctgcagtgcaggagacccgggttcagtccctgggtcaggaagatcccctagagaagggcatggctaccccctccaggattctggcctggagaatcccttggacggagggatctggtgggctacggtctatggggtcgcaaagagtcggacacaactaagcaactgacacacacacattttcttaatttgtattctctctactgtcatttcttagttgaaattaaagaatgacaagaaagtgataaaatttttagtctgtttatttcccaggtacttcaccgctttttccttcttctgccacagggattaaggaaggaaaccgttctattgatattgtgcttagactgtggcattcagcagtcagctcagattctgttcccatgagattagctgaaaatgttacaattaaatagaagcggaaccaagtgctaatgtgttgtttaattgataaagtttgtgaaattgttttgtccgatttcaattctgggacacactatatttttaagtatattttaaaaaatatactagtggatttaaatgatgaaaaattaggtttttatttcattctattgtacaaaagttaatagaactaattttaattaaaaatttaaaagttaaattagtatttcagaagagttttcatgcaaatttgcctatgagcttcttaatgttaagaacaaaatgcgttctacctcttgaattctgcttaaaatggagctgatactgtttgttttaatttagacttcagggctttggggtggggagtagtaaacaaaaccaagatacttagaatatttaagagacacagagggcttccctgtggctcacctagtaaagaatccgcctgcagtgcaggagacctaggttcagtcgctgggttgggaagatcccctggagaagggaacagctactcgttcaagtaatctggcctggaaaattctatggactgtatagcccatgaggttgcaaagagttagacatggctgagcaactttcacttcacttcacttcaagatacatagaatatcccttgctcccctaattgcacagaatgtgaaaactcagtgaatgttttttcacccaatgactacaggaaataaaaggtaaagagatttaaatgccagtagaacagatttttttttaatactttgatctgtgggaccatttttaacttttgcatttttttttctttttctgccatcatatcaccatgtgatagctatcacgcaccgaatctgaaggtcatttcagaaaggtgtcgttttgtatttgctgtggattctcttcggttcagttcagttctgtcgctcagtcgtgtccgactcttggccaccccatggactgcagcacgccaggctgatggacagggagtccatcaccaactcccggagactacccaaactcgtgtccattgagttggtgatgccatccaaccatctcatcctctgtcgtcctcttctcctgccttcaatctttcccagtgtcagggtcttttccaatgagttaactcttcacatcaggtggccagagtattggagcttcagcttcagtccttctgatgaatattcaggactgatctcctttaggatggactggttggatctccttgcagtccaagggactctccagagtcttctccagcaccacagtcctcagctccctgctgcacacaaacccccatcgcaggtggagactgtcacgtccacggtgacaggcaggagtgaggttaatgtctgtgttctctgacttcagtgtctttggagaagtgaatgatggtctggtgcggagtccttgtgctggactgtgcaccagcttgtgaagcaggatagtggggcgggggcggggacggagggagctgaagggtggccgccaggctcgctgggcagaggacatcctgctgagccactcatgcctttgccagtgtgtcgtcatcttagcgtcactcagaaagaaggtaaagaagagggtcttcgctgtgtcatccttctgagggggtctacacgctcctgtgcctggcggctctgaatctgccatcccctcaggccctgctctttgcccttttgaaaccggacctgtgttgggattctccagtgggaatcaagctgtgtccggcaggtggtggagggatgagattccacccctttggaccctccccaggccgggccttccccaccatgccatccgggcatctctgtgacaagtgcccactgagtgtctttatcttggaccacgttgatggttccagaggccgactttgctagtgaaccagtcggatgaaagaatcgtgctaacgtgtcgggtggctgtctcccctccccaggaaatgctctccggggtggtggtcatatctgggaaggactcagtccagcaccagggcctctccctgacggtggaaggaaccgtgaacctgcagctcagtgccaagagcgtgggggtgttcgaagccttctataattccgttaaggtaagaatgcctgacttgcacgtttttagttccttttccaaatgtttggggttcgtttgcatgtgctgtcttagcttcattgttgttatttgctaggaatggtggcaggcatgcttttacgactcagtaatcaatcggaaaaaacacatgcagatattttgattctgaatatatgctgttatcaaaagtctgcttgtgtttactcttatcagacagggttagggggacttgaggggggtaccttcagcccttacagagcccagagccctctgggaagttgtgcctgggccttctcacctctcaccttcctaaagcaaaactgttattataactcttattttagtccagttgcgtccaggtaaaacgctggtggaacccttctttcccgtcgcttgtggttctgtgttcttggatgtaaactttgtgctgtatgtagagtttcctttacctgaagggcagatttaactcttttaagttctgaggaggaagagttaaggggaaagaagggttcacaaagagcatgcagatttcagggcctgtccacacgtccccacagctttctttttttttcctccgtcagcacttgagagactcacttccagagttgtgggttttctcagtgtggttgtaaaccgaggctcggagtaccttccctgaggaaggtgtaccgcctgccattgaggcacgtgtgaggacagtctggctcccagggcccagactgcccgggtgcccggagcgggggccgggggccggggggttggggtggggaggagggggtctgcccctcctcaggttccttgcaagtctgattcacgctgaaggtggggatgcatgtcggaagggttgttaggggacagtcaagctgagatacttggggataagagagagaaatgtatcggtgcatttcctacttatacccaacgctgcagcgtccagtcctagaaatgaacccaacttgggcggtgccaggctgcccagagcagcaggatggtagcagctggtgggggggtggggggccggagtctcccaggagatcatttactagccacagtcatgtgacaaggagcgcggaccgatgggccgacttgcgcgtgtccttgcagcccatccaggtcatcagcagtaccatcgaaatggtgaagccaggaaaatttcccggcggcaaaacagaaattcctttcgagtttccactgcacgtgaagagtaacaaagttctgtacgagacgtaccacggcgtgttcgtcaacatccaggtgcgtgtcctgacttctcttctgcacgacagcttgctctttgtgtcattgaaagttcataaataaatgggcccaagaacttaacgctgtaggcattgctaagcccctcctgtgttccgtactgatttctcatcttgccctgcagaacatagtgtgtgtatgtaaatacgaccgttatccttgatggagaccctggagagcccacagcgtagcttctcctcaggagtcccgccgtttctctggggccccgtgcaggccacgccgacgctgtcgggggtactttattgttggaaatagataggccctcacgcctctctggtgcccgcaccgacttgtctgtttcgaacgtataaatatctctttgtttcatacccaaaggctaccgctctgacataggcctgtattctttattgaagagcccgtgtaaatgagtgggggggaggtggatttatgacttcctgtccacctctgccggttcaggatgtctgtcacagtccccattgttgtctcaggcgcagtttggagtcatgactcagagcgagagaaaaagagcctttcctttattcagtggaaagaaaggtacttttgtgatatcagccttgcagccggtccctcgccggatgagacaaaagcattttgtctcacgtgtgtgcaagagggctggcagttaggaaatttttttgatttattaagttttagctgaaatttggtcctggtagagacgattcccccgcttaaaaatgcaacgctttaaaaataaaaatcctccgaacactcgtgagagtttaacccatggtttgtgtgcatgtgggttttatgaatggcttgaaagattggtcaaaaagaaacacatgtagtgtgatgtaatctcttgcagtaaatatctttctgtacaaaacttttctagtcctttcttgtcagtgcacctgtttcagcagtaaatacactgaaggcttcgggccactcataagaagggacagtaaagtgtctggactcaaaaggagccacttgcatagacacacagctggtgtagtctgaccaagtcctctgacctgctttcaagatgcagaatatttttaccatgaaagaaagtgaatgaaaactgcattttttttttttttttggcaagactgaaaatctctcagttcagttcagttcagtcgctcagtcatgtctgactctttgcaaccccatgaaccacagcacgccaggcctccctgtccatcaccaactcccggagtctacccaaacccatgaccattgtgttagtgatgccgtccagccatctcatcctctgtcatccccttctcctccttcccccaatccctcccagcatcagggtcttttccagtgagtcagctcttcacatcaggtggtcaaagtattggagtttcaccttcatcaggcctcctagtgaacccccaggactgagctcctttatgatggactggttgggtctccttgcagaaaatctctcaaacatcgcattttcaaaattattttcttttctcttgtcagaatcaccatcaacctggtttacccacacagctcttctttgatgctgtctatttactaatagaagcatacattcattagaaacaatagaataacatccaattttctgtggtcatacttcttacttgtcactttcttttcctgtgtttagcattcttgttaaaagattcatttgtttaacataaagttggaagtctcaccctttttcacatactgcctggaagggcatcagatgaaaatacaaaaacttggggtcctgtgcagctgtgtgtgagctggaaaccagttcaaatgcagaaaatacaaaaacttggggtcctgtgcagctgtgtgtgagctggaaaccagttcaaatgcagaaggagagttagcatgtggttaattctttagtaaataatcaccctgacctcggtttattttggtcattagattttaccgctttgagggtcaacctcagaatgttgtaacgtggaattctgcacctccccaaatatctcataaatttctgaaaccatagagatgtcctctcaacctcatatttgtaagagctggtcactcttttgcttatcacctagattcaacatttattagaattttgccacctttgtttcatctgtattctgaatcatttcaaagttagttacagaatcttgacacttcatcttaaaatccccagaagatagggacattctttctacataacgccagttaacgttttcacacctctcagtaggaacagaaattctccagtgtcatctaactcccagttcttaactcagattcgtcattgcttcttttgagaagcgtgcgtcttgggagacaccaggattgagacttcctgatctcgttctctttcatctgtgcgcccattcggtctctggacaggccttcttccagcctcttggttggacagtgggcaggtgccacccggagtggcagcgaccaccgtggtcctgcagggcgtggccttctcagcgccaggactcatcacactttctgtgaagattcccgggtgtgtcacttgggagagaaggtgttcttgttgagcctaaacaacagtctttctcaaatcatacgggtgcagagacacttctcatttattgtttgaattgcgttgtggtactgtaatgtggggcttccctggtggctcagaggttaaagcgtctgcctgcaacgtgggagacctgggtgcgatccctgggtccgatccctgggtcgggaagatcccctggagaaggaaatggcaagccactccggtattcttgcctggagaatcccatggacggaggagcctggtgggttgcagtccacggggtcgccaagagtcgtacacgactgagcgacttcacttcactgtaatgtaaaaatagtaaaaagagcctgacaacataaaggatttaaaatgtagccagtagtaggttgccagctcacagggcctggtttgctcacagggcctggtttcctcgtcacttcttaggcggagggctccatcatatttgctctgattctcctcagccacctttgcatccatctctcatccttatttgtagatagagcatacaggaagctgtcagtcttgccagtcatcttctgtacagccactttttccttgaaaagttgtttaaatcacagggtagtttaatttttgttctactctcgtggccctactagtggggttttatactgttaacacaaagtacagtggtaccaacacttctgctgaaatggtttattcagaagtaaatgatcgagatgcctgtcctccttgttcatggtgaaaatatcccttctaggagtctgctttaaatctgttggcttgtgtcttctttcctcattcccgtccatggtgtgtttactatcagtcagaagagatctcatcttggggcttgcctggcagtccagtggttaaggctgcacacttccagtacagggggcttgggttcctccctgctcagggagtgaaggtcccacatgtcacacagcatggtcaaagaagaaatcgagtcttatacctcctctggagccctgctcatgtctgactctccttaacgtcctgtaggtcttgccatgtagatcactcattaataattgggaaagatccagacagagtgaaaagatccagggctttgcagcagacagacccaggcttgagttaccatattgcataaagatttggagtgtgggtgtctgccgcaggcagatgtaaactcagatcccacctctgacccagatggccttcatgacctctcctcctgggggttgatgaggtctctttgtgaagtacttacgcctagttcccagcacccagaacatgccgagtaaataatcgctgaatgattaaataaatgaattcatggtgactatctatatattatgtcaaccatccttacctttgtattgtcagaattaatcaagaaagtgccgtaaaagaatttagtgaaaatcgttcggtcatgtctctttgtgagcccatggactgtagccctgccaggctcctctgtccgtgggattctccacgcaagaatactggagtgggtagccattcccttctccaggggatcttcctaactcagggatcgaacccaggtttccatgcaattcctaaaacacattggtgttttcctgttttctctatctttctgcctgctcccactcatcaccagctgccttatattaccaattactgctttcacacttaaaaaaaacctttagtgaccaaaagctggtacccattattcacactctttcatttacaaattatagaaatctcgctcaaactggcttagcctaaaaagggacattggatcctggaactcacgattccaggggacagtctaggctgggagaggggaccccggtcagcccctagctcggcattcttggtggcagagaacattctcctggcttggccacccccgcagaaaggattcttcccctggtctagcagcggtcctggctctggtcacttccaaaccagggtgggctgggggaagccagccctcccaggcccctgaggctgaaaatgaggcagggtcgttcccattgggaaaagaatcagggagaccaggcagtccccaacaaaatactgcccatagcgtgtgggctgtacaggaaggacgattacacagatacacgcgtgtgtgtgtcacgtatgcaaatggaacagctgcatatgtagtgcagttcttgctgagctagtccggctggggaggccaggctgaaatctcggtagagaatatatgtgtgtgtttgcccctgggaaatccatggacggaggagcctggtgagctacagtccttgggatggcaaaagagtgggacacgacttagcaactaacagtagcaacatatgtatatgtgtgtgtgtgtgtgtgtgtatatatatgattgagactatacacacacacatataaaggcccttgtagacaacggtgctcttttctatttcttttctaacgtttcatctcccaggagaaccttaatacatagtaagtaccttaaatacatagttcttctttaacctggacaggtcggtcataatagtcgtaacttcttgactcatgacacatatggttccagttctacaaattatttgtaatgtttttccccagatgattaaaatactagcttgctttattaaacgtacgtgatttttgtttgtttgtttaagacagtaatgtgccatagagttttgttagcagtctctcgctgccatggacaggatggggagggacagtctcgagtcaggccgagttttcagcctggcgcccagctctgtggcaggctccccctcgcagggcacagggcctgtcttgcagaaggtacggggcgtctgccttgttggctgtgagtctcgatgccccaaggtttgcagctctgctgccatgatttctcatcttttctacaaagtcgctgctgtttcacccagagccatgacgtgccagccctgacttgtcatctcaccaggtcctcactaaagtcgcattggtgtccccatcttccagagcaggaagctgaagctcagagaggccttgttccctgtccaggctcacacaaggagcctgatgcccagctctgcctcacgggtctttccccgtgtgacaggtggggctccatgagactctgcacccgttccagggttccagctataggatggccctgggcacgggctaaggtgtctattacagaaatacttttcattttgagcgttaactcccctgggtctgtagactgatttcatatggcgcattaatgggtcggaaccttgtctgtgtgtgattctgtgatgagagcagaccctctcaagaacgtcttctctgcctttctctgcagtacaccctgcgctgtgacatgcggcggtccctgctggccaaggacttgaccaagacctgcgagttcatcgtccactccactgtaagccgcccttgggggccctgggctcggtagcaggactctcctgcagggcctggggctgcacccgcttagcagcagtgagttagctgcttgtgctccgtggctgctgcacagggccccgggactcctgggtcagagacggggagcatgattctcccggcctggccagcagcagggtagcagtgtgcatgccatcccctgggccagacccgccggcgatgcccctagcccacggggtgctgcgcctgaggggtctgtgcctcacctgaggagccccaggccagggggcccacctttgtctcagcagacggtgcgcaagcccacccttggtcctggagggaggcatcgtctcgtccttcaaggccgcttccactaacagctggcagaaatgtgcccggctgcggggtaggaaggccagggccctgcgttcttggcccacgaggcaggaacacgctggggtgctggggagggggcagggagagccttttcagacaccttctgccgggactctacaatgacagagtgtccttaagtcccctcagttggcacgtaagaactgccacctgggggggctaggtcccctccccccaggggacatgttggggctggcactcgtgcccacggccctggcgtccgtgtctcagttctccaggcctttagggcagggcctcttgaccctgttatgaaatgtccacggatgcctgagtgacgaccgagtgaagagtcggagcccttgcgcataagatcggtgaaatcactgatgcccttgtgtcaattttgtgacttttttaggattttcagttgtgtgtagtttccctctaaagtttcagtagatgtttctttcagtgctacggtttttaaaaaaatatgaaaatatttctcattttgggaagtcatttcatttagaaacagatgttttccttctgtccaatcaagggttttcaaatggaagctaaaaaaattttcatttcttcttcatgtagattactcccttaaagaaaaaaatcacatgccatttcatgtcttaagtaaaaagagcctccacctttgtgaagaataagcctaaattcagccccctgcccagggctgggtgcctggtgaccatacaggctggtggcggtggcagagccacctggggcttcctccctgctcctgggggtcacccacagttagcccccagggatcatggtctctgtgaataattgcactagaagccaaactacgccatgacccacagttgacaagttaaatattcctttatgtgctgtgaggaaaaatatattcttgaaagaatatgttcatgaaactattagtaaaaagagtagcttcaagaagactatttccgagagtaagcttttggtgagtaaagtgggaaagctggtcaggggcctttctccttcacggctcccccgccatcggggcctcagtggcctttgggccccaacctgagtaaaaggcactgggcaggccccaggaagcctggctgcgttgatggattctgtgcctctgtgatgtaggtggtggttgttaacaaatttccataacgcttgtaattcatctgttgccttacagtgtgattcttcctggtagaaggttagtagtgcagctgaatggctaacagctccagctgtggaaccagggtgcctgggtttgacttgtctgttctgctctggacttgagtgaccaggtgagccatctgtgcctcactgacctcacctgcgcagtgggtccagggccacaacggcactgcacggggcccatcacggagacacttcagtgtacaatcttattctcagagacagcttcaaataaacgtctcccagcaataccgccctgcttttaaattctggacctgcgagggaccttagaggcaaagaagcctggccccccattttccagatgcggaaacttgagtcagcgggatgaagacattggacagacacagccttgtttcctggcagaactgtgttttagaacccaggcaccctgcctcttagcaccaaggtctcccgttcttgtgctgccttgcatttcctgaaacgagggaaaacaagttggagctgtgggactctctcctgatttcagttcttccccgttttagcctcagaaggggaaatggactccgagccccgtggacttcacgatcacacctgacaccttacagaacgtcaaagaggtaacgtgctccatacacgcggcaccagggcgactttccttccttccatccttctcgttctcttggctgtgctgggatttcattgctctgtgcaggcgttctctagttgcatcccccccccgccccccaccattgcagcgcccagacttctcgctgcagtggcttcttgtggcgcgcagcctgtgcaggcttcatagttgcagcacgcaggctccgtagttgtgaggtactgactgggtttcaaagactcagtatgaaaaaagagaatttaaagcatcatgtatgattgtaatatactgattgtatgtggaagagacagtattttcaatatactgaagaatttcgcctgtttcctttttttaaagtggctagtagaaagttttaaattacacattcacttcttcacatttgtggctcacctcgtttctgttggacagtgtgttctaaactctgaattgacttcagtaactgggaccttgccgtaggaaggcgtgctaggcagtgcctctagctcctcagacctgttcttcccaccacaccatcacacaggcgtgtagtccagcatggaagaaaagttgttttcctcagaaataaagttaatctctcattggcttttcaaaattgagtaattgggaacatttttcaattgattatctttttttttcttggtgacaggttgtccttaaacactcttgtcaacgtcctcagacgttttttaaaatgttacttatttatggctgtgctgggtcttcactgctttgcgagggctctctcaagctatagcaagtaggggctgctcttgcagtgtgcaggctcctccttgcagcggcttttcttgttgccgagcacaggctctagggtgcgggcccagtagtcctggcaccctggcttagttgctccacgacatgtggaatcctcctggaccagggatcgaacccgtgtcccctgtgttaacaggcagattcttagccaccgcaccaccggggaggtccctcagacattctcctgtcatggcgcttggtcagacagagctgtgcagacctaaggcaggcaggcaggctgctttggcgagagagccagtctgtcaggcaccttaggtctgtagataagtcgttgaatcattccgtctgttactcagactattgtaagtgctgctgtccatttctgtcagttttgtcagcgaggctcccagtgagttttgtgtaaattaccagactgtgttcggttctttgtaccagagtggctcaagtcttttcccccagcacctctcattcctgacgtgtctggttttgtctcgtttcagagggccttgctccccaaatttctcatcagaggacatctcaactcgaccaactgtgtgatcacacagccactgacgggagagctggtggtggagagctcggaggccgccatcaaaagcatcgagctgcagctggtgcgcgtggagacgtgcggtaaggcccccccgaccctctgctgccactggcccatagccgcgagctcgcctctcatctccagggtcccgcagagccagcgggacagcaggggactctcctgttgatgtaccttctctcagagtcactggctgctgcctcagcctgaatggacatgcgctgtgtcctgaccccacgatgccctctccctgctccaggctgtgcagaaggctacgcccgtgacgccacagagattcagaacattcagatcgccgacggggacgtgtgtcgggggctctccatccccatctacatggtcttcccccggctgttcacctgcccaacgctggagaccaccaacttcaaagtgggtacgtgcgcgcccttggggtgcccctgggaggggatggatctgctggtctgctgatctcgggtgcaacgtggagcacccagccctttggttgctgcacaaaattgtgtgcagagcagctgggtggcgcccaggattgaacttgcttcgtcccccaagagacagtgtgggctgctcatgtgacgacatgctctctgaaggacactaacttggccagggaccagccagccaagctcgtggggaggtcggatcagccctctgatgggctggtatttgatggggacacaagacccgtgacagcccagtgaacagtcatgttcccaagggctgtggctctggcagctgaggggaagtcggtggttttcagtgatcacacgacacatacttggaccacaagatctgagtcgtgttaagatgcacttttcaggccggctttttctcccttcaccttgtattgtggttgaatctgcagatagagaaccgcagttgtggtggaagtgccaaataaggggcagcctgtaaattccatgtgaatgtgtgactgggtgggagcctccctgaccttggttgttcaagggtcagctgcacctttgatttttaagttaaggaggaggagcttatctgtcaatttttcaacttggttttgctatgtaaacttgaagaaaggtccaaaaattattattttctgctatactatgcattaggcacctgtactatctgcaccttatttctgtcagactttacaaagcatccatgtagcatttaatgtagcgcccataattcctccatagaaataacaccctcagcccatcagccaagacattggtggtgcttttgtacttgtggctcatgttttgtttgcttgggggcttgtgcagtggccaccccttcagctgagggggccctgcaggaaggaggtggcctgtggtcattgagcactgcagcctttggtttccctggggtcaccgtctcatggccgggaggtcaggctccgttctcaagggggaatagcatgagccccgttgtcctgagttaggcacacatctgggtgtgctcctccaccccgacggtgcccacgtcgggggacttcctgggcatggccaggcctacagctgtccccagctgagcctgtggccctccgcgccgggaggaagccagcaccagtgctgccgtgggccttctgtgcctgccgggcctcctctctgtcccctccagggaggacagcaaggttgcgggaagactagggcagggtggggctgtgcagcccagagggtgttgcagcctgtgacagccaccagaaagaggaagggaacatggcagccgctgcggtacacacttctgccctggccagtgccaggcaaggcgacagccatacctggggacttcggccacaggggtccctggaggagctgtcccccagccccttccctgcacactggggagggacccgggcttgtctctcttcgggggctccctcttcagacacccccttccctgtcatccatgtgctgacccttagcacctagagagtggggagaaagattcgtctgtgtgctgaaggtagcagaggaatgtttgaacaggtgtcatggacaaataaaccaggctgcaaagggatggccgggagacagcttgccttcttttctgagtgttgtttctcgcctggcctggggtgatcccagtgggcttcgggccagtggggtccgctagtccacccaggacggtaggacaggttaaaaagaaagccaaagtgcaccgatgagcagatgggattctaggagattctgtgcagtagagacaagaggacaagagagtatttgagaatgcgggaccttaacagagtatcccagggtgagaagaccgacattctcaggcggtcccgcccgggtagccacctacaccgatttctcctggaagcttgggagggtgcgcgtgcagagccccaaggcaggggctgctgcccctctgtccagagttcagcagagcccgagtggggctggcgttcgcgcctctggggtcggtgagcgttgagcctgtctgtcctttctctcccccagagtttgaggtgaacatcgtggtgctgcttcaccctgaccacctcatcaccgagaacttcccgctgaagctctgcaggatgtagccaggagcaagggagtgcactgcgagggcggcccttggaaatgcagtcattcccccgctccccaccccaggagctgaagctggcagcacggacccgctttcttggtggttctgtatcagagagtctgaccctccttccgcttttcttcgaggcccctctcatcagagcttcccttggaaatgcgtcaggatttcttaacggtcttggccagatggcttcccagagagcaggtggtcttctgcctcctgaccagacctgctgttcacgttcagaaaataggtaacagaggctgaactttgctggagagtgaggtcagggaggaggaaacttcctgaccggaagtggtggtggccgggactccgccccgccccgccccgcccgcccccaggcggtcgctcaccacaggcggctcaggacgttggccacgcccaccgaggatggcacagggccgcgcaccggaagtgggtaatgggttttcctctcttttctcctgccgtttt

SEQ ID NO: 128 - DNA, 63337 bp, Hippotragus equinus
  source 1..63337: mol_type = genomic DNA
atatatagaatgtaattttaaagtaacattaaccccttttgtcctctggttttagaaatgtttttttaactctttcataaagtgaggaaaatagggaaaaatgtcaaccatctgcaccagtaaataataactattaatattacatattttcattaatttaaaaaaaataataaaacctattggaggtgcaaggcaggagcgtgtggttggcttcacagacctcagcctcctcccagtgcacacttgaaccaaacacacaagggaaaaaaaacaggctggtggtaaccagccataacaaaaatatattctttgtattctatcacccatcaggttcatctcgcatgtttgctcgaaaccacaaacagctactgcacagttcttatgtgttccaaggaaaattgtctcttaggctaagaaagattcaaaaaaattgtttgcagtacaaaaagtcttaagagaaaataattttttttttgctcccaaaatactacaaggtgtctctagtgtatgtctagtgtactctgtgagaggtttgaattcaagtctgagttgtcggtgccgagtcccaggtccgtggcgctcgcaccatggaggtttgccatgcctggattgctagcgagctgagagagcatcgaattctggtccgggctggcaaaatgcccttgttccatggggttgccctgggcagcgaccagtccaggatgtggagaactggtctgtggggagacgtggtgtggagaaggctgaggctgcatccgtggggaagggctggagtgggggggctgggactgcggccgcggagaagggacaggctggggagatcgcacttgattggagagagacgggatctgctggccttggaggtgcggggactgagcctgactcgggagcatgtgctgctgggggctcatggggttgggctgggccggcgagcccatctgttgctgaaggagccgctgctggtaggcctgcagactggctcctgcctctgctcccagggcctgcgggagctggcccatctgtcccatgttcccttgcggcatctgctgcatgtgatgctgcattcgtggtggcggctgctgctgcggggcagggtagcccacgccctgagggggctggaactggttgtggttggccagccccgggcccatccctggccccgctccctgctgctgctgctgcaacatctgctgtcgcctcaagatgtctcggaattgcgagggcatggtgctgtgattcatgttcatctgctgagcctgcgggctcatcccgcccatgggtggtgggagctgttgctgctgcgtgggctgctggggcaggccggcccttgggacacctgcctgcatggggttcaagttctgcatggcggggctggagtggaccccctgctgacctggcatggtggggggctgcaggcccggctgcccggggagcggctgcgggttggagttggcgtacttggcagcccgctgtttgatgaacgcagccaatagctgggggttggcatgaaggatactgagcacctgttgctgctgcatgggggagctgggagacctgagagtccgcaggaggttctgtaaggcttgttgagacacagtgcctggcttgagagggctcacacctacctggcccaggcccgtctggggaggcatgttcaggggctgcccatgctgtgacaccgacatcatggctggccggggcatcccggactgcagctgctggggcgggggcagtcctccctgggcccacggaggttgctgctgcaggccggtgggccccatccctggctccaaatgcccaccaggccctctggccatggggggcgggttcatacccatgggggccatgggagtcatctgcggcatctggtgctggatcggccgctgaaagatttgcacgtgggccatctggcgttgcgtctcggctgccctctgaatctgcatggccatttccactgctgcaggtggaggtcccggaagtgggggctgagcagtctgaggcggagtcgggggggtcacttggcctgctgccttgccctgggacaccgggccagcagcttgagtcctgggcaagtagggcggcatgttgttgggaggtgtgggctggggctgagaggggggcgggggctggggtgtctgcggggtggtgggctgctggcctgtcggcgtggttggggtggcaggggtcggggagggcaggccctgctgctgccccaccacgccagtccgctgcatgctggccatccgccggcgcagcatctgggcctgctggagccggtgttgcagctgctgctgccggagcttctgcttgatgttgaggcagaagggcacggggcacttgttctcctggcagtgcttggcgtggtagcagcacagggcgatgagctgtttgcagatggggcagccgccgttggtcttgcgcttgcagcccttggtgtgctgcaccacccgcttcatcttctggcaggacggcagcgagcagttggcgttgcggcactggcaggcgtgcaccagcgactggatgcagcgctggatgctcaggcggcgggagtctcccgggctctgcgtggcggcagcctgctggttgttgctctcgtcatcaagccccagcccgagcttctccatcttgtggtcgtggtttttagtgttgtagcaggtgatacacaagtcataatcctggggaaaacacaggcgcaggtcaacactccaagattcaagccattcaaaagtatttacatatcctgcttgggctgaaaagccccattttagagaaagcttctttagcccaaccattcaaatctgacaccaggccctacctggcctgttctggtcctcacactggccccggaggctgccctcaggccagcaccacctctgaaccgcttcttaggtacctggaatcccccagccctccccgccaagggacctacctcacacacggtgcaatgccagcgtgtctccacgtggtgcttgcactcgttgcaggtgtagacaaagcggtcctggctctgggtgtgcagctccaccagcatgcacatggtggaccactgggctcttcgcagtgacgagaactccaggtgcttgtcccttgcgagggtgagaaaggcatcccgcccatccatcaggtcacaggggatgagggggtcggggtcaacaatgggaggcagggagttggcggcagggccagcgatgagacggatcacaaagaagacctgcaacacagacagtcccctctggactctggaactgagcactgcaggcagctggccaggctctgctcccgggggccgggaggcctggcttccttctgtggccaccctgcaaggctacacaacacagcccgcgttctcctgcttcacgcatttgttctctttttcgaaactgactacaatgggcctaaaacatctacatcttgtgtcttctacctcattcagtaattcttcaaaagaagaatggtcaaacacagggccatacaggggacattctacttcaaagaggtcaacttttaagatgcaattcatggtttaacctgactctaattataaggaaataaatcagaaaaacccaaacagatagatattctacaaagcaattggcctggagtcttcacaaaatgcccatgtcatgaaagaaaataaagccaggaactgagacacggcaactcaacatggagcagaggagcagatgggaggtggtggcaggggagagatttcctgagtgtgaagtcacagcacgcttatgcagaaagagcttactgaaataaaatgtagtagaacgttaactgatgaatctagctgaaagcaacaggagggcatcttctgtagaactttcctgtaagtttggaaggaaaaaaaattggtaggggtgggaagaataaaaaagcaaaatctttttccttgctacagaaacagaaaaattttttgttgaagtttaaaaacacaacacaaccactgattcccataatcactggtataaaggctgcaagaggaagctgctatttctgtaataataaaatgtaaaagggaaccttcaagagatcaagaacttgtaactgctgtattgcccactataacctgtcagtttttttgaggctgaaaatctatgcaaactggcaataatatttgttatatatctgggcagcaatgttggcatagaacaagagtctagaaaaagaacacagtgactttcttggtggtccagtggttaacactctgcactgccactgcaggggcatgggttcggccccgggtgggggtgggggtgggggtgggggacgggacatgggactaagattgcacacgccacaaacagcacaggacaagagcatccacactgagtaaagacattcaaagccagagttaaaagctcaaggggggactgtgatactgggtttgctactgtagctcaaagcaagcactcagtgaggaggagtgtcctgaaactgtgatcacacacagggaagtactgtatctaacaagtgggagcagatcaaaccacctggtgactccctaggaaaccttcactatggccaacctccaataacagccattgtgaccgactgctgaatgtcaccctagagctaaaacaatacctaaatttaatagaatgattacattagattctaactcctaacaggagactactacccacatattcttcagatgatgtatctacaactgaagtcatacctattacaacatactctaagggcctttcctaatcgctgttatgacagagttccttacctaaaatcaaaccatcagttccctctccacattaatagcctcttcctgtaagaacctgatgtctgaacatggagataaacagatgtttaaacaaaccaacatggcccttcaaaacgcctcatcttaccgacaaaaatgtcgaaggggaaaaaaacccaacgtactcagttatattcccaaacaacaaataaccaatataaataattaaataattccaagttttaactttgctgtgaaggcattcatgaatgcatatatcaaaatttaacttttcttcaatcctctccatttgccaattccctttgtaaggcaaaacattcattagttttgccaaagttccattagaaacttgaatggccaagtagagttctaaggggctttggtataaagcaaaagcacaaagatacccaaaagatatccaacaagcccatcttctgaacaatggacagaaacacaaacataaaacggttacaaacaatagggtcagacaaactgcttacacttctcccaacaccatatagctttgtaacagctacagatctaagtaagacaccttaccatttcgtgttctcaccaccctctttttgctttcttctccctcaaatgattttctttttttttcctaagggaaagtgaagtcgctcagtcgtgtccgactctttgcgaccccatggactgtagtctaccgggctcctccgtccatgggattttctgggcaaaggtactggagtgggttgccatttccttctccagtatgattttcttccttctgagtttcaaacgatctggtgctcacatcataaataccaactatggtgggcagttctggaggaccctggccttggttttcctactctgggggctgttctcttacctctttgtgcttctccatggtggcatacaacttctgtgagaggtcgttagatacgttgggcatgcctggcttcttcttattgccccgactcaggctgctcttgtttttgctagttttcttgttgtttttctttttagcgtttttgctgtctccctttgtcacctgcaggttagcatgagagaacaagaaataaatgttagtaactctttaagagactgtttacaagtttagaacagttatttgttaataactgtgaagaacaagtttctaatggagcaatagctcataaccttctaacagctgctctctcttcactgctcctctttctttttaaagctgttgtttacagtaaactaaggtttactaatgtttttgcattaattttctcccactgaaaaatctctctgctgatatctcttcattagacaacagcagccttagctctttggccagcggaagctgcggaccaggagaccctcaggtggagccaggccaaaccaaatctgaggatggagaggaatgagcagcaggtagtgaagtgtgcatgggagtagggagccaaaggccctggctctagttccttcgactcactttctaaaatttcatggactattaaaaaaaaaaaaaaaaaccttgaaaaacattcaatcaagaagtctaaactgcaggctgtaaagaactcttagactaagggcaacttcagtagttcagactcagcaagggcaaccgacacatactgcagggaaataaatgacaaggaaaccttgtcatctgacctgctataaggcagcttctgtaggggggactggtaaactctggcccagatttgttttttgtatggctaagaatgatggtttttacacttaaacagttgtttaaagaagaaaaaaagaatgtgctggagacaatatatggcctgcaaggcctgaaacattcataattcagacttttgcagaaacagtttatcagtgtcatgttctagacaggtagtgttctgttctccagggtttccattactagaaatccaggattccatttaaaaatgaggtctggtgcaaaaagggcttaaaatctctaaactagaatcatagtaacttatctacaccaatattccgcgcctgcccaacttagagagctagagcttcagggcccagtggaagcctcagctcacgtctgggtcatatgagcggaggcagaggcgggaaagggaaacagaaagcgctcacatctgtgctctcgttgctggtgttctcctcccgcttccgctcctcctcctcctgctccagttccttaatgctctcttccaggacattgggccagaaatctccctcaaagtaaggcaattccttcgcgcttgtcaatcgatcttcagtagcttgttttaaaatatcctgtgaaaatatccaagaacaaatagcaatgtctatttttttgggaaaaaaaaaaaaggcgtttattatatagcagcagaatcacagctaacggacacaagaaacgcaaagaaccagatctgtcttctggaagacagcagggattttatgcccaagcctggtgcctggggagacagcgtcaccaacagggaaaggtctggtctgaagtatttctggcttcctctttcctctacccgtgaggatggggagattatctgcctttatgtaaccaagtgacaaatgcctctgtcaggaacaaaggcagaggcagcagcattcacacccatccctccaacacttctgagacagaatgcagtgtgatgggaggcacgctggtcttgcaaaaatcctagaaatactggcagtttctactgagaaatatgttcagaaaaatcccagttacagatactggaaaccatatagctaagaacgattttccaggctgcttattaggacaataccggttcatgtttccctccccatgagtaaaaacaggtgagacatttaatagttcaagtttcttattatgagacaccctacagtcacaaatgattgtcaaatgttttgccaaatctacttcatcttaaattacatggaagagtgagaagaaacacaagatttttgttaagatagtaaaacaagccaaatacagagcagcaggcctagtcaagccacggtgctgtcatcccccttcctgaccttataatcatggacgattcgttcggacacagctttgtcaagcatctttttgtaccactcctgcagtcgcttgggcttgggtatcttctggtcaggggggtggcaatggaagatgtagtcatctccttcacttggcggacacgcccaaatatgccctgttgtgtatctaacaacacagacagaaggaacactgaagagaaagatcatccattctagaaagaatgctccactttaaaccacaaagaggaatcagtacagaaactaacaattcccccagataacatgaagtgtgtgatctatgacagaactaggcataaccctggatcaaaaaaatcctcaatttgtatttaaagaccaaacaaaagtgacaatgcaaagggaagtcaatccatgtcaacaagagagtttaatgaaatgcaaactatcaggaggaataacctgcaatgcggtgaggtgctaaacattctcaagcacatatataccttgaaggtaaggaacccgtacgaaggagttttgtatcttcagaccttggtgtgattttggttttgatactcagaggtgtgacaggaccaagtgcagtttaaagttctggctcttcaaatcaaactgtatcaaacagcttaactgaacaaaataaagtaatttgggatgggtgcaactagcatcacaatatccatttctttcccatggcaaagccaacaatttcaaagggtctctaaattatagttctgccagatgaaaaccaaagtggaggagaaaaaaccaaaaagttacatatttgcacgtactgtatctcaccaatacaccacagtggtgatcagtttaaaactatcagtttttaaaactagcatttgtttttatgcttaccctaatttcttgacatactccaaatatccaattaggatttcatgatagactgcagtcctcaagcatttaggacggaagaagtgaacactatcgaggtatgatatgtatactctcctgtatcaaacgaggagaaagaagccaggtcaagttgcataatgagtttctaatgatgtggctaaagacatctctcttctctgtgccctttgctcaccttgtcatatttaatgcttatcacacaatattacatttatttaggtaaatgactagatcatgagctcatcaagggagttttgtgggtctgtggctctattactatctcagcacctagcagggcctgagacacagcataattagtcactactgagcaatccaaataccttctggcagactcttattctggcctttatactacgtggaaaattctacaccatattctacttcacttgtgtgacattctttcacatctcaagaaggtactcaacacaacctagatttaagtacattttctgaaaagtcatattttaggctgccgttcatatctctttccctgttgttatgaacatgaaagagcagtattttctatttttttgtttcacttctacactacacacttgagaacttgcatttccaaaacaagcacatcattttcttatccactatgcttgttcacctgatgtaatttcaaacttccacacaaattagaaagtagccacagtaaagtcctacctctggttgggcggagggcagtcagagccatactcttgaacgtgcataccaaagaagcacaagtcaacaccatcgatttcttcgaaggcaaagagggctttggttcgatatggaaaggattctgccatctctccactatctacaaatctatacaattcatagtggagggaagaagtacaacatttcattcagattagaatcatcaacagtaactatgtgtgagcaattatggatccacagagaagaaagggggaaattactacataccttgctttcatgcctggtttgacttccacagttttgtcagaagcatgaactactcgaacagtgacctctcctgactcagggtgattttgtcgcctcagaaactcattcacacgattctccagaaatgtcccaagcctggtagatggcagtcctaggatttacaagtgacaagttcaggagtagccaaggtgcacatttattactaccagtcaaattccaataccgtatctcacttctgctttttcaacactagcaagattatcactgactcaatggccatcaatgtgagcagactctggagataatagtggagtacaggggagcctggcatgctgcagtccaaggggtcgcaaaaagatggactcaactgagcgactaaacaacttcacagaatagcaaaaaactgcacaggcatctatctccagaactaaaactactgccgcccccccccccatctgaaaagatcacatagggctaaatgcagcccctccacaaaactgagggaatcactcacgggatggcaatgctggcctctgtcaggaaatgtgttggaataagaaaaatacatctgcgcctttttacacattattaggtgtaagtaacttcacaccaaaaaggatcctacagttcaacttcaagtacatcatggaaaaattatttgttgtttagtttggttaaatattttaaataatgttgaaacaaaataattcattctggatgttaatttttaacgatgttttaaaagcaaagttttcccataatttacctgtaagaaaggaacttacttttagcagaaaacttattttcttttctagttcgtgcagtcttctttaaacaaccatcacagacaaatctaaaatgtaaaccaagactttaacaacttagaggagcatttcaaataacgcactctacagaatttatcttatgtatgcgtaaagttgaaaataaacaaaaaaacaacctgggagaaatacaaccaatatacaaagagctttcagaaaacattaagagaaaaaaataaataggtaaaagatacaaagagcatataaactagcttacatgtgcaaagatggtgaagatcacagattaaagcagaaattttattttttagtcaatcattagcaaaagtgtatctgttaccagtgggaatataaaaagggacattttgaaagcagcatgaatagattttatatgtacattctctctgttcctgaaattacaaaaggatgtgtgcataagtagaattttgagaaaaactggacaccacgtaagtactcatcaaccagctggctgaccttcagttgcaaggatcactgcaagtctcatgatccttgcctactctgtaattaaggagagaaacctatctaaagacaagcttatctacgacaattttccttagtgtttttttttttttttctggaaattttgttatttagcctccttttcccccatgaactctaaactagcatcaggttagtccaggaaaaaagcagaggagagagtagagctctcatcttgatgagagtcacttaatgcacagacatcccctccccaacctttcccttgaacagagctgggagcagcctcattcctggagagagagaggtagccgtggcagtaaacacttagcagtgtcacaatggacaaaaatccacttatttccgtgaaaggcactgatgatatgcagcctgggtagatatgtggagaatactcaagaaacaaaacatgaggcccaagcgtatctagttcactgaagtttgtatctcatcattttcacgcatctctgcctttcagtggggaacacccatgttacctgttatccaactgcccaaaagactttaaataattcaagtctaaccagggccaccattcagtatacaatctcactgtaatgttttctcagaggcagaaacaaagtcgtcattttggtgttctccattattgatatcatctagtctgtctactgcgatattagcaacactcaacatctgtcaagtttagttgacacaactaacactttcagggctttcctgtggctcggtcagtaaagagtctgcctgcaatgtgggagagctgtgtgctatccctgggttgggaagatattctggagaaggaaatggcaacccactccagtatccttgcctggaaaatcccatggacacaggagcctagggggctacagtccatggggtcacagagagttggacatgaccgagtgacataacagttgtgtctaacatttcctttctagtttctaggtgctacagatttcctgttacctctattgataaatcctctatatttacttttgatgcacaatgaccaccaaagaatttagaaacagtgaaccagcagagagaagtgtctctacatggactaacacgatgtagtaagagaaggcctgttctggattccaggttgattactgttccaaaactgaattttaatgaccttttcccaatccagagaataattctaagaggcaataattttgacaataaaatataatcattgcaaagatgacaaaaacttgctaaagttcgcaacaaagtctggggaaaatactgatgcctcaccccgatggccagatgatctcatgatgaaggacacagatctgatgcatctttctcccacactctgtacactcaacaaacctgcaaaggcaaaacgtcgagttaaatccaaaacttgaaccaaatcaaaagtgccggtatttctcgttttctgacaattcaaaagatggccaagatcatgcccaaagaattgaagtaatagtgtttaaaagctctttaggtagagtgaatctcaaacgcagttaaattcagtcattttatggagtaaaaagtgatagaaaagatgactgctgtttaaacctccaaatctgacaccatcctgtccattccaggaatgtctagtaccagtacatttctgtacctctgaaaggtgtcactataaaggaggcgattatgaaacggttggaaaacacacaggacaaggctggaataacggcactgagcagaggcagcctggcgcttcacatgagcctatgaagcaccaaaacactagggagggttagtgaaatgcaaatgtaaaccacagcctcgatttttaacatttctaccttgtctgctagatgtaggttacagattcagcccaagaataatagcatcagcacactggctgcacaaaccaaaagaatgaaaggaagacagaaaatgaaagtgtactactcaaggggaactacttacagttcaggatccagagtgtcattttttctctttgaaaattgttctttatttattgtactaaggaaagaagaggatacaataagaaaaagcaacacaggaagattagcaagttgactattgttctaataaccaaatgataaaaacccccaccctgtaagattatttaaatctaagactatatcaaggatacagctggtacattcttagctcccacaaaacgcacgtttacatgcctatgttttgggaaatgactttatagtaactctgttcccactgacaggagaacccagtaagatctaaaagcatgaatttgtacttttttcttttccttttaaaatcttgcttactactcttagtgttagtatttatacctttgaatagtttactgtttctagacagctcagtctagcagtatgaaagacagtgtgtacagagggagctaaaccactattgaaaaaaaaaaaaagcattttttaggacagtccagtcaagcaactttttatattaataaaaaattccagcactaagaatacatagttcaggttactgacaggattagttaaaaaaaaagggggggggggttcattaaaaaattttcacatggcctcctatcctgaaatctagcctactactctgctcatagtctcacaaacacaggaggccacctacaacaaacttttgactactgtgattcttcctcataaaaatgaagcgatttccccattgaaactgtcttctcctagttacagactccagatccatcactacgtgccctaaggtattgctatccaaagtgtgtttggaagactatcagcctggatggacctgggaacttgtcagtaacgcacactctcaggctcactgccaactgtagaactggaagaggggttcctacacacttcaaagtcagagagctgctgtcctaaggcacagaacttgtggtaagggtgcctcccttttttgcatcagggaaaccgacctagacctgacttccctggttagccaagggttagaaaatctcaaggctcagaaaatctcaaggctcaaggggacctaaaccagtaccagaccccaccattttatatgtcaatggtgactaaaggaaaagtacaacttcaaaatccaatttgaagacaccaagtttttctcagaagccctgtttttactagtaacataacaattctgaattgctatggaaaatgttctgaattgtttgtttattgtaggttaaatcggaagagaagctgaagaatatttaaaggataccaaatagttctttcttcctaaatgagttaaaatttgacagtttgaatcttatagagattagaggcagttcaggcaatgtttaaaaaattttcttggcatttaccgaagcacaagagcttgtggattgcaaaagtccaaccaagtctctttataataagtcattctcacaacctcctaaatccctaatgatattatgatacacatgattctaaggattttggtattgttaacttttatgagaaggctgtatggtggttatttgttcaattctcctcaaactcaaaacaattaatgatgaagttaccttgcactccacactttcactttttgggagaagctatttccttatagaaggaatctatgaccatctagtactgttgtacccccctaaatcagtaccaagagaacttctgcaatgatcaaaatgttctctatctatgctgaccaaaatggcagccacgagccacaaatgtctactgagcaactgaaattagaaattttaaatcttattttaatttgcatttaaatagctacctgtggctataccatcctggacaacaaaatctaagaccacttaaaagcctgagcacgatcatctgacaacaaactgaaaagacataacagttacttacgtttgaggttgggaagggtcatcccccaaagaaacgctctccccttggatttcattgaaacacttctcacagaaatgatacctgtcggcaagaaggccatactggggtgaactgttccgttcacacaacacagcccaagccaagcaacgaagccaccaatcacagcaggccaaggagggggacgggagcagagagcaggtcatcaacggcgacaaggacattcaatgatgcagatttatgggcaccacagtttgggttttggtttttgcaatcaaagccaagtgcagacaacgacaagcatgagggaggaaaaaaaaaacacaaaacaaacgaagaaatgagggattgcagggcaacaaaaaacataaaagcaagacaagacaacacaaagcagaaagccaaggcaaagcacagattagcattaaatatctcaatgggatcacaagtagcaaatgattacagcaaataaacaagtctcacacagacctataccctttcatttgagtaattaatgctacttgatgcaaataatcaaagataggataatcaaaaatccacaatgaacatagtactaggaaataatcatctagaaacaattttggtctgaaaaaaaacaaagaacaccaatttctctttgatcccaaggaaaccacaatgtacaataaaaagtctgcacaaaccattaaatactgattgtagccacctagtttgagaagtaaatgaaaggcagtggtatgtgcagacacgcgattacatattccttggtacaaagactgcaagcgctgtagactggtgtttaaaatccaaaaatggtacataaatgccaagattatagcatgagactatagcatgccagctgtcacgtgctttttttgaacataaggtgctaataacaacttgagacccatctttccctaggttttcatgagtaaaaaactgtgggttcttacaactacaaagcattaggagaattcacctaactttttgtaaataaaacaaaaagtttaagtgactttttcaaagctagaaatacagctgtaatgcacaagttcagcaaaaagccaccactatggggctgctttatcaaagtactgactgtccagccatgctcttacactgtcttagagccccaagtcagcaccctatgccaggcacactgctgactgatttcacaaaataaagagacaaatcacgattaatgaatgcattctgtgtgatcacggtccttactttagtaggagaaaagaaggcagaagtgtctgacctactaaaagcataaccatccactgtcacgtgcatcctgtaaggaacagtccagtactgagctgtttttggaggtgttccttttgatgtacttaatagagaaaaaagcaagtaccctgggatcctctgattttatatgctccaagaaaaactgaggaatccattgcacacaaaaagggaattatttcctaaaagatacagctggctaacaaatttatggttaaaagttttctgggtagttttgggaatttcatggaaagatagaccaattagtttgacaattttctgttttgccagaggctgtggtaaaagaatgtggggcctgggacataatcccatgtatgctaccaactcataaagttgcttgacttcttcatgccttgggttcctgccttataaaaatacgggcccagacaattgacccaaggctcctttctactagaaaatcatgcaatttctcaaaggcagaacgctaagaccaggacttgtgctgtacagctgttttcaagcaagccacacacgaaccatgactgtatgtgtgctggtccatccgcatgcactccctggacacgcggacactgtgaccttggtccacacaggtcgagcttacctgttctgataactgtagtaagtggcatcacgagggattgtgcataactgtttgccatagcaacagagtgtctgtggagagaactccaactgcaagagaaaccattcgatgaatatggtttgaagggcaagctaaaatatttacactggcaaatcagaaagagaacttaagccttagtcctcattatgtctctcacgatgggcaatttcagtttccaagacagttcactgaactaaaactactctagtttactgctgtattattccaccactctgaggtaagcttaatagttgttacttctccaccagctgccaaagaactgaagagggcaggagcagcccagtgtgaattggcacgcacaggaaaactagcacatgccaggcacagtgctccgcaggcaaatatgaccaagttcctaactcaagatgaacttaaaacctgatgatccaaggattcaaaaactggtcaagttttcattgtaattcttatctgtgcaaaaatttcctacctttctgccacaacagtatccaaggctttgcatgacagggtcaatttcttgttcgaagacctcagacagctttgagcagtatttgtacacccgtgatgttttccgattatataaccaagcattgttgaacatgagccaaatgtcatccacatactgccagggctcctgatactgtccagtgtctaacttcctcttgatggtagaaagatccatagggctcttcacaatatcaaagtaatcctagaaggacaagtgacatcaaacaacattaccaaaaatctcagtatattcaaggtccacagcataaccatttaaaattttctaggtaacgctgaatctttgatgtgtctgaatgtccaaagaaatgactgatgcctatcacatctttattattaaaatatacgtttgtctatctggctgcatcgggtcttagctgtggcatgcgggagctatccttgcagcacataggctcccgagctgtatcgtgtgggctccggagcactcaggcctggttgcgccacagcatgtgggattttagttcccaaccagggactgaacccaaatccgctgcactcaaggttgattaagtcactggaccaccaggcaagtcccccaacacttccttaaatcatcagtctatagacatattaagcagacaggggcagagagaataacaactattctcgactttcttgttgttcagctgctcggttgtatctgactctttgcgaccccatggactgcagcacgccaggctcttctgtccttcactatctcctggagtttgctcaaactcacatccattgagtcagtgatgctatctaaccgtcccagcttcagttgccctgttctccttttgccttcaatcctagactttctagtagcaagctaatggtctacaggagcgattccagacactttattatagtatgtgtgtgattaacttaaagaccaagaagtcaaagacccttagcattttagtactagatggggcctgcagatgaaactaagatcatctataaaaacagaggggaaaaaaccaaaagattccaacagatctttacccctcgaagcactccaatgccttatccaacaccacttaaaatcctcaaatgaaacttgccagtagtctggtgtataaaggcaactttaaaagcagatgaagctaatttgggtctatcttttctatcatgaaactactgctgctcaactgataaaaataaagcatatgagccagcaatcccatttttagatatatacccaagagaaataaaaagacacacacacaaatttgtacgtaaacatttaaaggcatgctatcttcaacagccaaaaagtaatatccatacaaataatggtgggtcataagaaagaatgaagtactgattcatgctacaatatggacaaattttgaaaacattacgttaaatgaaaagaaccgtgtcacaaagaaccacatactacaagactccatttgatgaaacgtccagaacagactgaaggcaggccaacagctggttgggagtaggggggctgtgggcagaaatggaagtgactgcttatggacacagtttcttttttgggatgatgaaaaatgatctaagactgactgtgctgacagtcgcacaattctgttaatacaaaaaaacattaaaactgtacacttagattggtggtttgtataatatgtgaattctatctttaaaaagctgtcaacaaattgtaagagaaataaaaagtaccacccacatacttacagggattcctagaagctgagggtccacaggctgacgaaagggaagggattccggatcctgtcggtaaagtgcctccaatgttggcatcagtgcctgtcgtaactcttcaggtttgaaaactgaagaagagtatattagaaattagttaccaattaagagaaagagaggaaaaagttcaagttgaaactatataatatatacctcaagacccagaaaacactaaattccttacgtcgtccccgtgaaagatcactacgggtgtttctattttctggttcagacagatcctttaaaacaccctgtctagtcatttttaaatacccttcatgattagttaaatttcttagtcagaaactcacttcgtcttgaccaagtagcaagagaatcctaagtgctccaaaaatttagaaaaagactttttgtcagcatattccaaatgatacgacgggcaggggatgctgtcaagcaagaagagaaagcagtcccctcttcacaatatcagcggataacaagtcagaaattagacctggtattgtcttatcaccaaaggaaccagaaccactgaaggccaagagtccttcgttaaaatgtttgatgttttagagcttcagcagtagacatatttactgtttcaatggcaaatgttagttttaattctaaaaaaaaaaaacacccctaaattgttatcatcagaacgatgtactcagttatcaaattatgctcaaatgtgttctcagtatgtttcccaaaagtcaggaagatttgctggtgtgtgccaaatggaattacgctccgtttaagaagctggctattcagggttcatcactctgagcagaggcttatttcttctatttacaaattaatttcatcttcaagatggtatatctgtcagtaccttgagtattttttcaccgcatggtgagggctgccatgaaaaattcaaacaaatagataggagaagcttgtctcttatattaatattttgctgtgttcaaacagaatttgagcaaatttgtgagattagctattttaagtataaattcttaatagtaagactgggtttgttgcagcctacatcagaatcacatctccatatataaaacttcatttttacttatttttcagcaggatcttagttccccagcaagggattgaaccccacctcttctgcagtagaagcatggagtcctgacagtggaccaccaagaagtcccgacaaccttatttttaaataactttttagccccatcattttaaggtgcattgtcctcatggaacactttcataggtatcatctcaggagctagcagagcccctctaaggtaagtcctactacctgtgacactgaaggggtcactagagccgtaagaagttctagtcctaaactagctagtgaattaacttccgtgggacctgttaaacactctctgcttaagcatgcttgcttgcctcattaccattcagtagcatggttcagcctgcctggactaagtgagctgggttaagttactggaccttgctgagcctcagttttcccgcctgtgaaacaggggtcagggacctcacggaggggctgtgaggttctcagatgagacaaggcagcttgtgatacagtgcctggtgcacagcagttaacaaagaaaacaaagaatattattactgctgttatttcctgcattttgatccagagtattatttaataatttttgtcctctgaaagaattctgagaagttgtttgccacccagtaactgctggaaacaaatacacttaaaggaaagaaaactccttctccaacattagtaataatgaagaccaggcccagggcaccaggcttaatgaaatcacatgaaagttcaattccaaggcccaagaagcccaatctcacgctactgaagtctttagttttccctctgcctccacgaacccagagcctaagaaacttactcttcttctttgactgtcccggggctggagatgactgggtcgctgaagtacttggctggtcttcttcctcttttgtctcagtttttaattcagtgcctcgctcttcgctttctgtaggttctactttacagtcttctgctttaggctagaaggcatggtaggaatttttggcattccaaagacatgtaactgagtagcagtaccatcattatcttatttactctcccctgtggatggagctcaagaccctttctcaaatggaaatcagtaaaatgagacctaatcatcagagtcctttcctgtaacatgttcctaacccaaaaaagcagtaactgccctcctctcacctctggaatatcctccggctgagtatctgctggttctggtgcctccacttccattttaggctccatttttacttcctgtgaaggctgcttctcaggaatggtctgagaattcacttccgtgctactagtagatggagggtttgatacctgcccttcaatgctgacagctggctgggaaagctgggtagaaaagggcggggcagagaaaaaaaaaaaaagtccgtctattacaaaaccagaatttaggctatatgacaagatggcagaataaccacctatttctaagctagtgtcattacacccatttatggtgtcttggggctagtaaaaaactcgcctgcaacgcaggagatgcaggaaacatattcgatccctgggtcgggaagatgccctagaggaggagcgcacagcaacccaccccagtattcttgcctggagagtccccgtggacagggcagcctggtgggctagtccatagggtcgcagagtcagacacggctgcagtgatctggcacgcatgtgcacacatggtgctttcacttactctgcctagttggccccctgaagtaaatcttgcttaagaaaaggagactgaggactaacaaatatcggccggctggttgtacacacaagagtcagcaactgtttctccagtaacattctaggacagcgcctgggagggaggcttcagaaagggctgcctcagaggagctcatgtttatagaaaaatggaaagaaaataagaaggactgatgggcaatcttttagttttaacttctccttaggaaaagtttcatatgtacaagttcggagaatacaataaattcccacaatgagcagctgttttgagtcatcacattctaatggataactaacaacctctatttttcctaagtcttgcagtaacatacctcttaatgggaagtcagtattttcagaatctatcctatgtagaatacagatgcctttttgcatcctgccttttcttacatatcagaggctaagatgaactagtcacacatgaacaatgtattaagaagtagcgatgactcccagcacttctcggtttgccaataggacagagaactatcagcgatcatgtagaaagtttcaacagtggcacggagagttctgttaataaggatgtaactggtggacatctggatctctgctacacaggtaacacatctttcgcaaggagtgtttcaggcccttatgaaataccttctcatgaattttctaactttggctagtaccatagacattcataaatcaatgattttgttcatttgctcttgagcacagcagttcaggctgtttgaaaagattaagtatctgtaaaattcacgtgtagtactaaacgtctggtcgctcttctccccttacatgctttcaagcctctgaatacaacgtgaccgcggtcaacataagatctaaagaaaatctttgaggtccttctatgtgaggtgtgacagcaaaagtccgtaaacataagaggcgacagtctgaggaggcaacagtgagagaagaatggcagagaacagacatggcacagggaagttcccccgaggtccagtgatagggactcggtgctttcattgccatggggccagggtggatgcctgctcagggaactaaggtcctgcaagctcaccacccccacccacctcccaccaaaaaaaaaaaaaaaaaaaaagaaaagaaaagaaaaaaagaaactgcactgaagtagtgtcaaactacagtacggctgacatggttctgctgaaagcccagactctgcttactggagttgccggctgcggaggcagcaggggtgcggtcggggtgggcacagaggctgctgcgctttgctgggacaggggctgctgctgcgcctggtcgactgagggagcagcaggaagcgaaggctgcacttggggaggaagttgcgttggcggcggcgtaggcgtctgtcttggaggcggatggagaacctgggactgtgggccaggtggcatggctggaggcgtaggaacaggggctgggattgctgttgctggtggctgctgagcccctatgctagggggagtgtggtgaggggtgggggtgcgactaggtacgggtgagggtgagttctgatgcagagctggttgagggagagggggacagtgaatgtggctcccttgagacccgggaggcattataggagagttcacaggacaggaagaactggacatctgtgcctgttaaaaggaaaaacataacaagatgcaattcagaacagaatcaaagaagtatttacataggcaggctacatacatttaacaggaatcaacaatgaatgcctccatttcaaaatatgtcaaaaaccctattactgggggcctgtctttgggaaatccaaccagtacagtactcagttaagtggatgtctcggggctgtgggggcacgggacaggtgaacctgttgttttctagccgtccaatgctctcttcagccaaagttctctcttctgcttcatagcgctcagtaagataccatgtttgaagagttcgctgttttaaaaactggctaaaatggttttctttaaaatctaatctctttcttacttgggcttccctggcagctcagttggtaaagaatccacctgcaatccaggagacccagggtcagtccctgggtgggaaagatcccctggataaggtgatggcaacccactccagtattcttgcctggaaaatcccagacagagaaacctggtgggatacagtccatggggtcacaaagaattggacacaactgagcaaataaaccacaatcacttttttcttacttattaacaaggaataccactgctgtatcacagagtcatcacttcatgttcagaatactatgtccataactattttaattaaaagcttaattctgatgcccttctctgtaaaaacctacatcaagagaagctttaagaattgcacaaatttagaacaaccatctgtgagacatacttgagacactggtgcttgaccgccagacggagccaaaggcatatttgttacattcattccctgtgttgagaattgagtctgaggaagaaactggctctggctggaaggctgctgcatgcgaggcccgtagcccataggctgtacacacacacacaaaacaaaacaaaacacagagcaccaagttgcttcattttagttattctgctaaggctggaatcatcaattaattgctctggccctgctatgggagggtggagaagaaaaagaagaaagtggcttgagatcagcagacactcatgccaaggtaacagagaacagcctcactacttaacctaaagcccactcactctacagaagttacacacacacgtctagaccgaggtacagaggtaattgtctttatacactgcccgttttataagtgagaagagcaaatcagtttcatgaggtttttgcttatgtaggtattattaaagcacaagctgtaagactccatagtgagtaattatggataccaaaggcccaaaacttcataatcaaagaaaggcgtttgtctcatagattaaaatgaaaaataaaacccctcattaaacacagcagctcagaggcgagacaactccaaaaaggcccaatgactgacagtactaactctgggaggtagggtaagggctgtgggccaacatggagaggtggatgacaggtttagaatctgcataaggagcaatgagatgctcagagtccctcttctccacttgagaaccagacaactgcccctccaccactcttgacagtttcctccctgggctctatgtttggggaagataggcattacggaagagagaggactctggcaaagtgtgcagactactcaacactgagtgagactctaggcagtgctggctgggtgctgttacaagctttctagtactatgactagatatgaacagtatttggaagcaaatctttcttttagtgtttattttatataaattataatccagagagttcttaactgtacaggatcctatatactttagacacatgcttttcccaagtaaagccgtaaacagctttcatgctctcatataagttctgaaattaccacttaagaagcattccaatttacagatgtaccataatttaaccataatgaatcccttaatgtacattcaggctatggccattttctaaaacacattatataatataccacccttaatatgaattttcttcaaattatatcctttcagtatctcaggaattatttctataagataaatttctaaaaacaacaaatataggtaaaaagaggtaagtgaaaattaaggactttagtattcactgcctaattgtggtatatggtttagttttaatcatttaatcaggtctgtgttaagggctaaatacaacaaaattctatgcaaaacaaaaaaacccaaaaacaacagcattaagaactaattgcatacagttagctgtttaagcaagtgttagaatttgttgtctcagagaaaaggaactttaaaaaggtcaagtaaaggccaaaaagatgacccagaagtcagacttaccgggttaagtgttccagtttgagctaactgtacatggtgctgaagaggagaggtttgccggggtccgatagggggctgaggcatattcatctggccaaattgattcaaacctgtaatcagtacaaaatactaaatctgaacaccatgtgactggagaataagagagttctttacaattctatgtcattttaccaggacaaataaaggaacctgcttccaactgtgaaagaatctctgtttcattcccaacagctacagaaaggcattgttaattaatgcatggtctcaaccaaatttggatggaataaatctcatcgtggctagttgtttttaaatgaatgcttgatcgtttgtatcttttgctcctagacctgccagccaacctgctcttcacccttcctccctccctgggctcctaatctaaaaggctttctgatttctcaagcagacaatcgtaatacctgctgctgagtggcagcaggaatcaaggtgacaattttaagcttgtaatacactaggaattctgttaaaaaacaaaaaccttaccaggttgtggagttacccgaggcatcatctggtttggcacattgccacggatcatagatggatcagggagagggccatctagagcagaacagagaaacggttagaaacgcacctttcagccagctattcccgtttaaataaaagtagtaacttacagaattcagtctatcaaaagaataaaggtttgaactagagaggaatctgaagaaaatgcttttttgcaatacaagaaaatatctcgaaatggtcttagtccatttctttatgaatcagggtgcttttggtgttgacaggaaataaggtaagatcttatattgaaaaagactaatatcggagaagccaatggcaccccactccagtattcttgcctggagaatcctagggacaggggagcctggtgggctgccatctatggggtcgcacagagttggacacaactgaaacgacttagcaggagcacactagaaccattgtttgtattttaaaataaagactacaatttaatacctgacaaactttaaacttggctcaaatttctaaagaagtcaagtaaatggtaccacactcgaatatctcaaacttagccacttgtctctatgtcgtagttactgctctaattcaaactatcaccactgaagcagtgtcctcaactctagtcttgactttgtttctgaacaattgttttacctatctactaaaaaaaaaaaaaaaaaaacacacccaaacccacacacctgcaattttcccttgctagtggggtctccgtgcatgttgttctctctgccagaaatgctgttctcaattcttttcaccatcatggtccaatgagaaaatgtatccagcacaccacagttaacacatgaggctgctgaaagctctccacctgactacttcaagacctgtggggtgtgaatttctcagcccattcaccattcaccaatggcctaagagttggtacctgctggctcagttggcactactttataggcagccagcttttcctgactcaaaaaacacaggttttccccatcatagccgttcacacatcatttaaacagttcttagcctatgaacatactgggtcaagaaagtgtgacaaggtaagtaatctgatactgtttaggatgtatcgaagccagtgaggtgcttgcctgctgagtctacatcaattggctgcctaccacatgcaggtcagtaaaaacccatgggctatcagttcctagatgtcactatgtggcactaaaaatgatgccatattgttaagacaagtagcaagtctagaaatcttcaatatactgtttaatgtttttactagagaacgaaccaagttctttgaaaaggcaatagtcatttgaaagctctagaatagtaacataagctaatgcaaattagtgaatttggttagaaaccattttatttcagcttctcctaaaaatacataaaaagcacttactagaagtcattcctggttgtggctgccccatgttaggccctgtgttcataactggcaccatgcttgcagcacttggtagcatgttctgtttctgtagtctagtccttcgcttttcttctagttccttctgaatcttatagatcttctcagctagcaggtggtagtattccgcctttttgaattttgttaagtagagatgaggaaaaaagatgaactaccatcaggtaacagaaaaaatgaactaagagcaaacatttgcttcatttaaaacaggcagaaatgaaaagggaaaagaagcattctaatctattttcttagatcattccaaatatgagctcacatttaaaatgatcagtaaaaaattgctatataatgaatctacatagtaaggcatgacttctcaaagtacaattcccagcatgtgcaaagaatatgctacttcttaaagaagtgcgaatttaaagaaagttcaactgatacaaaaatactacttgagatgaagatactaagcagctgattcaccaccatattccagtgaaaatagcatggagcatggtaacagctcaaccactttttagctgccagaaggacaacccagataaagtgccacatgagtgcgctgtattaagaggaaaatgtaagattcttgacatacactttaagaaaagtgttttgttatcacaactccacagtgcattacaggacagaatggctaaagggtgtcctctgaggtatagtgttctgtgtacgtgcaacaaagaggaaaaaaaataaacaaccagaagaggtccacttttgctttaaatagaaaaaacagatgcttactcgattgtttgccgattcatacatgtccccttccactttccgggcatatgcaactaggttttccatccgtctgtcttttaaagcagcaggatccggagtgggaaatatggcttgaacactaggaatataaaatcctaccactattatatcacgtcagcttttttttttctcatcatagaaacacacagtattttaaatattttcctggttagtattttctcatttttatacaatgaatactttgggcaaaattttaaaataaggcttgagatgtgttcaaacataaattaccgaccaaaagaagtgtctgtctgtattaatcaaatcaaagggttttcctgatcagaatataagaaccccatagaaatactctctggtccctattaccctaatgtagggggaaaaaaacacacctgtgctatctgcatcacgggaagtgagaaaacctgacctttactacagcatcatgtagcaaaagccttaagattcttctactctcatactcagcttagtgaaataaaacctaataatctctacaaaatcttaaaagatcaaaaacttgaagtgaagggagcaaaaatgcaaagaaaattctgctaaattcaatgtcttttactctctacaattcctcaaaatgcttggcactaactttcctgaaggctgacaaatgtgatttcagctatgaactttatcatctggacaactcatggtcagctgtgtgttacacctgaaggaaccaggtggagaagaaataaatggaaatccgagttagtaaaaagttctcaagcatataatactaacattaagtcagatgatcaatcccaaatagcctattgtttctattaagtttctaaacaatttgatcacaagataagtttgttttggttattccttattaattcattgtattaaaaataaaatctcagttttctctttgtgtcaaattccatttctggtgctatcatttgagaattcctaaacgaagctcaagtataactgataagctaatgtaacataaaaataaactaagaagataagacagactacctggtttcaaggtaacaaaaaaaactggatgaagtggagatccctctgctctatttttagggtactgggtatattacattttaccattttatatgccttacgcctctttcaaccaacaagacagtgtttgtgaggcagtgtgcctggcatacactaacttcacaaaaaacagtgcacaggtatttcacaagtaattgctatgtacacatcagaagaccagaagaccagagaggccacccaaacagattcaatttgtcaaaataataaaaattttaccaaggataacagaaggctgtgttgccactactattctaatgatctaaattaaaacctagtttttcttttaaaatatcagctttataaaggaaatgattatttaatatatattgattattgtcactagacagaatcctcacacatggttaaaagctaaaagacacctaagaaatgatggagaagaagttgagaagcagagaataggaagcaggaaagccacaggagaagtatcagcagcaaccaggctatagaaaaatcagtaatttctcgtgtttaagtgcctggcagattgaccttgtaactccttatgaataagacatgccaacaagcttacagtttgtggacaagatgatttcgaagatcctgagtaatatcttcatgccattgcttccgaattccagtactggatggttgagctgctgttggcataggacccagagaggccacactgccattgtcactcatcattgggctttaaagaggagtgaaacagttttagcaaagaagggtaggagaaagaggctctcatttaagtagagattaacagtgatgactgcaatagggccaatacactatgacaagtctatttacacataaatctgggggaaatggtatgtatgtatttgtatttgtgaggggaaacaaaacacgcaacatttcactgtgtggaggggtggctgatatcttatgtttaaaagacacaagatatcttgtgttagaagattaagccatcattttgacacagcttacccaggaatccactgggcaatggactaattgctagcattgggataaagcaaacttgcttttaagcaaacttgctttttaagcagctgcatttgttaacttcctactgtatttgtaaaggtgtcagttactccaaataattgatataatttctaaagaggttatacagagcctaaagaaaacacatcatttgttatcattcatcaaggatattgtcaaatcaagtaaacttataaagcccagatacggagctctaagtgtctgaaatctgacaaagggcacaagccaagattaaaacttacttttgagaatttatggctgaatgcaacatcgagtcagaaagaagattcgacggttgaacccctacacctccgtttactcccataggactagcacctacgtcaaaaataaaaagcaagagacggtattttaaataccaaaaaatgataacaaaaacaacaaaaattaaggataaaaagaaaggaagaggaaaaactatgatagtactagaataaaacattacaagaattttttgtcctttcaaaagacccaaaacagaagttttaaggatatttagaaatgtaaaagtaattagtagtaagtaaaataatcaccataaaccaagtcaagagacagatgacaaatctggggggggaaatgataatatatgataattacttgcaatataatcagcaacacatatataaaggctactacacaaagtaccttcatagcatagtaagaaaaacatgaacaagaggaaaagaatttacataaaaaagaaatacagtagcttaaaaaatatacatgaaaaacatataattttttttatgtatgaaattccaaaaattttttttgcgggggggggggggcgcgcgcggggcactgggcttgtggaattttagtggcttgttggggaccttagttccctgaaccaggggttgaacctgtgccccctgcagtggaagcatggagtcctaatcactagaccatctcagggaagtttgagaatacaaaatgttgagaaaggtttgggaaaagaagcattttctatgaaacttcataggtgtgtaaactgatccactcttgggaaagctatctggtaactgttaaacaaaggaaaaaaaaatgtacacacattttcaccaacttagatttccacttgctattccatcttacagttatactcacatatgtatggataaagataagagtaatggtgtcaaaaggagcaaaaaactagaactacaattgtttaaggaaccgaacttaacacatgcacatgttttcataagcaccatctatgtaagaacataggcgacctaaggatgatgatccccagggaggggaatgaaagatagtatttgcattacacattttaaattgactactccttcaaactggcttggatagctctatgtattcctattacttgtttaattaatgatttaatgaatattacttctttaaaacaaagaaaaccatcaatggcagtatttatactaaaccagattttcatgtggttaaaattttttgattaaaaattttattaatatatccttcaagatatttagttaaaaataagaaaacaaaactcctccctaaaatgcaaataattgactggatttctcaacagtgtctaataaaaatcctactgccttctttcatcacacttcccaaatggttaggcagaactctcctaacagcatcaaggcaggctctgaaatgcagttgctggtagtggcttatctgtcactatgaaacattcatttttaagaaaattacacatccttaacacagatttgtttcactggtggcaacagtaatgaaggtaaagaaaaaagtgattatactattaccgatttgcttattttactgccttctgatggcataggaaaaaagatatcgacattctctccaaagtatccaggttcatttaatctttggcactgattgcaagtaatggctcaatctaacttgagaaagatacctttacacagatttgtatataagaccctaagagtgagcattcacttgagatacaaaaatgtaggaataaaaacactactggcactgacagaataagtcagaaagaaaaaaacaaatgaacaaaagaaaaattcaaagcacctaataatcaagaaaatacgtaatattttaagccctagggagaatcttaagccttaggagaacgtatatttttttctaagccctgacaaaatcattatacattaagtgaatctaatagtaatcagaagattaagaatgtggttaaacagggtcatgggggccttacagtaaaaagttctaatgcagagttccgggagtggctccctccttcccctctctgctacagaatttgtattacctgaaatatgcagtagagatcctgctgttttgtctatttgttcacttacctgctcatccacactaaagatgtctcaaaagtagggacaaccaattactgagcccctgtgccacaactactgagctcgcaagcctgtgcttcgtgacaaagagaagtcactgcaagaagcctgcctaccacaacaaagagtagcccctacttgctgcaactaaaggaaatctacgtacagcgatgaagacccagtgcaacggcccccaaaaaatggtaaaagagatcaaaattttaaaaaaagaaagactcagaaaggtaaaagaaatccaagaagctaacttgcaaataaattaaactcctctctcaataactctttaacaggttagcattccttgttataagagtgtatactttaagttaaaaataataaaaatcaacaagatttatatttttatgagtagtgtgcccaactctgctctctcatttagaatcaaataatgtgcaaaaactaaagcctattgcacctatcaatagaacagcaaaaatgagtttgacagaaaaaagcatggtagattacttcaaatcagactgctgtctagttacagagaacttcattaccaagaacggttttagagtaagaagcaaagtattaagtcatgggcttaccaaaactgctttatagatgtttaactgcttgacagtaaagagataagtcttagagccaatctctttccccatataattacagaataaaaaccaccctcaaattagggtataagaacactgctcactcttcccttccctctgttctataacagaaagaggttaggcaaacaagtgtatctgataaactatttcaaaggcaaatcactccaactaccagatacattgaaatctatataaacaataatcaaacacctcaaaccaaaagaatacttccagcccaaacacaaccatttctttctatactttaaaatatcaaaaaatttggaaacttaaatgtccacctgtaacaagactgttctatacaacaaaatactacagaagcatcaaaaaggatacattaggtacagaaacagaaagatgttcacactgtattaagaaacggtctgttaaaactaatgggatcccattcctagaaacagaaactaatatatgcacaacaagattaagaaggatatacatcaatagctgtttcctctggtatatggattacaagggtatttttacactattaatcttttaaaagttatttcaaaaaattaatcacataacagaaacaaaaaagatggggagacgggggagcaaacagagagggagtaaaagagacatacgcatacacgcagactaaaataaaccaaggagctacccttgcatgttacacggcaatcacacacacagctggtgtcacctctgtcatgacgaggaggacacagacttactcatgttgctcatgggccgcatcccttggggagactgcccagactgctggttctgcggattcttcgcttgcacctggggctgggtcggcatctgatttacttgatagggcagtccaagggctgcataggctctttctatagagctgggatcaatctgactgacagtgcttaggctgggagtggactgttgacccacccctagagagctagtattgccaagtccaactggtgctccagtcaaaattgctagggaaaacagaagaaagagtattacaacattaaagatgctgagacaggaaatactatcatgtgtgagttttaaaatacaaaaatactgttgtgtgattatgaaatacatgcaccttgtttcccattatttccttaaatttctaagcatagaactgattggtcaaagggcatcactggcatgaaaaacttttgatccaaaatacccaaaagcctccccacaagctgtatcaatgttcccaccaagaatacatgacagcgtgacaggaaagaaatggtattttatttcattacttaatttaatagggaacttttgggtatttcctccttctagtgaactatttcctagtcctaattctctactaagatatctatgatttatttactaatttatggaatttcattccttttaaaaatatgctatatacagttccaaatttatctttcaatcctaaatgctaccttcaatcctaaatttaggatttaaatttttaaatcctaaatgagacatggtggctgcactttctacttttgatacttttttttctctaagaaaagctcatcactcccaggcttctaaaaataatctcaaacttttcttcaacattaatttcaaattatctaaatatttagatcacaggtagagaagaagaagaatctgcccaatgtcaaagcaatgatctttctggatcttattttaagtaataaatacttcacttctaaccttattatcatgaagtttgtgataagcggaaataatctaggatgacagcactggcagtcacaggaacttcatataatcaagaagtacattaaatctcaccaaactgcactggtgaagagtctaagaatagtttgatataaaagtttccaaagatttcatcacttacactgttgatttctcttatctccagcatttttaaggggtagacacacaggacaatcatgccttgtacaattcttccagtgtgaaatgatttgtcgagaagatgcacagtgtgccactaataagaaaaatgattttttacattattattagctaacttatcaaccatataatgagtgctacaaatgttattaatacatcttcctaacaccccctaaagggtgtattcttgtattttacagttgagaaaataggcaaaaattggttaagtaatttgaacaaagtcacacagcacccaaagtgggattcaaactcaagcagtctgatttccagaacctctatttttgaccacaacactgtgtgagaaaaatctttaaaaaatagatttctcttaaaaaaaaaaaaaaaaaaaaaaaaaaagggtacagggcttccctggtggctcagtggataggaatctgcctgccaatgcaagggtaccctgggtccaggaagattccacactccacagagcaactaagcctatgggccacaacttctgagccctcgagctctaggccagagagctgcaactactgcagcctgagttcctagagcctgtgctctgcaacaagagaagccaccaccaggagcagcccccgcggcctgcatgcagcaatgaagacccagtgcaaccttccccccaaaaaagggtacaaatgaacttatttataaaacagaaacagaattagagatgtaaaaagaacttctagttactgggcaggggaggtggaaaaattgggagattgggaaggacatatatatattactatactctataaaacaggtaactagtaagaatctactgtctagcacaggaaactttactcaatactttctaatgacttacatgtgaaaagaatagagagtggatatatgaatatgtataacatttactttgctgtacagacacaacatcgtaaagcaactacactccaataaaaaatacagattcctaatggctctataattatattaagatgggtaacattctttttagtgtttgcctacatgacagcaactctcaatatttaaagctatgctggggcaaataaaagttccttgcaaaagagaagtctctaaaacttcctctactaccacatctctagatactcaaaaaatgatactgaattttatcctaacatagagtaaggcattatcagtaaggagtctcaggagagagaaaatgtgatcagctataactataaataaatattgattgcgaagcataaaaacctctgagcccactcaccttggcaggacttgcccgactggcagtgtgtcatgtggttaaggacgttcttcatggttcgacagtggggaaggttgcactgcctcacctccccgttggcctgctcccggcgctggcacttgtgagcgtgcaggaggaggacaagctgctgctggatgagcttgcgcttctccggatcagccgtatgtgccccagaacccatcccctgggccactggagccaccaggcctggctgctggacctgtggggcctgctgctggccctaagagatacagaagtaaagacacatgcaatgttaggtgtcactgggtgctacctcctgcataaatacggacctggagattttcaatgaaaacctttaacgacatgtcatctactaggtgccagacccaactttttaacacaggggattctaagataaataaacgatggcttctgccatcaagaagcttaatttaacaagaaaataaattactattactatattaacaagtaatataatcaaagtatgtgtaacatacagagagtaaaagaaagagaaggacatggtaaagtacagtgcaacggggtaaataaaggaatctgttgtgaagggcatgttcaagttaggtcttgaaatagtgaagagcttctcaggagacctggcaggggcctttcaggtgggtgaaaaactagtttttgtaaactctggacaaaattcgcttttttctatagaaaagtaaacatctctggagacagagaaacgtgttaatcttttgtctccagtacttggcagagcatctgaaatacaggcattcaatgactatgggacataaagcaaaaaacctaaaatatctgaaaaggaaataaaattcctatagtacaatttttgaagacgaacatggactatttgacacatttacaactagaaatagttttactttagaaaaacagcaatgttagaagagttggagattttcccataacaacagtcactgttaaaagtaatgtttaactttgagagggagggaagttacttctaacagtatcagatataaatcaatagatatccagatgactgaccaaagaggaaaatggttccactttcctatcctatagaaagaattgcgtatacaaggagctgaatatggcaggaccccaaaactttcattgtggcagccccatttacttctgtttggactaacacccttactggtgttagtttttttacctaaataaacaccatgtgaaatggaaggcaggcataagcttccttgatcacagggaccatcccattacaccctgttctgctgtaaagcagaacagaaaacataaaagtttaacagaattcttaaaaaaaaaaaaaaaaaatcttttggctgcaccaagcatgcatggcatgtgggatcttagttccccagccagggatggaacccacgccccctgcattggaggcacagagtcttaaccacgggaccaccagggaagtcccaaacacatttcttttgctcaagtgtcagatggaaaacaaatctgcagatagattactacccaccatattgggcattcctccaccaggaactgcctttttgtccattgcaaatggagataagctatttggtagtacagactttgtcggaatctggagaccaaggccactggctcccatctgctgtccagaattctgagtgtatggtgaaccgtaaggattagggttgttcatcattcccatctgagaacaagaaaaagaaaagaaatcacatcttattccccacactaacaggacagactatttcctttccttttccacttcctaatttacagagacaatttaaaaagaaattctccgtatataaaaagactaggggcctgaggtacagtaaatttagaggtatttcctgtatttatgagatgttaccaaaaatttgtcttcatttagctacacctactaagcaggttctgccattcatctccactttcaatgtactaaataactttcatttaaattcaattcaactcaataaactatctaatccttaaatatattagagaacttgatatatcaaagcatttgaatgcttattccagcattaaaaaaaaagggggggggacttcccttattgtccagtggttaagactctgcttctagtgtagggggcatgggtttgaagtcagggaactaggatcccaaaagctgtgtggagcagctgggttaaaaaaacaaacaaacaaatacccaaaacaaggtagaaaactggtcctttgggggatatgtctttttttaaatttagggacacagtagaacagtgatttaaaatttttttgaatctgaattatctagatacagcatgtaaactttaaagcctgcatttcttggtagcttacacctagctgctttattaaattgcctccttggctcgtaaagtaatctgagtgtatttgcaatccctatgtactctaaaaaggaagtttgggggcttccctggcagtccagtggttaggaacctgcgcctccagtgcaggggacacgggctggatccctggtcggagaactaagagcccatatgccacagagcatggtttaaaaaagcatttccctgtctttatctaagtccatgtggaaccatcatactgtagcttaaagaacacagcattaattattcaaaagccaaatgttttattggttaacaatgatgcaactcacaactctattcttccacataagagccctgtgtaagttaatcactgcctacctgcaagcactcaggagagaaactaaggatgctaaaggagtcacaccagatttctcacctttgtcagacagatccaatcctatcaaagggtccttcaaattctatctctagccaccgagtcccatgtatccgtgcccactatcactgtcttaattcaagtccctgatcacagcttttgtaggctgttatctaacaggttttcctgccatctgtcctcacttttttctactcataagggggaaaaaacgatggtataccagacctttcattatcttcatgagaacttgactacttttccatggcagaagtactccgataactggaatttcctatgtgaatctgaccagtgaaaatgtagggataatcaaatacaaaaacaggcttacgtgaagttccagtttctcctggtagttccaaatggggctcagagcactgctgctccatactgcttttaaagtactgatatttacactaacatagttccaacagtgtgatcgcctacacttgggggagttggatttcacttgtgtttcttattagcatgggaattcacggtagatgtaaaacgaaagccatttaagagtccacaatttatataaataaaacattggaattagtaagatgccttcatgtctcttgttaagacgcataatgtctttatcaagtacatcctagtagagtttggtccttcacacatttgttcacatagacatcaccttgactgcctacaacaagtttcagcaattcctgacattgcttgttccctcaatcacaatgcacagcctgggaactccaggttccctctagcagaccctggtctcaaaaatatagactacactaactgctgatcagatggcagtaattcattcctaacacttctggtcactgggaccaacaaagaccctcaggctttctgtgtgccatctccctcagagttttgctgcccgtgttagaaaataaacacaaccaaccccctcacccctaccgtttctatctgctcaaccccctctactctctaagtataataggaagggaatatactgtacttaatttctgctacactgtagttagttatctcatcttgttcccttctctacagctaatgtgatccagatgtccagctacctaccacctacctggaccagagcgatacagacctccacctcaactgaaaaggcagaggaccaggaagccacagttagttctaggcaagtaaaaccagaggaactgcaagggagtattttatctttctttaaaaataaatctgactctacaggttgtttcttagtgtccaatgcattaaaaacagaaacctagggaacacaggaacacgtaagacacacgatggtaacaaacactggcaaacaaaaaccagtgcccaaaatacaacaatgtgagcatatctaagagacagaatccccttagtaagacttgcatgtatcaacagtaacgcacaccagtagtaaatgtgaaacgtgaaaatgtgactccatgaatccccaaataataaaaacaaaattaaactacatcctgacctggtctacctaatggatttgataaatacatctatatccagtcattccccaggcactctgtcaactggtggcgggtgggagaggaggtggcagggagatatgtacaacgataaacaaggaagactagggatctttcagaagtgaagacacctaatcctaaacattttccatactcattcctgactcttacactactgacttaattcaggggcctcacctccccatagggactatttttcaaactgatacagcacatctaaaaccacacccatcaagattgcaaatttgggagtatgagtctcctttaaaatccatcaggatttggcataacaacttgtctttttctctctcaggatggattcttcctctctgccttatacttaatactcttacttttaaactttacaggttcagtactcatataggtaataaagtctttatatttgaattactcctccccatgaaaatataggctccacagagccaaggatttttttgtgtgattaatttactgctatatatccaacctgaaacaatgctgatgtagaaatgtgtgattcagattataaatagaacagtgacccactctcaacctaggcattctcctagtgagccttttcttatttttcttcacagcactatctggaatactattaacttacatcttatgtgtaccctagaaagtaagttccatgaagtgagcttattcactgctctagcttcagcatcaaagctacgactcagtaaatatttgctcaatcagtgaaggtgtaatgtttgtcatccctgcccccatataaacctcaggagggcatggactcttaataggcatatccctagaatctagaagaggtacttaataaatcctgtagctataaaatatatatacacacacacacacacaccacacatatttaagggctttcatttatctatgtgacctcagggttcccactcccaattcacccacgttttactttcattctagaactctcaccatcatgattctcaggaatacataagtcctaatgttgctcaaattattcctcttacagagcacgcttgctcctaactccaagtgaaaaatctctcccacctctaatatcaccttacaagtgaagccatctctttcattcaataagaacttaggaataattacatgtcagagactggcaactacagtgtgatgtcatttcaagaaaaaggaataaaatgtgtaggaagaatatggaggaataaacatcaaatatacgctgataaaattttaattatacagagtacatatttaaatgtattttaaaatgtatttaacattctctacttgataaggctaagaaagtaggctttttaaaaaagaaaagtctttcaaataacagccaagatcaggttaattagaacacctggaatgttggttggggcttaatggcaaactaacacatcttagggtttcccaggtggctcagtggtaaagaacctgcctgccaacgcaagagacgtgggttagatccctgggtcgcaaagatcccctggagaaggaaatggcaacccactcccatattcttgcctagacaatcccatgcacagaggagcctggcaggttggagtccatgggtcgcaagagttggacacaacttaagtgactaaacaaaaacgcatcttaacatccatcaaccaatatggaaaaaaaataacacatctcttaaaaaccagggacattccaagcaatgcgaacaaatgaagtctatctgaagatagtatgccagctctctcaaaactgtgttttaagggaggctatgaaggctaaaatgagatgaaaatattctaatatttgtgtcacagggaacaggaattagctggcaatcaatttgaaacaaactgtgaaggtaccttcacagctgttaaaataaatgtatcacttacatttaatgtaagagcattataaaatttgtgacaatagatccctggcatagaatatgtgggaaatgctacataatataagattaaacataaacagtaaagaacacatgagtaactgacctcaggccctcctcctccacccctgaacactcagaaatacacagacagggcacacaaacggaaactgcactcaccttaagaggctgggggcctctcagtcccgcctgtcctcccatctggggagagccttgctgcagtggctcagtcatcaagttgccagcacttcccatgcctgggtttgggtactgcatattaggtcgcccccggcctgctccaattgaaccgttcatgacttgattaggcatcatcccttggccactgccggcagtcaacattccaggattcatgccagcattcatccccgtgttcattcccatggcaggctgattgactggactgctcatcatacctgttgcagatggtgtgggaccctgatttggtccaccagtgcccatccccatgttgggagaagtcaagcctgcctgggccattgggcttttgaccatgctatttatcaaacctaatccaggactgttctgttgggcttggctggccatgccttggcctgggccaccaacccccatactgaggttaggggaactaccagaccgtagcaattctgacagttgtttatgtttagaggctgcatcttgtactatgccaagacttgtctgaagctgactaatatcaccaccattggttagtcccaattctgtagagttgattaattcatctggtaagtcgtgctccaagtcaaacagagagccaaaatctaaaaacaaagaggaaagataaaggttaaaatgtgacagtcaaaattacaaatttctctacacttgttcttgataagcattaaatgtcatttctaaccctcagcccatggaatactatctgcttgtattagtttttcatgttacactaaagttttactttacatgtttgtgtgtgtgtacaaataaaatatacataaaagagtactatcatgccaacaagtttaaacatttataaactgtacctaaaataaaaccaaagaagaatacatattagtgtgatagccagaatttcttacaagaggttaaaataactaatctgtacacagactaaatccagaatctatacacagacttaattcagaatgaaacaaaagattaaatatataataattataaaaaagacaactgataaaaaggaaaagatctgttctttgtagaccactcagggtaagctccaggaagacgggggctgcttacctctaattgctatcacacagcgcctgccacaaagctgaataaagttgtgttcacctgacttcaaaccacagattagttttccttaaccaaaatctagctgagtaagatatgaaaccatgcgtctagttccttcaccaacctacaaaccattaccactccatctccgccctacccctgtgccaaaaggaagatgtgaaaattacagattaacctaggcttccttgtccttggcactactgaacattctaggctagataattctgcttgggaggaaggaaaaattgtcccgtgcactatgctcagcaaatccctggtctctcttgttgatgctagtagtacctctaccaatttgtgacaatcaaaaatgtcttcagatatcaccaaatgtgccttggaagtgcaaaactgtccccggttgttgacagtattaattcattatatgctgatggtggaatgtttccttgtgtactccagggggacaagtagaatgaaagctgcttaaaagtatacatgattgctgctgctgtgaagtctcttcagtcgtgtccgactctgtgcgaccccatagacggcagcccaccaggctcccccgtccctgaggttctccaggcaagaacactggagtgggctgccatttccttctccaatgcatgaaagtgaaaagtgaaagtgaaggcgctcagtcaagtctgacccttgcaactccacggactgcagcccaccaggctcctccatccagtgttatgtaaatagaaggactaaggtgttttgagttttaattctccaagtagttttaacattaaaagggcattgctgaacttccttggtggtccagcggttaagaatctgcctgtcagtgcagggcatacgagttccctccctgactgggcacgggggcatgtaaacctatgagctgcaactacgagcccaagtgccacaactagtgatcccacgtgccctagagcctgtgctcagcagcgagagaggccactgcaatgagaagctccagcaccacagctagagaaagactgcacgcagcaacgaaaaaccagtgcagccaaaaagaattaattttaaacaaaaaaggccctactgggtatttaaaaagtaaatatagttgaatctacaactgataatcctattaaagataattcatccaaagacaagataccactttaataattatcttcttggtctaattaccctcagttcataagtacagttcttcttttatgtgaacttcctgttcttttgcattctgtcatggcactgaaattacgtatgtgtctttctcttcctcctctcctgccatcttttccccaccaccacccctcaccccacctatgcacccagactgtagctctgggaatgacatgagttacttacttacaaaccaactcctcaaagggtgatattttagttgaactgaactgtccctcaggctctcagaacgtgatttagacagagtacaggattattctctttccttctgaaaattcatgtgcccctccatcataaaaataaagtatctcatgattagttctggaatataaataaggtctcaaataaaattttcctgacatcactactcaagacaactgcttaatataattacatatttccttcatttccttctatttacataattcacaacactggaatcatacaaacttttaagcagtttgcattctactatccccctggagtacacaaggaaacattccacatcagcatatttttagtgtttaagaaaaaataatctctacctatttagaaattgaaaatatacacacggggaattccctggcagtccagtggttaggactccgggttttcactgcttgggttcaatccctggttgagtaacgattgagaatacatttcaaaacttaaaggaaataaagctagaaatcaacaaatatctaagatatttgggaaaaaaagtaagaaagagatgatcaaatacaaaagcaatgcaacaaaaaagaaaaatggagaggttactaacaaaaccataagttggttcttcgaagagagtaatgaaagataaacttctgagaaacttaaggagaaaagacaataaaaagagaaagtggcattactaatcaattttatattaaaaaaagagacaaaattaataaattcctgttaaccactcaataaacctcaaccaaaaggaaattatacgtatccctgcatctccaacaagtcaatggtagacgttctcaggagattcaacaacacctcgtttgaatacctgattcaaacccaactgtggaaatacattttaagaagagaatcaagataacacaaatactgattaatggataatattaagaaaatcattaattttgttgggtacgacaacagaatagttattaaaataaagcctaagagatacattatttaagcatttctagtgaaacaagaagcctgggatttacttttaaaaactccagcagaaaaaagaggggaggaggggacaaaattattagtaacctgaagtaacaggcacatgggaattcttttttttctattaaattgaattcttccatttaaaaagtttaaaaggaaacagagaaagcctgaatattcctattactatcaaaggacaattgcttaattttcccataaagaccaaatataagtatttttgcaggcatgtcctactgaactttcaaggaaaagacaattcaatctcacacaaatacttctagaaaacagaaatattctaaaaaccacacatggccagtacaagaaaagaaaatcattaacacagaagcaagaatacttaaaaaagagcaaaccaaatttatcagtgtcttaaaggtgtaatatcatgatcaagttgggatcatctcaggaatccaagaaagagaggtttgcatattcaccacagtaacagagaagaaagaaaacattaggttcaatgactggaataaaagcactggataaaagtcaatacccactcacgattttaaaaacaaaactacagcaatcaaaacctgatgggaaaaagaatagatatgcgtataactgaatcactttgctgtagacttgaaactgacacaagtgtaaatcaactatgctctcgtctgtagtcgcatctgactctttttgcgaccccatcgactgcagcctgccaggatcctctgtgggattttccaggcaagaatactggagtgggttgccatttccttctccagtgtatcttccccatccaggtattgaacccacatctcatgcattggcaggtgactcttgagtcaccagggaagcctgtgtaaatcagtaacactccaataaaatacacacacacacacaaaaaaaaactggtaagaacgtccttaaattgataaaaagggctcttccaaaacctaaaaactgacagcaattatggataatgcaccaacattaaaaatagcctcttcagcatcagaacaagacaaagatacccaaaacaaccatttctattcagtgctgaactggagtctctagtcaaagcaataatacaagaaatatccatgagtcaagactgaaaaggaagaaacataacttactgtatgcaaacaatacacctgtcaacagtgaaattccaaggcaaagaagtggaaatagtaagaggttagcaaattaaattgcatttctgcatatcagcaaaaaatgattagaaataattttaagaaatggggggaatcttctagtattagaaaatatacatgaactatgaaactaaagaccatctaaataaacagaataacatcacaaaacatatgggtacaaatcctcaatattacataaagacataattttaagaaatggggggaatcttctagtattagaagatatacatgaactatgaaactaaagaccatctaaataaacagaatatcatcacaaaacatatgggtacaaatcctcaatattacataaagacatcaattcttccccaatatagacctatagattcaatgcaatgccaatcaaaattctaacaggggacttccctggcagtatgctcccactgcaggggggcactggttccacccctgattggggaactaagatcccaaatgccaagcaataccacccccccacacacacaaaaaaaaaactaacaaattttcaaaccaccagacaagactattttaaagtatacacagaagaacctagtttccacaacaggagaagtactcacttcatgggttatttgtgagaattcgacaagttaatataagcatttagagcagtgcttggcacatattaagaactatgaaaatattacctattattattcaatagaatcctcactctattagcaggtaagactagcttatagttacaaaaacaaatttttataaggcacttccaatgtgtcatattgtgtttcctcaataaacacattattctcattaatcctccaagaatctcagaagtagttaaaagccacatatagagttcattgaggagaaatcaacttcagtaatacagaagccttactctaggccctcatcttgaggatttaacttaacctgtactacagccaaatctgctgcactaggttactgtttcaaaatatccaacatctcattacaaagttaggctccactgtgaaacagataggaaagctaacactggtagaccttgacaatgggttgttcttttaatggcaatcctgtattttcaacagacctaattcagtgatcactacaaaagatccactcaggtttcaactcaaagtctgattcaagtactcctattgtctaagatggttcactgttacaaccgcaattgtgtactccctatcttctacctgttgttatagctaaatatttgtgtgcatcttctttaccaaattttaagtattgaaaggtaagggtctcatttaacatttacatttcccatagcacctcacatatactcaataaatgaacatgataataaacagttccagcaattctgcaattgcacactatatttatatctgattgggtaatttacaaatttataaaagttctcttaacctttccttaaaacttgttattttcaatgattaaattaattaaatttggaagactatgccagagtgtcacgggcttccctggtggctcagtggtaaagaatccgcctgccaatccaggagacacaggtttgatccctgaatccggatcccacatgctacagggtaactaagcccctaggccacaaccaaggaagctcacgcacctacagcccgtgctccccaacaagagcagccatcacagtgagaagcctgtgcactgcgagaaagccccgctcaccgcagtcagagaaacgcctgcagagcaaagaagactcaagagtcgcatctactttgacccatgactaaacagatcttactatttcatttgattaccactgactgttctgagctagtctgattgtgcctcagagttctgcacatttaggattcccaaatgccatcagccaccactggtacctaacttagcacagttcaaggggtccaaatagctggggtttaaaacctaattcttacaagctgacttaatttaccaattactttccaactgagctcatgttacctcttctataaaaagcctacttattctacccccatgaatgaatggagttttttttaaaagaacgaacaagatcgttcttacatattaaaaaaaagtaaaattccaaagtatataaatgtatgtgtctattaaaaaacgtgtaaattcattaatcctctttttaaagttatataccatgcaggactgagcaaaggatcctcaggatcacttagtggtgtttacttgcaaacagacaaaatataaaagcagaaccatattgggcttcccaggtggcgctagtggtaaagaacccacctgcaaatgcagaagactcaagagacacgggttcaatccctgggtggggaagatcccctggaggagggcatggcaacccactccagtgttcttgcctggagaggcccatggacagaggagcctggtgggctacagtccacggggtcgcaaagagtcagacacgactgaagagcctgatgcccagcacacactgggtggggaggaatcgggagagcgaagatgcattttcctcaggcctctgagagaacactgcccctcccagggagagcccaagattagaaatgactgattctctcattttataggtgcagttagtgatccgtcactggcttccctgagactgtactattttgttactgaatagggactctgttagagcccctggaccccagctgaatgttctatgtaagtgagcaaatagacttcatttttagcagttgttttagagtagtagtgaatcttatgagaagtataacttttctgaacatttttaaactgcgaaaacatttttaaacaaaacttaaatacttacagactaagaaaaattacccaaactgtatcagttctatgttggtagagttaagaggtgggctcagttgcatctgtctcttcgagaccctttgtactacagccttccaggctcctctgtccatgggatttttcaggtaagaatactggagtgggttgccatttccttctccaagggatcctcccaacccaaggatcaaacctgtctctcctacattgcaggcagactctttacccgctgagccaacagggaaaccccaaagggttaagagtactaaagctcaataaatgtaacatgagggttttattttaacaatcaaacttccaatctttccccattaggttcttctgcaaggggcttccaagaaaaaaacctgattgcgagttcatgagcagcatataggaaaaagattactaaaaatgagagattatgtctttaaccagtttgtcataaacagaaataaaacccaatggtctaaaactagtagaaaagcaaatctcaaacaaaaagtagtatgtatgaagatgcaagggaaaaataattagaaatttaaatgccaggatttaaacaaacactgaacagtgggtttcaatactgaccagcctcaatccatgactcttactaagcttctcagcttcttccttttccttcaaggaaaggaaaaatataaaggttcaaataaatcaccttcccaggcccccatttcaacttgcccttcacagggattagttcagatcagctgaataaaatttacgcgttcaacaaataacagcagcaatctagaggacccttaacattaataccttgcaatttttactgtaaagagaaaaatttcccaactgaagagttttaagcaaaatatgatatgaacaaagggcttccctggtagctcagctggtaaagaatccacctgcaatgcaggagaccccggttcaatttctgggttgggaagatccactggagaagggataggctaccgactcaagtattcttgggctttcctgatagctcagctgttaaagaatctgcctgcaatgtgggagaccttggtttgatccctgggtgcggaagatccctggagaagggaacggctacccactccaatattctggcctgaagaatttcatggacttaatatagtccatggggtcgcaaagagtcagacaggactgagcaactttcacttttcaggatatgaacaaatctgcatgctctagcccactcagacaaagaagatgaagaataaatcgacagacgagtctagagtaaggcagactggtgaggaggttgctgctaaaggggcatcaaagaggtctatcagaagaactctctaactacagttgggggttacggagagaaagagagggatgactctgaagttactggcttggataacctggacatgcccgtatttaagggacaatgatcttgccagccaagaatgctaaaattcaacaccctcctccagcccatctaccaggaatactgtcctggaaaccaggttccaagaaggtaatgctcgtggtgttccatgcttgagagagaattcactgaatataggtaacaggagatagtcggcggtctaagttaagagcagtgaagtgcataagccagactacagtggactgagaaataggaggttaagatagtaaatgacagagagaacttttcctggatactaaggtgagcttctaacatgtttaatttgctgactcccctttctctttgattagaaatgtacaaatctgaaatttatcccattacctttaaagtatcccatgacaaacaccgtagaacggtatcacgaacaacctgaaatgaatgaactcacactatccagtaagacctttcctgcttactttccaaagtatcaaccgatcaacatcaacagcaggctacttctatcaaatagtttactgacaggtttccatatacagttctcagatgctcaaatataaaaggactttgactaaaatgcttcttcaggacttccctggaggtccatggttaagactccacacttccattgcagcgggctcgtttcaaccctgggttggggaaataagatcccaaatgccaggcgatgtggtcaaaaataatgtttcttcacctgagtatacattcagtccaaacatggtggcacaaaatgaggctaccaggacagattttaatctggtttgaaaagttcagcataatacattaggtttatccaatggaccatggataagaaatgtgacttatttaaacaaaaatgaatttggactaaacatgtaggaaactagtgttgagtcaaaacaccctttcattcttacattctgattctgtagattacccttggtgtcttctatatttctgtggtcctcacagaagatttagctgtatcatctcttgtacaagaaatacttagctgagaaactgggcacacgttcactactgtaaaatatataactgaagtataactttcaaaattaggattactaacaatataaccccaaacagtggattatctgagtataaagaaaagtttaaagctacaaactaggatgcaaaactgaaataattttggctcaaaatctaattctactgcataagagaatctcttgcacttactaattttttccccatttataaagttcaaactttattttctgaataaacaggcttactttttgtacttcaggtaagctgaattcaaataaaaactcagttctcttaaactgtgtacattaagcgaaataccggtacaaattattctgaaactagtcaatttgcaagtatctgcttaaaagacagaatctatccatccactcctttaagctagctttctctgtgatattaaagggcttccctggtgatattaaaactgcttttaaatgaatatacaatccagatctcaaaacctttctttaatccctgtggtggggccagaggatgagtaggaatgggacaagagtggagaggaactgagtcacagcaaactgaaggggagccaggtgagtgacaaggtgagcagagatctgaggttttaaaaaaaaaggattggagatgaaagtcaaatctacagaactttaataattctgaaaatggtttggctagatatgaaactatcaatctcacaaagatctctccttaatggtttggggcacttctattcttaaattaactcagctgttttgggtacttaaaaaatcacaatgttggcctttaaaatcaaggcaattttgtaaacttcatgataaataacttctactcagttctgtaattcagaagtattttaacactctgtagatgaagcagaattaatctaaccataaaaacccacctgtcaaggaaaagatcacagacattcaaaactacaatactgagcttaaaagaacactaaaaaatataatgaaatatccacagtgggggctccgtggtaaagagcctgcctgtcaacacaggagacaggggttcaatccctgatctgggaagatcccacaacttagcccgggcactgcaactactgagcctgtgccctaagggcccaaaagccaccactacggaagcccagcgtgtgcgccccagagcctgcatgctgcaagaaaaggtgctgcaatgagaagcccgcacactgaaactggagaaaagcctccgcagcaacaaagacccagcacagccaaaaagtatattatattaaaaaaaaaaaaaaaaatccacgctggagagacaggtaagacttctaatactttacaaaacacctctaagttatacaagtttgatcaaagacaataatcaatataagttttataatcaatattaagttttataggattacacagctatgcatgttggctggtgctgaatttcaaaagccaacaggcaaaagcatgtattaattttcaaaatatgcattcttaacagtcttgcaaccatgacatcaaaaggtgtacctatacttggggaagtgactgacctgaagttttattctttaccctaacacatttatgatatttcttggtgtgaaattaaaaagatgaggacactattattttcatttcaataaatacccactttaccaatcaactcaattacatgtttatattaagcctaaacggcatgctaacttaactaccactgatcatttcttgattttgagtatagtaacatcttgtgagcagctttgctctgagggctggatttgtttgcctaattggagtttgttccaagggaatgcctagggggctcctagagaagctatcatacccctttctttaaaaaaaaaaaaaaaaaagcttcctagaaactgtacatctgtaaagaaaaagagcatgactgtttttttaatcggcttattttctacatgtatgacaaacaactagtaacaaaacttggatcttaacaaaataaacaattcactttgaaaattacaacttaccaaaaccctcaaagacaaaagatacgtgcatgtccaagagataaacgacaaaccctagcctaggtcttccagctattaggttctgtcgctgttacctattccgtgcaaagcttctggaactactcttcccctgaccaggccactattctcataaaatgtttattctgatggtgagataaatgtcaaattccttagcatatttctgtctttttcaaaataggactctaatatccttttccatctgtctcctacgaaaacattccaccatatagtcatatgtgttccagtcacatataaaccacttatgtttgttccacctgaaataccatgccaactttccctacttcttgtttttgtttttgttttttaactgccccatgcagtttgcaggatcttagttccctgctgagagactgaacccaggcccttggcagtgaaagcgcgggagtcctaaccactggactgccaggaaattcccaactttccctacttctaagaaaaggcaggtcatgctctcctacccttattcaaatatacatttcctctatgaagtttttccctaatacttcaaacccattctgtcaaaaataatccctggacttacctggtggcacagtggataagaatccacctgccaatgcaggggacacaagttcgatccctggtccaggaacattccacatgcctcggaacaactaagcccatgtgccacaattacttagcctgtgagccacaactactgaggcccactcaacctagagccagcaagtagccgactactgagcccgtgcacctagagcctgtgtttcccaacaagagaggcctgtgcactgacagggaagcccccgctccctgcaacgagagaaagcctgcctgcagcaagagacccagtgtggccaaaaacaaataaatatagaagctgtacatgtcaagaaagaaagaatccctatcctctgccttcatctaacccattttaacaacttgtatcagagtataacttatggaaaaactgtgtagatatgtataccaattccagcagattctaaaggctttgagaccagagcctgcaccttgctttcacctttatgtgtgaacacttataacttggtaggtagtcaatgtttgttagctgaaatgaaaagttttccaaatgaaaacagtgactactcaattcaggagaactgcacaatttcaaaatgtgcaaaacttaactcaccaaaacccctcccccatccatacccacacacatctcttcctatgcttgctgtctcagtaaatgacatcctcatcaatcctgctgcccaaacttgaaatctgggaatttccctctctggcaatatcctgacatcaccaagctctgctgaccacccatgccccctcaaacctcacttcatctataaacccaggccactctcatcacaactgaaattctgaaacagttatctcactggtctccctattttctccttttcctttccaaaccattcctcatttgtcgatcatctaagccttagactctaaggtacaattctgtctatacattttaaaaagctaaaatggaaagtctaaactctagtaagcagtaaccccagtaagtcctgtatgactggccccttactaacctatgcagttatatttcttgctgtcccccaactagatgaaatgtaaagattccctgacagaccagactcttctccttaacctgggctcactcttagcaaccctgtctatccttcaaatcccaagatcagattccagtttcttcaaagacagccactagagcaacagtagctacaggttaggtatccccatttctcccactgtacactgtacttcccaaatacaatactggccccatcagacttgaatgttgttctcctccccttatctgcaaaccccaggaaggaagggtccatgactttctggattaccaccatattcctcattctgagcataaatgcctagcacacagaaaatgttggtccaacacaggaaaactaactggcagcctgtcaactcttttaaactagtatttttcaaacactagtcatgagccacaagccatagtggctcatgaaatcaatgtagtggaccacaaccaccacttttaaaacaaataaaatgcaacagaaaatatcagagtagatcacaagaagtaagggtaaacaggataagcactgtttattcacttgctgagacagggtctctggttctccatgtaaaatgtagttcttattgggtgtggccaaaaatactgaaaagctgtaccctgctccttctacttttcttcctcctcctttaagaaagttttaagatccagataaataaaaaataatgctcaaccacatgattctttagaaaaaaagacattcttaccttgagcatttccagtaagaacaatctttcttaattgccttcaatatgtgacagtatgtatgtatgtgtgtatatatatatatacacacacatatatacacactcttgatctctgctcccatattcttatattctcaaaaaacttcacatttgagttgatgatgtataggctaactctgcaccataagccttacttttaagactactctcattatctttagccaacctatctatatatccattaaaaaatatacctagcactgcttttgtggggtatatttagcagtaaggttaaaaacacttaacacttaaaaagctcatactatgttacagcaagcaccatcctaagcgtttttaatatttacttgtttcatttagttatttggctgtgcctggtctcagttgcagcatgtaggaatctagttccctaaccagggatcgaatccaggctgcctgcattgggaccacggagtcttagccagtggcccaccagggaagtctctattctaagcatttaataaagagaattctcatttattcctcaccacaatcctacactttgggcactacaggtgaggtagctgagacagaaagattaagtaactggcctaaggctcacagttaacaaaggcagacctgggatttgaactctgctagttggactctaaaacccattctcagccactcattttcccagtagtgtacattttactttttttcccagtagtttaaattttacactctcaactaaattactcctaattgactttgggggcatttattttaaaagatgtacattcaaaaacaaatgatatccaaattgttcagaataggccttaaaacctcaatatttattctcttaaatctttttcaagaactgaacagtaacaaaaaattttcccataaaaattttagaagaaaactactatccacctatttttaaaaaatcatctgcaatagccaatgttttaaatattttacacgtggcataatttaagtttcggcttgcccattaatttctcttaatgcctgccatagtggggggggggatcaacttcagaaattctcaaaggaggaaaccttaaaatttaaatcacaccaaacaagatatcttatttttccattaattgttgggtgtaagaactggcagaataactcttgaattgtttttgtaaatataccaggaagaagctttttacactcccacttgtatgtgcaacattcttcctactctctttttctttcctatttactgcttactgttcttacaaacccactatgcactaatactcaactttttgttttaattcccctccgttttatagaacagactaaggagaaggttcaaaagcaaagtaaaacagaaaacaatgccaaaaggcaaccaaggcagaaaccctttcctccctccccttcatccaatcgctggacatggcaatgcatttcttacctccgcaaaataatatgaactctagctggaaaagggaactctactgtgacacacacaagatttacaacttaacaaacgtcatcttatcttactatcaaccacagacaactttctgggagtgccataaatgaacttacaaagtcttaagaataagcaattgccagagtttaaggcacttaaaatgttttgtaatttaacttaacacaaggtcagcaatactttgctggactgaacagccataactcaaaaacttcagaaccacaactctcaagcaaaccttcatgcccccaaaataaaattaaaacatagttatcactggtgtaagagctaaaaaggaaatagtctccaatcaaaaatattttctttgatgataaaccacaaagacacaatggtgtcctaagaaagaaacagacatttaaaaaatccttgccatacacacaaaaaatccattgcataccataatctagtgttcaaatgcagctatagctgtcctttgccttcaaaatgaaaataggcataaaatccaagctaattctgacacagaggacactgtagagccacaaaactgtatcaagaccagaaagagcctactaaatataccagatcatgctgtcatgcctctttccagactgtccatatagcatcaagtgtatacaaagcagtgctagaacatgtccagtgagcaatgaaggcaacgcatcatccccatctttcccgtcactcaaggtatcaccacaaacaggttcaagaaatatctgcaggacttacatattaactattctggtcaataattttaccaaaacaatttgttttaaataaatgcttttatgatgcagggcggtaacagacgtggtaggacagaaagtcatttgatttctcaaataattctgatctaaccataccaagttatataaaaatttcaatggatcatgtgcgaatattgagacaagaacataaaaatgcaaaagctgtaattctctttctcctcattttgacatgtaaaacttgaacttaattcaagatactataatcaacctggaaaattttttagaagaatctctgagaattaaataagtcattttcattctgcatcagtggataaccttagaagttcaaatttggagattcaagcactaattttgttttgtaatgttttagcatgtcaacccaattgggttccaactttcttccctataaaactggcacacgcaaacactcttggcaggtacacgtacactattaaaactgcaagcctcaatcattcaaaaacagtttctggagtctagaatttggggatcattttgaacagttctagataaaatcaatcagtaagtactgaggcataacttacattcacatttataaactacctagggtggcaactctaaaaatggagaagttacaagtttaaaatgtaaagttttaaagagtgaagtgtttctattaaagttacctgcaaacttaaaactacatcgtgcttgatgtaaaaagtcaatcgatcgaaatacaatggtgcccaatgtgaagttcacagggggacagtatattcttaatgctcattctccttcctccagccccaatcaaaaaatccagactggtcaggattaaaaattagacaccaaccaattcctggattagaatcttacgcggggcggggcgggggtacaaaaatcaatcttcactacaaaatttagagaaaagtaactaagataaactcttaacactaagactgagttaaatctcaatgttgaagaactttttaaatataaaaacctacttgatacatttagtactcttacaattattcacaggtatttcaagtagcaaaacagtttctgtgtataagtcaggtgacacactaccaaaataagttaaagttaccaagtacacagatcaacctgaaaagaactatctgaacaacagagcacagtctccctttcaggccttgcagtactcccaagactaaactgcttaaatgaggaattggcaaaatagtacaggtaaaaagttttctttacaatatccccaagtcactggctaactcaaatctattactatattacacaaaaactaaacagcaaaaactaccacagtacacaaaaactaaagaaacaacacaaaaatccacaggtggaaaaggagtctaaaggtaacctgaaagtcctcccgagcgacattttaataagcgcaaaggaatacgacactcaatacgtgtatgaattctgagggaaaaaacaggttaaaaaaaatatccctgaagactacagaaacttgaagtaatgaggacagatcaaagttcatgtactgtcaacgttacaagcctgaagcagaagaactctgcaaaaatcctcaatctttgcaggttatcttaaactcaggatacatcttttaaaagcaaaaaatccaaaacattttgccatatccttacattttcacccatggaaaggaaaactacttagaaccatgctttagaagttctctacaaactcaaagggtacatttaactccattatgcactatcactggcagatggagggatgacgttgagcctgttttctcagggtgttaaagagatgctccgtagtaaaggggaacatcttgtagactgtcagatggccagccattcttcgtcttcattatcctggcaccttaaacaactatgacagccaaagagaaggtcggtgcccatcaggatagcaccaaactcactgtgagaagggaatgatacaagtctcatttctcttgacaaaaggctggtccacaactgagtgaagtaaaaaatttgaagtttttttaaactgcaatctggatccccatacattgtttcaagtgtaaaaagacaaaacctacaaatgcaaaacttaacacacattttaaattcttgtatcatcagtttgtgggcagttcttgattgggactctcaatttctagtcttgatttccaagtacataactccacagaatcagttaacccaactcttcccaaagtaactacaaattgcaaagaaaatgcctctgctctctcccaacctaaaaccccagaaattcagacattttggtctggcaccagagaaatgagagagataaaatgaactgcgctccatattgattttaaaagcaaataagggggcggagggagctaggaatggttagtaaaataattcataccaaatttcaggtttgacgtttaacttcacatcaagcctgaaatcctagatctcacacccacaaacaagtaaaaccaagaatttttacaccttcattctcaacagaaaattttatgcaaaaaggaattcttgaagagtagtagaaagtagagaaaacaggacaagtaacgatcaggaagaaagaattcacaattcctcacttaaccacaaattacaactaaaagtgcaaaaaaaaaaaaaaaagaaaagaaaagaaaagaaaagcccttacactcaaatgcatttccaaaattaaactgcatgataacgacaataaaggccatttttacagcaccactcaagagccctaattccagaaaacacatcgatatgacatagtgtggcaacgaatgtttaggaagcaaagaaaatggttcgactactggacgccttcgatcagctcattcaaacacctttaaaatcaatcaaaaggcagagaactaggaagagaaaagaaaatatggacgaataaaggtgttgcgagcagaaaagattgagaaggaggtggaaggccagggctcccgagactaacctgtgccatcgctggcggacgccgagagggccggagatgagagtttaggccgcttggctgaaggcggccccggttccacgacattctcggccatttttaattctttcggagatacgggcgaggaaaaggagaatcctcgggaaatctcttcttcagcccggggtccccgcccggatcccgggggtgggcttagggggctccgccggcccccgaagggggtgggggaaagttcctttttctctccgccggatcgcggtggctgaagagggatgtggactcgatagaaaaggtaggggcaagtgcgaggggccgggcctgggcccaggcccggaggagggcacaggcacacaaatgcgccgagcgcgtccgctgcggcgaatccccgagaactcgcgactctagaggcgcagtccccgacccgccacggccggcccctgcccagccgaggtctctcggagctccgccgccgccatcagcttcttcctcctcggcgctgtcctcctccttctcatcgccacaaggaggcgggggcgaaaagcggggagaggaggaggcgacaagagacactcacctcctcccggtgccccctcccgg
